United States Patent Application Publication US 2014/0230087 A1 - sequence listing, part 20

SEQ ID NO: 13384 - DNA, 19407 bp, Vitis vinifera
  Intron number 11 from transcript GSVIVT01009811001 (locus GSVIVG01009811001) derived from phytozome v7.0 (chr-ID chr 18; pos 11433199 to 11452605 reverse strand)
atttcattgtcaaggaaaagaaattttctagtcaggtaatgtccactggattcttgctggttaactataagcttgatatgtttcgtggaaattatagagtctatatctctcatattagtacatgcagtcataatataacctttgttatcttgactttattgctgtattgtattttggcttaattattttaggcagttctctttttctatcagatgaagacattcaagtagtatgaattgttttcctccttaagtatgttccaggaacacttgcaaggaagagaatttggaatatatatagtatgatttctgaactttcagcatatctgatatgggttacaatgtgataagatccaggttactcaggaggagtgtactcatggcattgcctttgctatagctggatgggcagactaactaccaattaggctctaggcaagctgtggtacccaattaaaagtggtaactccttcagaaatacaaaggaggtgtttaaaacctgggggttcaccaattaaaagtggtgtgaatttatttgcaaattgaggttccttatgcatattaattggacatttgggacatcaaagtggtgtgaatttacaactcaagtgcctctgtaagagaaatgtctaccctaagaattacatgattgggcatattaattggacatttggcacagcaaagtcatgtgaatttacaacttgaggttccttagcaaggagaatgcatgccctaagaattataggattagacatttagatcatataattcctagaagtaatagtagacattaaaaatttggtaggcccaaatcaccttcaaatcaagaaattggagtttgacaaatggctgaatatttggagggtacacgtgggacccaactgatcaagcatcatatgttttcccaatgacacatggcaacattttgttaggctatgaaattaagtctagcaaagttaaaaaattaaatcaaatcaatgccaaatcaaattaaagctgaaagagaataaaattgtatattatcttattggaagccttcatcaactaaggaggaaattaccaaaattagggaatcatcatgcaaactaaatatttggaaataccaattgaatcctaactgcacctataaatagaggtgtgctccttcagtataaggatctttagagaagtgagccaaggaatccttaaaagtctacctaaagttgcatgagtatgtggattccacattataagtttgtgagaaaataagatgcacaaaatgtgtgccattctcccaccctcaataggagaatgtggattgcacactcaagtttggtggaagaatgacacgtgtggaatccatacgagtttgtggattccatatttgtaagtgattcaagttgtttaagtctttaagaaagagaaaaataaaggaacatccctttcacatgctattattttgttatcaacaaattccattcgagaacaaaatactccaagcccatgattacacctaagaggagatacttttctcttttgtgataaaaatcaaatgattcaccataaagggtttttacatgctctctatttttttaataaatctgaattttagtgctctctctattcttttcttgtttaaatttgtaggaacaccggaaatttgtgcatagaaatttatggacaactggtatccttgtcatctacttcgccaaccaaggccatcatcaaaccaatggcttcgaagaagactctagttgcatgcgtcaacaaaggtgatgacaaggctgtcattacaccatcgcacaacacctttatggaccatatatcttgtagcaattgaagatgcccattacacttgcaattgaagcaaagacatgcatttttgccaagtggaaatggtggaagcacacaacaaacaccaaccagtcatcaccttagctcaatggggggaaaggattaaaattctccatctaagaagtgtgtagcgaccttgaaggactttgaggaaaagtcattttcctctgcctttgatgctaactctagcatgagtttattgtcacacacttaagtgttttctaagcttatatgtaagacacttggataacttaagtcacttgacgttgctaagtcaactttccccgattttagcttgctatgtgaagccatgcacacgactaagcaactaggaatgacgaaggaagcaacactaagagaatttaaaagaatgggacttgtattaggcaagaatgccttacaaggttaggaattctctcaagtgcttggtgttttggtcaaatgaggtcatcctttatttataggcacctctggaactctctggaacccttaaaggttcctacttctttagaaatatcttaaacgtcctgtataaatcctatatacaaggtatgtataagagatatttggaactctttagaaatttccacacttttcctttatctttcattcattgtgtagagttgtgtggatgtccctagatttctttagaatcttctatactcctccactcgtagatgacttcaggtagttcaagaagtttcctgctcccttatataagtcaattgaggatcattttgaacaggttgtgacattatgtcctggattactaactggaatttcaaaagaagaagtgtgaccaaaacattctaactccactcctatgatagtcaaggagaaagatatgtcaatatcattactcatgaataaaattgaggtgaaaaatgtgtgttgatactcgttatgcattgatgtcgatgcaactttatttttccaacaattacaagatatgataaccaatacaattagggcttagtactgtggaccatcacataggtttcttttctactagaagctctacacaaataagatcgataaattgcacgtgcttgcaagttttcaacctcctaaatttcaacaatttgatggaaatgggaaccttaaataacatgttacccattttgtcgaaacctataacagtgttgttatagaagacaaccttctcatcaagcaatgtgttttctcactttgaggaaatgcctttgattggtgtatggatcttgagcctgaatgcattgatagttaagatcaaatagaatgggaattcttaaattgcttttatagtactgggcaaactatgagcatgatagagcttgctaacaccaaacaacgaaatgattggtagtggtggactacattaatcattgatgctccttaaatcttgactataaggattgactatttgcagccttgacggtagagatgtgcctacaaggatatattttagtttgctatacatccttcaacggatttgacccttcacttctgaagggttagccacccgagcacatgacatgaggcttagcatagccaactatggtataaagaaagactctattgctgagtaaagggagagaaatgatgagaagaaggccaataagatcttaaaaagactactaaggagttgatgataattaataagcctcctattaaaatctccatgtgagacaaaagaaaagagagcaataaggtaaaactgatctaaaaaaaagaaaggcatcgccctaccttgaaaaagatgggggagaagaaatatcattttctagactcagatatgtccaacaaattggaagacctacttaaaaaaaaggtcatcgagttgcctgagtgcaaactccttgaagagatagggcaagttaataactgaagtgctctaagtactactagatcatcagtcacccaatggtaaagtgtttcaccttaaagaaggtgataatgaactttgtaagatattaaagatccagttgaacttagggaggaaagtggtggagtccaaccatgctactcttacctttgggtatttcaaactcatacctctataagccttaataagaccactcatgctatcacaccttaaacacttggggcatcttttagtactagccaacctaaagcatctgtcagtgtggtgctaggaaattatcttagagggggcattgttgtgtagcaacaaaatgaaataaaatattaaaatcaatattaaattaaaaatatatatataaatgaacaatgcactaacataaaataattaatcatcattctcttaaaaaaaattatattttatatttttataataagcttgttaaataattttaataaaatatgaaaaaataatttaaaaaatgtaaattgttaaattacacacataatcacatgtggcttaccaactatgaatctatgaaaatatccaaaaatattagttaaatatatttataattaattttaaaaactaatttttaaactagacaaatttaataaaaattcaagaattacactcatatatatatatatatatatattattgttttaaaccacttaagttggtcattatttatttatatatatattttggttccttaacttgtcaaggataacattttagaaaattttaattctacttccaaatttaaaggctcttcatgggtaagtcaattctttgtttattttttttttcttctagtttaggggaacaatgtaagactttctcttttctctcaaggaaggacctgtttatttttcaaggttttagggggttaccagccctctttaaacctacagtggctccaccattaacatccataatgcacaagcagaatttgtgcaatgatgcttccacccagctcatgcataatagcgagttaactatggatgatgaggaaggacggaccttggtgactcagtgaaaaccccgtaggaaccagttgtctcatccacaacccaatccttttagaaaggaatgatgcaggtgaaacactcgtcaacactcgaaaagaagagaaaaaagaagccaaaaaagaaacaattggtggtgcaagttgacaacctctcaaaggagaaaactttgactcccatctccctaggggagtactttccccaggattcttcaacaatggaactattacaatctgtggtatggtttcctgctatgaaaaccctgatgaagatgaagctaagtaaaaagaggacacccttactattgggttggaccaatccaaagaagaggaggaagaggtagtggcaagcctaaattgtttgccactagatttcaacattcaagagtcgttacaaattcctaaagaaatgagaagtactctgatttgtacattaagaaaaccaaaacattatgttgcaaaaataaatgaggtagacaaatgtgaagaatttctgaattccttttattgattttttggtacacaccatacacatatatttacacaaatgactgaataagaaaatatcaatccagcttgattctctcctaaaattaggaaactgaatcctaaggaaatatcctaaatgatctctccttttttattcctaaaatactttcctaaattaaaaccctaactttgaatgccaaatttcaacaaaatgaaaaggaaaataccctcattgtgctacatgttgtgagaccatcatcttcattgacaaggatcttcaactaggtttaaaccacataatgcaggtgttgtgtttgtcacaccacaaagtcaaatactcccatactcattggtcttttgcgagccttgtgcaaacaatgttttcaagtatcaagccctaatcattgagcataaggttggtgttttgctaaacatagtggaatgtggttagaagtgtagactccttaacattgggcagttcttaaataccaggagctaactcataatagaacagtcccataataggttgtccattgatgtagtaacaatccaatagggagatagagacttctatggaagtgtggagagtgttggtagtagaacactaacggtctcaaaaagctttaacagcgagagcatggctaatatagctgaataaggaggcaaagatggcataaaaaactttagactcctttagtaccttcccatgacggctcaagatgtactccacctactcccaataccctgtagtgaagaaagattctctaagagccctaaatgaaatgccccatgcaacctctcttgaatcaatgcaatgacttaagttatgttggatcttgtcattagtgtgattacaagagttttacaggtacaacattgggagctacctttgtttggaaagactttggatgtccaagatgggtgagcttgcaaaacaccacccataaccaagagaagccacgtgttgagtcctctcttattgaacctcatacaacttgagaactaagaagtgtcatatgtactaaaagatttgttccttcttcaagttcatagctctcatccttaaggatggtgatagtgtcccttttaaaacacttgaagaaggtcatcttttctaaaaaaatggttaatggtctaagtaaatagttaactatttgcttgcatagaccaatagtcaccggtccatcgttgattgtagtaatgatgatatagccaaaaaaaaaaaaaagaggaaatttttttttcgtgttcaaatatagatgataattttgagaatacaataatagcaaaaaataagataacttctaatactaaaagaacatagtagtactaacaacgagtaggatactatttgcaacatcagaataagacaatagttttggagaataggatactactcatcacactagaatgaaatagcataggagaacatgagactactcacaacattgaaagaatgcaatagcattaaagagtagagacttcttttaaccttggaagaatgctataataagagacttctcacaaattgtgtagatggtgcttcttgaaggtatccccttattttttaataaattaagaggaaagtaaaaaaaaaaagatatttactaaaagaaggaagaaaaaatatcaagaataggaaaatattcctgttaacatgaaagttttctttgacatcccataagagaggaaaaaaatctagaagttctatttgtcataaaggaaggaaatattggaaattagaaaacttcctattgacatttgaaaattttatgtgataaagaaaaaaaagaacttgaagccccacattgtgcgcatgacaagtacatgcatgtgcaatgctttgaaatggggataatttgtagacaaaaaaaattagcgtgccaaatcacctttaaatatgctagaaaccttcgattgctccattccctggtcctgtatctcgtagagtgcatgcattctatcctagccttctttagatttaagcacaacggaaatatggcattaaaaaacctatactgatatttgatctagagattagaaaaactatatttgcgatctggatgttcccatattaaatctaatcttaagaagatgtcgaatctgcgatagtccactgtggagctcatctacgcaacgatctttcacctaatctctctcttcttggattctagcacatgagaaaggtgggatcctcctcctggctaggtattttctcaatttctctttggaagaaggtagacaaaatgccaaaatcctaagcccaaaactgttaaggaggtttatatagggttctttatgagcttaagtgacttgagcctaaactaagcttaggttacctaatcctacccacttgagtcctaatttattaattaatcttaataggctccaattaattattttgtccaaaccaccaatccaaaaagaccattcataagatctagtacaatcttacatttttaccaaaatgcccttatacatacttatgaattataaacccaaatccctcaaataagatctgacaccatgaattagaagcttgaacaaggaccactgggacccataggaaaatactagcatcatcataatccaattgtgaagttgactcaacattctattaaagaaagtcaattgcacttcagtatcttataaaattatgagacaaagtttgagtccctaatctactattcattgtaagtaaacttcccataaatcggtatttgtaatctaacaggatagtgtaatcaacccattaagattacctctctaatccttgaattacaaatccttctatcatttgatcaatggatgtactctaacttataaatattatatgtcaaattctatttaaggaattactacggcctcagatttcatgattacatgttctttggatcatccaatgagatacattatctcaatcctataagatatcaaagtgtctttatcgaggatacatgttatcattagcttcaatcaacagtgattcaatctataaggaatatatggctactttaaggtctcacctgtaggtcaaagtctcctattgatttcagtataaactcaatattctttcaaggttgagagtttatgcaatgtactttggttaattatgacaacccgatagccttacattatgattcactataggtctttttcaatgtgtaaccatacatattagtgcactcaccatgagaaactcattccgatagccaaaacaatttatctctccaattaggaggtagtgtactacagtttttgttgtagtgcacaaatccatgaaccaactgtgagctacttatcatcttacaagaaatccatgacttgtatcttctatacaattcctaatgcacctaagtcatgtacaatataagtgatataggcatgaatgctcaaatcaatatcaatgcatataatggatagataagtggaaactcaagtttaactttgttacatcatgtcttgattttaagggctctatcccaacaaaattagcaaattagagtttataaattgtagaattttgcagtgtacacatggaaataaggtcatcaaacatcatgtgtcaagctagtgacatgtgacaaagttttgtaacaatataaaattaagtcttgcaaaaataaataaataaaataaaataaatacaaataaaaatgaaatcaaattaaattcacaaaagaataaaaatgtatattcttttattagaagacttcatcaattaaggaggaaatcgccaaaattagggaatcaaattccttaaatcatgtacattaaacattcaggatgccaaattgaatatttcttacacctctaaatgaatgtggctctcttcagtgcgagaaccttcaaagaagcaagctaagggtgccttaaaaattttcccaaagctccaaaagtttgcaagttccatgctccaagtttatgagagaataacaagcacaacacttgtgtcactctcccaccttcaaagattcaagttgtttacacccctatgagagagaatcaaagaaacctccatcttacacactcgtggaaaaatattaaaacacaacatacatgtttttcttttgccatcaacaaaattgagaacaaaattactctagtacgttgatcacacccaaaaagagatacttttcttttttgggatagaaattaaaggcaagcaaatctaggattcatcatagcggatttgtatgcacttcttattttttttaataacttaataaatttaaattttgtgactattttttttcttgtttaaatttgtgggaacagtggaaatttgtgtgtataatagtcacacagtttttgaacaatttgagccatataatgtaacttaaagtttagtgatgtacaatgatcttccatcctagtgtatttgttgaaattctaccaaatgaaatctccctaatcttagagatatctcattctctatgattttgtatctttccttgtctgtatttgattactacttaaaaagaacatattctagataataattctcatgagtttaatatattttgagtagtaattatgtcttaaacactcaattaacatacttgcactcttacagtgctactatcaattcttttgagttttgcaagtgattttaaggtgcatttgatgccaaaatgtgcataaaggataatgagctcatgagaagataatgaagatgatgttggtgatggacaaaatgcttagatttgtgcaagtaatgaaacagggccaataagattccagaaggccaatgagatgatgtcaagtgtccacttgaatttggcctataaataggagtttgaaacttttattaaggacttattttgaagacttttgacacttttgattttagaattttctaaagattttttttttctctctcaatagaattctctattttctttcattttcccttattttctcactagccaaacatgtcttgtaagatcaaatctccaagtatgcgtggttgaatctcatttttctcgaaggaagaaggatctaaaagcaagatctatggtgaattagagaaacaaagcttaatttgtcaaggtaatttgatccaattgattgattaattgaattttggacatttttatcttcaaattatcttaaatcactactacaatgcaaactaagtagatttattaaattttcaaaactagatttagtgagattgaatagttgcattgtatgaatcaatgaaagatgatttaagatgaattgaatatatggttcaaattggtattttggattcaatcacttaatttgaagaaaaattggattttaacttaaagctaaattaaaaatcaatggagatgagaatttatattttcaatctaacttgataaaaaatagattttaacagttattcaccacagtgattgttttctagaaaattctaactccgatagtttttttttcctattaattttctttcaaagtgtacaggttgaggaaataactatatgggcttaaacaatccccaagggcttggtttggaaagtttacaaagttcattgtaaaaaggggctacaaacaagccaaagtgaccccattttatttattaaacattctactcatgaaaatgtatttgccttaattgtgtatgtagatcatattgtggttactcaaaataatttaattgagattggaaaattgaagtcttatttggaagttgaatttgaaattaaatatctaggaagtcttagatacttcctaggaattgaggtagcaaaatcaaaacaaggtatttttatatcccaacaaaaatgtgttggatttactcaaagaaacaagattattggggtttaagtcaataaaaacatcgattaacttggggatgtaaaggaggaacctcctgttgacagaggaagctatcaaaggatgttgggaaagctcatttatctcttacacactagacttgatattgcatatgtggttagtgttgtgagttaattcatgcattctccactaaaatctcacttgaaagctgcgtatagaattctcaggtatctaaagtcttctataagtaagggaattttgtacctatttaatggaaatctttggttagaggcttgcactaaggactgagcgggatccctaaccgataagaaatctgttttagggtattgcactctacttggaggtaatcttatcacgatgaggagtaagaagcaatccatggtggctaggtctagtgaagaggctgaattcagggtcatggccctagggatttgtgagttactttggaagatagtatttacagattttaaagtcaagactcaagtgcctatgatggtctattgtgacaacaaagtcaccataaatatagcttataatctagtacatcatgataaaactaaacacctagaaatcgaccaacatttcatcaaagaaaaaatggacagtgagcaaatttgcactccttatgttccttcaactaagtagttggccgactttctcactaaaggtctattaaactcaatatttcatcaattttttgacaagcttggcatgcaaaatatttttgcatccgcttaagggggggtgttgaaattctaccgtaggaaatctccttattcttagggagatctcattctctatgattttctatctttccttgtatgtattctatcttaaatggtagtgattcttataaatatataggctgtcattgaccctagaattatgcctagacagattataatttcctagaatatttactcccaactttgtatatactccaatgtaactcaattattaatcatcaatgaaaaccaattttctccactgtatctttggatttctagtttagtcatttcctagatattttattttcaatattcctttttgcatgagatacaaactaccatgaacacttcatagtgcatgaaatgattgttgaacatcgacacaacatgaacatcttgtaggcatgtcctacataaagagatgaatgcaatctagattctttataatttttcttgcttgtttgttgcctatttatttgattatatggatatttcagttattgaaacaacatccttagtttaattttcaagagattttggtcattgagcctacattcctaatttagtttaaggcgattttaatcattgggactgcactctagattttctcttagttttaggattttagtcattaggatcatatccttggggtaggttttggttatctcaaccttgatttcattatctttcccatggattccgatcatcttaactgcattctagttagctttgatggtcttgtactcaacttcattatcattcccatggattttgaccatctcgaccacaccattggtagttctagtttgtcgagtctttgatttcatttcgtttccatggcttacagtcattttgatcctacccttggcattatctttgtttctcaccctttgatcattgtctctcatcaccttggatttttatctccaatttttgtcttattttggctttttttatttaccatttgtactatcatcagaatttcccttgtgggcattttttcatatgttctagactctttcttagttaattgcagggtcactttacatcttaagtaattatgtattgtactaggataatttggtggtctttcttgttcttcgacaaagcttacttcatttcatttctatacatgtgtattttcacttgtggacttcgccaaagaggggcatatttataaaccctcaaagttgtcatttgatttaaacttgttagaaagtcacacgactataggatttttttttgtaaaggaaactatataaatatagaatcccatgtatagtcaattgtatttatatcagtccctgatttgtagggatttatagggtagtttcttttttcgttttgtagtagcagttgtataggtatgagcctagacctgtaccttgaattaattctgaatgaatcaataatttttttttttaacatggtatcatagccctaggcttactgaggttttttcatcgccttctggtttgaaatttctttttgttccaacaattcttttgtgtctttactactggttcggtgttgctttttttgtgatttgatattcttggctgttgttggttttcctgttttctgctgattgattttgttttcattcccttattgctgattgggtctcttgaaattttttcttagaaatctcttttttcttctatcatattccctatgttcggaatttccaggtccacgtttttatctggtgatatttttttgtcgtattttttttttctcatcttttgtcatttcttgaagaattattcgtcatgtctgaggtgtctgaagcaaccaacacatcgactgtccctgcatttgaaacacttgtgactcacgtactaggtgagcttccgaacattcaagtggcatacaggttgagcgggaagaactatttgcagtggtcacaattggtgtgaactttcttgaaaggaaaaagaaaattgagccatttgacctaatttgagccacttgaagtttcacgtctgggatgaggaggattcaatgataatgtcatggttgtggaattccatggttccataaatcaacagtacgtgtatattttttactatggcgaaagagatttaggatgctgtaaacgagacttattctaaggtacatgacgtgactcagatttttgagattaagatgagaatttcttatacaagacaaggtgatcgttttgtcattgaatatgccaatattttgaaaagtctatgtaaaaaattggatgattatcaatgcctcaagatgatgtgtaatgaggatgcaaccttactcaagagatttgtggagaaagagagaatctttgagtttcttgttggcctcaatgtggaatatgattagaaacgaagccaagtcttaggcagggatgagttaccatcattgaatgagaccatctctatgattcgagcagaaaaaggaaggcaaagggtgatgattgaatcctaagcagcagatggcttggctatggtctcaaacaggaatccgacaatgctttccattggtggacaaatcaggtttccaactatgggaatggcagggcagatttgtccaaataactggtgcaattgctataaaaaaccaggccatggaaaggatcgttgtttgaaattacatggaaaatcgcctaattttgggaagaaccgaaagagtaaaggtggacaacaaggtaatcaggagtatactcatctttttgctactcaaccaagtgatgaaagttcccaagacactagagagttcaacaaagaagagattgagaaactgagaagcttgctgggaactctggcaaaacccttgggtgcttgctcattggcactcgcaggtaagtctcttatctctcatgtcttaagtgcttcgaatattaattttccaaactcttgggtcattgactcaggagcaacaaaccacatgacaaattcttccctcaaatttagtatctacagtccatgccctagtaatataaagattacaacggctgatgggtcattgaccactgttgtcgatcaaggtgaaattaaaatacatcctttcctagccttgaaaaatgttttacatgttcctaaattgtctaccaatcttgtttcaattcgtaaacttatacagaacatgaattgtagtgtcatttttcaccttactctgtgtttttcaggactaggacttggggaggatgatgtgacgtgatagagaaaaggatgggttgtactaccttgaagcatcaagcaatccaagtaggattgagaacaatttacctgggtcgtttattttttaaaccgtttccaataaagccaaaatttggctacatcatcattgtttaggtcatccgtcttttagtgttctgaaaattttgtttccgttattgttcaaaggaattgatgtggaaagtcttcattgtgatatttgtgaatttgctaaacaccgtcgtgtacctttcctcattagtaataatagaacatttattcctttttcgttgattcatagtgatatctggggtccctctactgtttccaatgtttctggtgttcgttggtttgtttccttgatgattgcatttgtgtttcttggctctatttaataaaacaaaaatctgatgtcaatactgtgttcccaatttttcatagcatggccaaaaattagtttggtgtggcaataaaaagattcaagtttgataatgctcgtgattactttaactaggtctaattcccttactttcaaaaagagggaatcattcatgaaccttcctatgtaagcactccacaacaaaattggcctactcaactggagtctcagttggatccaagtcaagagtttgagtctccaaatccacattctgtcctgatccaagaacttgagtctcaacctccgagtcaaaactcagagtcttcaactaaggtaaatgatatctctggtctcacacgacctttgcaagtgtattcaaggaagaaggcacacattcctgacctcttgcaagcccaagaattcgaatcaaccccaaaaaaaagaggtaacacccatttctaaccctacttttgaaaattcacttgcacctcttgagagtcttgaccatgatctgcccattgccattaggaaaggtactagagaatgcaccaagcatccactctacccattgtcacatttcgtgtcatacaagaacttgtcaccttctcataaaagcttcctcatgagcctaagcactatatacatgtctaacactctatctgaagctttaaacaatgaggaatgaagacaagctatgcaagtggaaatggaggcacttgagaaaaaaaaaacttgggaactggttgacctgcctcaaggaaagagccctatgggatgtaagtggatctttacggtgaagagacagatggatcattttagaggtataagattcggttagttgaaaaaacttacactcaaacatatgaggtggattatcaagagacctttgcaccggtagaaaaaatgaatacagtgaggattctcttgtctctagttgctaattatgattgggagttgcaacaatatgatgtgaaaaatgcattcttacatggtgatattgaagaggaaatttacatggaaatcccacttggttttggaggcgagttaagaggaaaaagggtgtgttcattaaagaaggccctttatggacttaaacaatccctaagggcttggtttagtagattcactaaagttatgacgacaatggggtactagcaaagtcaaggtgattacactttctttattaaacacttgaagtcaggggagtcacgactttgttagtctatgtggatgacataattgtgactgagaatgatttaaaggaaagaaaagctctaagatgtcagttgacaaaggaatttgagatcaaagaccttagcaaacttaagtactttctcgtgaggaatatttatctcctaacaaacatacgtgttggatttgttgaaagagatagagaaactcacttgtaaacttgctaaaacacctattgaacaaaatcgccgaattgcagaagcaagtgaagacgtggccatggacaagaggatgcactagaggcttgttggaagactcatttatctctcctatacaaggtcggatattgcttacgcagtgggagtcgtaagccaattcatgcatagcccgaaggagactcatctacaaaccattcataggatccttcatcatctaaagtcttctccaggaaagggtattctcttcaaaaaaggaattgaactaacctttacagcctacatggatgtagactatgcaggcttggtggtaaataagaggtcaacattgggatattgcactttcgttggtggaaacctggtcacttaggggagcaagaatcaaactgtggttgcaaggtctagtgttgagtctgaattcaaagcaatgacacatggtgtatgtgagttgttatgactgaagattattcttgataatttgaaggttagatcggacggatcagtgaggctttactgtgatgacaaatcagctattaacatcgctcataatccagtgcaacatgatcagacgaagcatactgaggttaatagacactttatcaaagaaaaactagatagtggattgatcttcacaccttacgtgcctataaggggtcaactagtagatattttaacgaaggggctagcaagtatcgtattccaagcaatcgcaagcaagttgggaatagaaaacatctattcactagcttgagggggagtgttagaaagtcacacgattataggattttttttgttaaggaaactatgtaaatatagaatcccatgtatagtcaactatattgatatcaatccctgatttgtagggatttataaagtagtttcttttttcgttttgaagcaacaactgtatatatatgagcctagacctgtaccttgaattaagtctgaataaatcaatcattcccatgtatagtcaactatattgatatcaatccctgatttgtagggatttataaagtagtttcttttttcgttttgaagcaacaactgtatatatatgagcctagacctgtaccttgaattaagtctgaataaatcaatcattctttttcacaaaactcattttcttagggccttgaatccccggtacgaagtttggtcgagtcttatattcacccaatttaaggagtacaaggccaccaaccttttattttttttaaaaaagggcataaggtggcttgattgacctgagcactcaagctcttggggcctggaaaatatcaaatttttttactagaggcttgatctatgtaggcaatgaaggacaatttttggacccccttgggaagtttggcaaatcccaagttcaaccatgtgtcttgattgatgtttgactctcaaagaccaaatggaaaaggaaagtatgcaagaaaagggattttaccaaagatgaaactcatcatttttacactttgaggctatcgtagaacactgggatatgtcacattgttagtttatgaaaaatgggccaagttgcacaaaaaggtgtattttaaagatgactgttgttgcaaagatgcaaggaattagttttaatccatgtaaatgatagaagtgattgggtcatgtagagttggagatatataacaacaatagaattttaagggaagaagatggtagtttcatcatttttgggattttcatctgatatgaaatctcataataggagtgaagttttgtggttgatagtagagtgagagagccacctctaacatacaaattatctttaggttcttatctactctatcttttgattaccaatcacgacaactgttattcattattaggagtagaagtagtttagcttaagcagtcacaagttcatcaatgaagggatcatttaccatttctttatcttttacattttcattaatgaggtagtgattgtatagaatctagtttctttgtgaggggatgtagtatgcatgcaattgggatttttttcactcctatctattcagggtaagtctgatcaatgtacaactgtcttagcatcactgttcaaaggaggatggtgaattcatttctctagtatcatcgtgtgtcacacttgtttcttagtccagctgcattattgcagcacgttcatcaatggagagataatccattgttttattgccatcaaagaatccgtctagcataggtaaaggttttgttcccagtgtactcttttttaaggggctaatttgtattaactcaagctggttgtggctcacctgattaacaagggcaaaggtttggattgaggctctgagaaaagaactgataccctattgttctatatgctgccctgggtaaagtgggagcaattaataaatcataaaactagcctcaatggttggattgcaacatttgatctaagaactacttttttgatgcatgatgaaagcacacatattgataagccaccgaatttctcctctattgatcagtctacaacatattttggacatcattttgtgtaaggtgttgctgtcggatgaaatttcatatttttgagttgccaaatatgtttgatttatcatttccttgtacattttgagtcttagctttacttcttaaccaattttcagtttgatggttgatctattagttcagcttacttgatttttgttgactgcagaaactaggagacatc

SEQ ID NO: 13385 - DNA, 3744 bp, Vitis vinifera
  Intron number 1 from transcript GSVIVT01013748001 (locus G SVIVG01013748001) derived from phytozome v7.0 (chr-ID chr1 ; pos 7963764 to 7967507)
tgcttttcgccccaaagaaccagacttagagtttggttttgacaagggaaggccaactgccaagccggcaggcaacggaggacccaaacacaatggacacagaccatttgaaaatggcgaaatcagagccgaaaacaagcccacggaatctactgctgcatgatgatggtgcagaattcgtaggagcgtcttcatgtgtgttattttctgctggctgttgttgtttaattacttctataaaagtcgttctggtttttatttcatcctttttgtctcgtgctctttccttgttgctaatttgaactggaccttgaaatatgtaattaaacacagtataatcgtgacatacgatatggcctctatttcatctcagaaatgccaagggtgaattgggaacaaggtttaagaagcctcaataatttgtacacggtggtcttggcttgaccttgcgaactgtggttgtgcccggtcattaagacgcccttggacaagttttgacggcaaagatgatgttggatgaatgcgattattttgctccactattttaacctctcaagttaaattgtctagctaacatatccgttttgatctgccatcaattcctggaattgagggaacttccataaccttacctattagccaacttaatcattacaggagcctgtgtcacatcaagatatctgtatccttcaatagacggcccaggaagatgaaaaagtggtaatgttgtgaacccttttcccatggtgatcacaataatgggaaatcgcctataaataggataagagagaagaaagagagggagagagacctgggcccaactatagtagcatactgggaaattattctcgagaagagctaggctcacttaaggtaataataattggcactatttgtagacagaagacaacaaaaatgtcacttttctctgtcatttctttttctttatattgcttgcaggaggatcatttgcatagagagaaaaaataagatcgagaaattatatctcattgataattaatgaatgcttatatataaataagctttaaggagataaattttgattaactaaaattaaaagaacaagtctagctatcttctactctatattctataattttattctaattcaatcttttctctaatttaaatattagttcatcttctatagttctattataattcaatctttgttttctattctaagttaaattaataatagataaatactaatattaaaattaagaataaaaataaacttttactaatgttacatgccctttaagcttagatgaaggcctgataggctaagcatagttgacaattgagatgttgcttaattataggtagactttaacatttctgagagaaaatgagtcattgcatgttatgaccatcgacaacacatcaaaatggacatgatctcaatacaatcgcttgatccttagtcgtcgtgggtgtgtgcccaaatctacttctctttcccaagatgccacacatagctattaaaaggcagtcttgtctattcaatgtgactattgaaattcttgggacagttatgcttaaaggttatttagggctgaaaattattctttgatatgaaaagtaagacaaatttgtccttatcacttgccacgtcaaagaacacatcaccggttgagcgtgtataagttgaggaaaggttctcctaaaattgctaaccaaacacgccttaacctcgtattaaagccatacagaacataaatgtcttacattttagaaaccctaatcatttattcattcatcattttgggtttatcatccaacaaaattgtagcagaaactgatgaaagaggagaggcgcgttgggctgaacataggcttgttatggaggcataatgggtttctatgttgttaagcactgaacgtatgaaatctttgttggttgtttttttgttatgccattaaggcatgtttggttgtcgagaaaaatcaaacaaacacttttctttgtacgaaatattttttgcacacattgattctacttacacatattcttctttccggattttcaagagtgttggtatggtttgagtaaggggttatacccatatttggttgacatatggttttgtttccctagattttttaaattagaggtagtagtgtatttgttttctttcgtttcatgttttcgtttaaattcaattagagagttaaattttttatggttttctttggggtcaagtgggggaaatcttgactagaaaatattctgcattccatgcactctcaaattgaaatagtaaataaattcacataatatttttcaacttgtaggttgtccttcacatggtttttttttttttgtttttttttttttttggtgctttatggtcttctgttaggcattttgtaagttttttttttcttttttgctttgttgtgaatttattccaaataaagaaatatattgctagtcattttgtttgaaatttattccattttataggtttggaagagaaaagttgaagagtatttagcacactttggaacaccttctacaataatgaaatttttgtaagaatagttggttttcttaggttcaaattcgtagaactttttttgggagttccccaacatctttcttgattctatgacaattatctattttgtttcaatgcaaagtaattttggatcctaaattaataaatttttatgtacattgtttaactattaagttgtaactacctagtttacatatacttgtatgttagaaagagggttggagtcttgcaagttataaaaggtggcatccaagaattaggcaaggagcaaggatgatgagcttcttaagacaaacaaaaatcataactaggaatgatgttgcaaaagtttgcattcaattaattgtttacttggggttatgcatgttcatatatgaatttttcctatcttaattcttacttgtgcttctcagcttaccatcaatcatacataatgttagaattacatgttttctaaccaagcactccagtttgaggaagctaaatttaaggaatagttggagttcagctcgtaccaaatgtagcttgatgatatgatgcttgttttattgatattaatgttaaaagcacaggtttttgtgaaagttagacactccttatacattgtaataacttagtacatgtgttatagattttgtatgtgtttatcttgttaagattcatgtatttattgtcatggatcaaaattagagttgaacttcaaatttgcaatcatagttgaattaatattgtggcaatgactttgttacatttgaggaggccagatgattaattaattgcttgtttggcatgtcagtatgattacaaccataattttcttattgtaattctctattgtcaagtctgcaaattccttccatgtatactcaagagacaaggttgcaacttttgcttagtgtgaggttacccaaccccattatcatttaaatttagattttcctagaatcttcaactattccttattttttataatactcttattggctttacttctttcaatatagggaaacttgtgttttgatagggccatttgggaaatatatggttttcaaaacccaacgttatgaaatctgaaaaccagctcttaatgtggaaagttatatatttttcatgcactctaagctagctgcatattttgtgccgagattgcccctcgggtctagtgattttccaaaattatcctttttgttcctttctt

SEQ ID NO: 13386 - DNA, 2061 bp, Vitis vinifera
  Intron number 13 from transcript GSVIVT01036611001 (locus GSVIVG01036611001) derived from phytozome v7.0 (chr-ID chr 13; pos 19186121 to 19188181 reverse strand)
cctcatattgtttgattatctgaaggtactgatgttcatctcttggtctttttcataacatgcatgtttcaaagagattactgttttattgttaattatgttacatgatgatgtaaatttgagttttgtatgtttgaacaaggctagtaacttagaggttgaataatcacactacccttaaaagcatttgtgatgctaagaatgccgtctcaatcatactacccttaaaagcatttctgatgttaagtagactgtcagcattagttattgagattgtgtgtggtcacttttgcttgtgccagcatgcccacccgtcacatatgcaggagttgctggtccattgtttataggtcaattggtagtttaacatggtaccgaaattctggttagttggagacctcaaatttaagtctttcattgatctgttatttgtaatccgtaatctcttattttcaaaatttggtggtttggactcattgaaggattatagcctatttatctggttagtactccataaaatttcctggcaagttatttcttcttacataggagggtgatggattgacttttgtccttaactcaagactgttttggtcagtggaattgaaatgattgatcagatgttaactgccaaggagtgcatttattcaaaatgcgaagagattcttaggatcttgtgaagagtgatagcgaaaggcttaaggccatgccaattaggattttttgattaattaatttcggaaggcattgaaggattattccctgtttatttggttagtattgtttataaaattttctcgaaagttatttgcttctctcttaagaggggtgatgggttgactttcttaattccaactgcctttgttagtggaagtgaaatcattgatcaggtcttaatttccaatgaatgcatttatccaagatgcagggtgattctgggtatatgtgaaagagtgacatgggaaaggcatataaccatgtcaactgggactttctgatcagtgactttggaaaatagttcttgataagtaatggagaagttggatgtgtatctgagattttctactgctgttctctcttcttttcagcggttcccatagattttttacctagattaatctttttccttttttcttggttctggagtgaaggcaaatgtgcaaaggtgagatgtctttgatgtgcatagactgttgtcctgtaaacagtattacagcaaatttactttcctatacctcctggattattctctaggtatgttggtcggtttttaagtcttatccagaatttatcttaaaatctgtcgttattatgtgagaattagagagtgagagtagtggaaaacaacatttaaaatgttttgaggatttgtaaaaaggctggtaattctttttggatatctattttgaactggcaagtttatgcggcttattttctaactccttagtttattggaattttttcttggcatatatccatgagatgttagtggacattttcttctttcagtatcatttagagtacttcatgtttcaattttttcatggtataccttgttggctgttttgaccggaatttagaacttagagttccttctctaagagcatcaccatgccctagggctatggctggaattttttctttctttcttttattgattagctgtgtatttttttctttctgaactactacaatacttattatatacttataaagcacttgttcattgttcttttgatgtggcatgacattatcatgggagaacttggatcaggggattctgttgttttagattttgtaaggcaaatgtgctgataagtgtaaaatgtttttatggaaaacttgaaaggttcaaattctttgatgtttttccttttcccttttggtttgggagagcagatcttgttggtcttatatgtgacttccatgttactttttcaatgtagtagttaacagattcaactcttgttatctttttgttcttaacaaagctttccttttccatcgcaagttagttgtcaactgatttgactcttgtttgtgtataggcccctggaaaga

SEQ ID NO: 13387 - DNA, 14573 bp, Vitis vinifera
  Intron number 1 from transcript GSVIVT01001466001 (locus G SVIVG01001466001) derived from phytozome v7.0 (chr-ID chr1 3; pos 21218886 to 21233458 reverse strand)
gatccgaaacggaaagaaagcgccagaaaattcaggtgtgcatgttttttttgtttttgtgtttttttggttgttgatataatatggaaatgttgctgctgcgtttggtttttctgattttgatgatggatgtttggttgatgggaaaatagaggaaattgcaagaaaatgcaatttcagtatctcacgtttttttcgttggtttttatcttctttttttcttggttgattgagttcgaaagcatcgctactcatgtgttttgcgtggttgattctgtttgcacctgtttgttttatgagaaaaatagacgaaatgaaaacaaaaggatcttatgttatcaaaatgctctgtcttccaaaaaaagacaaatagttgcattaggtggcattgatagaggctttaattgattgagatctaatatttaaattgttgttgttacatgtttttctccaatcaaatgtatcaatctgttcaacttctgttgctttcttagggctttttattgaggtggatgaatccctggattttcgatgtctttagaaccgacaaagaattatatggagagtcagatctgaattctgattcactgattagaacctgttagagaagagaaaagtatttttaccttttcagttgtgaaaccgagtgtggccaccatttacattcagtgctcctcgtcaagactggcataccaatgtgtatgtgcgttggctttgtggacttaaaatggttcacgcaacaagttcttaaaatcaaagcctgtggccttcctttgcctattcatatagtggtggccacattaatcgctaggctgctgacgtgggtcgccacttaggtttgtcttgaattgaataaccttttgtgcagttcgtgttgtaatctgcttttcgtgtttttttgtctaaatgcggttcttgattcgcaaactgacaacttttggattaaaattttcgattcggaaattgtttttggctacgaataagatgggaaagcagattcgtcttaccctcttgatgcctttactgtcattttagaattaagatggtccaatgaattgactgctgttcaattcttcaattttctagttttcccacgagaatatcaagatttatgaaagtattttccaaaccaccattgagattctgttccaagagcccgaatttgtgggactttgaccgattaattttgtcaaaaagatggaacaaccttttgctttagcttttcttttttgagatttgatgtgaattctatggctatgcttttatcttctttaagttttttattttgctaagctgctgacttttgaatgttccttctaatatagaggatataaaatcatgaatgtgagtgaccaaaaagcgaagacaacttttttgccttatcaaatcacaaagcagaaacagattttattttattttttgttgaagtatgttttcacaacaaataaataaaaaaataaaaagaagaatacataaaactcaaaataattaggattttatttatttttaaatcaaagataatattgaagtactacattttaatgatttcatctgttaagtattacctttaatttaaatggatactatatttaaaaatataaaaagttttagggtttattcggtaattgttttcaagaacagttctctattcttcagaacaaaaaaacttgaaaaacatatttagtaactaaaaagtattttctatttatatatatatatatatttttataaaccatattttagttattttttcacttgttttctaaggattgttttaaaaaataattatataaatatgtaaaataattaaaaataaaataatagacacaaaaaatatttttaaaactattaaaaatagattaaaaatattttaggtttttaataaaacttttgttctataaaacatcatataacagtttttaaaaactattttcaaaaactatttttttgaatcattttctaaaatggttaccaaaaagaccctcgtcttttccatttttatcaaaagtatatatcacaaaaacataaatgaaaccttatagctatgcaataaattgtaatttttttatgaagttcgtcttttcttttcttttttttcaatagtacactagtctctttttttgattgtcggaaacctaatggaggtaccatacagctcatgggaagttgggaagctttattgctgaaatccatgatgaaaagttttaaggtttgtgtatacagctcatgggaagttgggaacctttattgctgaaatccatgatgaaaagttttaaggtttgcgtatacgcaatagggagggaggctgaagctaattattaggtctcaacattttgagtacttgaccaggcccatagtggcaaaaatggcgaatttgggagagaagactctgatcagatttggaatatgtagggaaactttaaaaatagcatgcatctttaaccgtgtcaaacattgaaaaccacacagcaaatgacaaaaactggactggattctatagccacggtatttggtctattaggggtttgccatgtgtggctctaggatcattggatttgagacttgcttgtatataaaatgtgatacagagcacactttagaaaaaaaaaatcttcatttacttgcattaaaatagcatttcttctctattaaaattcttggttcctcttctcattttccttgaattgttaaataattttgtccatcttcgatgttataccgtgccaaaagttacccaataacgattttggtcaagtgctctgttattgattctttcgaccttttctgaatatgcatgccacttgtccaaactaaattgtattttaaagactggcattttgaagttgcgagacacgatacctccctagcttctctttttaagtttttgttgtcatggagaccatttctttagtataaccgcccaggagataaatatgcaaacaaaagatagatctcacatatagaaaatcaaataagacggtactgtccaccatgatgttttgtagcgtgtattggtaggaatcttaattaaaggatttgtttcctttttatattagaatctcgttcttcgaatcctaattctattaggagtttaatttttattaaaattaagcttttacaattatacatatatacatatatatatatatatatatatatatatatatatatatatatatatatatatattcattctctttgtataggaaaattgttctcctattagaaagattattttttattacttacatttggtatcaaagtctgagtattaaagatgtaaccaaccaataacaatacaatgtgtaatatttagggactagtagattaaagatttgtgaaactagtacatcaaacacaacttacacaagtataaaaaggtaatttggctaattctagaaagagagatttgaatacacatatttacattaatcaatcgatagaaccacttattttttagaagattgcaaatgcaaacactataaaaggtgcatataacatccttatgaacacctacaaaggggcaaaaaagatgcaaaaagttcgattattgtctttgaggagacaatttgagcttctttaaaatgagaaaacataaagaatctccaacttttttttcatggatattaacttttatcaatcagataaaatataatgacaaaaaccatttaaaatcttcatattatagagtaaattcttcgaaccttaactatgatttaaatataaggttataacaactaaagaatcaaaagatcttagtaccatgacattggatgaattaatgggttcattgcaagcacatgagcaatgcttagataaaaggtcctagattgaagcgaaagaagcactgtaaagccaaataatagttttataattgatgatgaaaattggttgtgacactcgagttttggacacttaaattttggaatccaaaattacttgaggctaagaaaatggcttttggataccttttattaattctccaaatgaagtttgtgaaacatgtgtcttgagaaagaaacataaagattcttttctaacaagaaaatcatagataggaagtatctcaaattgatttatttggattagtgttcaatgaaagttccctcagatggagatcacgggtgtttttcacttctattgatgattttagtcaaaaggtgtaggtttatttttaaagcaaaagacaaatgcatgtaaacatttcaaaatttgtaaagcttgtggaaaagcaaagtgggcatactataaaaattttgagaactaataagggtactaaatatattacttgtgatgattttttttgaaaaaagtgtgatattgagcactaattaactaatacacttaccatatccacaattatggatatggtgaggtgggtgttgcccttaaaacaattactgaaaagtgaaatagtttcttgtatagtttatttattgaataggtgtcccactaaaagtgtttatggaaagaccctgtaagaagcttagagtcatagaaggcctagtattagtcatctaagggtgtttgattgtaaagaatatgttcatgtgtttgatgcattacatgaaaaacttgatgataaaggtgaaaagtgcaatttcattggttatagccaagaaataaagggttataatacaatccataaactaagaaaattattgtcaatcatgatgtgattttttatgagtaagaaatataggattggtcttttttaaaaaaaaaaaaaaaaaaaaaaagaaccatcaaacattcatacaaatctcgaaaagcaaagcaaagatcaaagtatgtaacttactagtacattaattataacttcatgccttacaaagtcatcaaggtgttcacaatgtcaacatgtcttatctgcacacttacaagattttgtagttggtgatgacaatgaccgaatacgtaaagaattgatgaatttttctttatttgcaaattgtgatgcatttagttatgagaaagttgctcaagattgagaaaaataatacacaaaagcctactaatatccctaattctaagaagccaattggtgtcaaatggatgtacaaaaccaaaggggttgaaaagggggtggtggaagcttttaaaactcttctctcaaagaaagggggctaaaggcctggttttgaagagatattctttgaagtgctggaagatgtgatggccaagaatttagaaggggttttcttaaaggaagaggtgttaggtacaccgatagagttgaatggtgacaaaactccaagtctggatggcttttcgatgactttttggtcgttcaattgggagtttgtgaaacacgaagtgcaaaatttttttaatgagttccatgaacatagtaggtttattcaaaacctaaatgcgacccttctggtattgattcccaagaagaaagagattgataacctcaaggattttagaccaataagtttggttgaaggtctttataagttgttggcaaaaatgttggtcaataggcttaagaaaatgatgaataaagtggtttcaattttcaaaatgcctttatagatagaagacaaatattagatatggtgttgatagaaaatgaggcgattgattccttgctaaaaaggaaagattgtgggttatcgtacaagcttaacattaagatggtttatgatcatgtaaattgagactttttgttagcaattcttgttaaaatggggtttaggaaaaaaaggataaattgaataaaatggtgcatctctttatctaatttctcggttttaattaatagttctcttattggttttttttttttcaaaactcaaggggtttgagacaaggggaccctatatcatctacttgtttgtgattgctatggaagcccttagtaggttgattctgaaagcttgtgattttgaaagttggggaaagagagagtggaggtgagaaaatctctcatctcctttttattgatgatattattattttttatgaggcctgctacaagtcactttcttatgttagttgcttatgtggtttgaagctatgttggaattgaagattaacttggagaagagtgagatgatcctagtaagaaaggtggacaatttggaatatttggcttgtgaaatttggtgcaaggtagggaagttgtcttcttcttacttagggcttctcctagaggtctcatacaagtttgtggcagtttgggatagggtagaagaatggtttcatatgaggcttttgttatggaagagacaaggaggaagactcactttacttcttagtactctaactagtgtaccaatctattttatatctatgttcaccatcccaagaattgtaaagttaagattagaaaaaatataaaaggattttttgtggggtagagggcattagagaagaaattacatttagtcaagtgatctaccgtttgtaatgcaaagttgaaaggaaggctaggtgttcattctttttccttgtttaacaaggccttactttgtaagtggtgttggtgctttgctggcaaaaaagattcgttgtggaacaaaatcataaggaaaaagtttggggaaaataaagggagatggatttttataaggttgggatttagaaagagattagaaagtaatgggagctttttagttcaatgatttcatttgcaatgggtaataggagaagggtgaagttttggaaagataagtggtgtagtaaggagcccttatgtgagactttcataaccttgtttgccttatctaattctaaagaggtgaaaaagaaaattggaactttcgatttttttaggaatctaaatgattgggagttgggtgtcatggagcgttttctttctaaactctaaggacaattaatgaaaagagggtaggaagataaagtagtttgaaaatgagataacaaaggcgttttctctatagaaggactttattctttgttagagactaatgaaaccatcattcttcctttaaatttagtttggaacccatggattccttcaaagatgagtttcttctcttaggaggtctattggagaaatgttttgactttagatcaactttaaagaagaagatggactttggccaacaattgtgttttttgcaaagaggggtcagagtccattgatcatatcattcttcatgatgacaagacgagattattattgcaattagtgtttggtgggttatttatgagacaattagggagaccttcttagggtagcatgattcttttaatgaaaaaaagacatattaaggcttggagagcatctcattcttgtattttctgaacaatttggaaggaaagaaataagagatttttttattgtaagaaattgtctaatcaaaggctgaaaaatttatccctaaataatttctctgtgtgggtcaaggtgtatataaatagaggttatacgtatatggttgattttatagattggttggggcttgattaagggagggagtatttttgtgtcatctctttcctatttttttgcttgatgttatttgtatgcaacttatatactcttgtgtttttttttttttttttgcatttttttaatacaatctcttacttatcaaaaaaaaaaaaaaacaagtattagatagatggagaagttgattgattcaaggtaagattggtggcaaaagtttaccaacaaaaactaagtattaattattttgaaaatccaaccttctaaccttctctatttccataaccttagatctagcatgataaaataaataaataaataaataaaaattgttagtcttcattgaacttctctatacttacctatgttatcccagttgaagattttagggaaaaaaaaattgtcatacatcttattgaaaaagctgcaaattacaaattaaatagagattgcttccaagagaatcttaacaccctaacaaattggaacatgaaaataggaacaaagataacaacctactaaatatctaatcaacatattttgattttattaaaaaatctaaaccaaaaacctatcttttcggcacttcccctcaagttggagcatatatatctatcatgcccaacttgttgattagatgctcgaaattaggtcgaagaagtccctttgtcaaaatgtcaacagcttgctaagttgaaggaacaaatgggaagttcatgatgtcatcttcaagcttctcctttatgaagtgtcgatcaatttccacatgcttggtgcaatcctgttgaataggattatgtgtaatgttaattgctgccatattgtcacagtataacttcattggactttttatttttttgctatagctcctccaagactcttttcaaccacaatagttcacaaactctatgtgccattgatatgaactcggcttcaacactactttgagttatcacactttgcttcttacttctccaagtcactaaatttccccattaaaaaagtacagtacccagaggttgattttctatctgtgactgatccaacccaatctacttttatgaacacttcaatatttctttgctcgtttttacaaaagaataataatttccttggtgtatttttcaagtacttgagaatttgttaaactgctttaagatgctcttcataaggagcatgcataaattgactaaccatactgactgtaaaaacgatgtcaagctgagtatgtgtcaaacaaatcagcttgcctaccaatctttgatatcgaacaacatatactagagttcctttgcctttttcccacaacttcatattaggatccattagagtatcaacaagtcgacaaccactcattcctgtttcttctaaaagatccaatacatatctccattgtgacacaacccccttcttagactgtgcaatttccatcccgagaaaatacttcagtgagcccaagtcctttagttcaaattttgtcaccaagcaactcttcaaattgttcatttctatcacgtcatctcctgttagaataatgtcattaatgtaaactatcaaaactgctatttttccctctattgaaaacttcatgaacatagtatggtcaatttggccctaagtgtaaccttgtttctttacagaccttgtgaacttctcaaaccaggctctcaaagactgtttgagcccttgtaagtacttttttaacttgcacaccttcaagccaaatttatcttcaaaacctagaggagaatccatgtaaacttcttcttttagatcttcgttaagaaaatcattttttacgtctaaatgttgtaggggtcaatccatattcgcaactattgaaaggagtacccttattgtgtttagcttagccatggtgcaaatgtttcagagtaatctatgccataggtttgagtgaatcctttggtaactagtcgagttttatatctatatagtgacccatcaaagttgtacttaactatgaacacccacttgcatccaacaatagttttttcctttggtaaagacactacatcccaagtcttgtttttttcaagagcacttatctcttcaagaacgaccttcttccatttaggaacaattagagcatcttgcacactttaggaatttgtacactagaaagttgtgaagtgaatgcaaaaaatgatggagataaccgcttatatgacacaaaattggacaaaggatgtttagtgcaagacctaatacctttcctattggcaattgaaacacttggatcatggcatgacacggatagggaactgaaagtatgaagactagattcgaaagaagagtttttacctgacttatgtctttttagatgatttgtcctcagattggagtcatggccttgcagcaaagtggaatcatcatttttttttttgtcaggtttctccttgagtaaacaatcaattctttacttgttgtaccagtatttatttttctagtattttgaacatttttttacatattaatagcatgtccctaactttcagcaccgaaaatattaatttctagacttggttgtggttgtggttgtggttgttcaatattttctagcggtgatctactcgtttctaatgttgaccttgggtcttgagaaacctgtatcatattctctccaccacttatgcctagatcctcacagctcgaacctaaactatcaccacaactagatccattgcctaattcttcactctctaacatcgctagaaaactcataggatccaaatcttcacatgatctctccccctgaagatgagccttatggaagaaagatttagttttaaaaaaggtcacatccattgtaacatacatttttctggaaattgggtcaaaacacttatatcccttttatatgggagaatacccaacaaacacacactctctagcccttggatcaagttttccacgattatgctgatgaatgtgaacaaatgtagtgcaaccaaaagtgcaaccaaagattttttaaaggtaaatcaaaggaaatttgtgatgtgggaaaaaaaattttgaaaacatcaaatggagttttaaatttcagaactcgtgtgcacatcctattaatcaaataagttgctgtcttcccacaaatacttaggaacttttgttgaaaacagtaacaatctagcaacttctaaaagatatttgttttttcttttagccagttcgttttgctatggtgtatcattacaagagctttgatgtacaatacaattttcaagaaaatatcttcctagaatttgtttaaaaaactctttcccattatcacttttgaaaaccttaatttttccttgaaattgtgtttaaatcatcttatgaaagtctttgaaatcttgttttacttcagatttttcttttaacatatgtacccaacaaattcttgtgtgatcatcaatgaatgtaacaaaccatctcttacctataatagtattaaccctagatggcccccaaacatcattatgaataatagaaaattgttcgatgggtttataaggttgtaatgggaacgatgcacaatgattttttgataattcacaaatttcacattgaaacaaagattggtctttattcttaaacaaacttggaatcaaatatttcaaataatgaaagttgggatgacctaatctaaaatgccataacatgatttcattgtcaagagaaataaatattgactcaaaacaagtacgttgtgattattttctcaaatcagtcccatcttcgaagaaatagagtcctccgctttgcctagcagtgccaatcgtcctccttaacttcaaatcctgaaattcaaaatgagatggaaggaagtatgacaattttggtcttgtattgattgactaacaaacaaaaggttgcatgaaagatttgagacatgaaggactaagaaatagttattgaccattttcctgctatttttatttttccatttcttgcacaagaagtataagacgaaaacaatttcaacgaacctatcatatgatccgttgcacctgaatctatgatccatagggaactagaattgacactagttagtgtagtggaataagagttacctgtttgggccaatgaacacgaaggaaacttattttaggattgaaggaatttgcaaagttgctctagttgttccttggtgagaggaagagttttttaggaagtttgtgtcccttagtcatcaccattaacttgaaatgcacatccttcattgctagattttttattcagattttgtctcttgccatgtatcttccaacaagtctctcttgtgtgccaagaccacttgtagtagtcacaccatggtttttctgactgctcgttgttctgcttgtctccttcatgttcgaatcctctagaagcaagagcagaactttcagattcagttgtaggcttttgatcaacatccttgagcattactctctatcaagcttcttctcgcctaacttcagagaacacttcgtgaatatttggcaggggtttcctcccaataattcgtcccctaacctcgtccaattctttgttaagtccagcaaaaaaacatatactctgtcattctcctctcttttcatgtgtcttgcactatcactagtacactcccactggtcatcatagcacaaatccaattcttgccaaagagtcaacatcccattgtaatactccatcacatctcgatctccttgcttcaattgccacaacttggttttcaattcaaatatttgagacgagttttccaaattcgagtatgtttctcgaactacatctcatacatctttggttgttggaagaaacataaatggttttccaagagcaggttccactgagttgattaaccaggctatgatcatagaatttttggacctccatgtcttgaatttgggatctctttctgctggttttgtcacttcaccagtgagatagccaattttgtctttgccatctatcactagcttcaccgattgcacccactctacataattcttgccattgaatctatgaacagttatctgaagagtgttggaattttcaaaattgttgaatgagacagtaggaccactctgcacttcctctgtcgtttccttggttgagtttgtggatctagttgcaccggtcatgactgtcttgaccattaagaaaccctagctgagagtcgtagctatgataccatgaagattttaggggaaaaaattgatcatacatcttattgaataaactacaaattacaagttaaatagaaatcttccaatagaatctcaacaccctaacaaactggaacataaaaataggaacaaagataacaacttactaaatatctaatcaacagattctgactttattaaaaaatctaaactaaaaacctatcttttcggcaccagttaatcatgcaccaactttcttaagataaaaggaataaaattatcaacttaaactaaataaacttatgcactaagaatgattttttatgcaagcatactatagaagatatatttatttaattgcattaaaatagcatactttctctataaaattgtcactttctcttctcattttccttgagtttttaaagcttccttggaatttttaaataattctgtccatctttgacgttatagcatatggtaggccaaaagtaacccaataatgatcttgactaagtacactactattgataaatatgcaaacaaaagaagtgatccggcataaagaaaattatatagacagtgctagcggccatgatgtttaatggtgtgtattatttggcttccaaaaatcaggaatttctgtcgtcacgtagtgttcggcccacccacgttttttggtctgtgtggagtcatttcttcttttgctttaataatgctctccattagccaaaaatgacctttcggttagaaagtcataattttccttccatcaccacataaatggtataatgtgcctgagacaagtcacccaattttgacttgtctaaatcaataaatagagaaaatatacatcatgagcaatattacacattataggtgccatgagtcctcatcaactatgtgtctcgtcacttctctttcaccacttttgaaatgggacccaagaaaggagattcacgaaaactagcattttccatgtatttttttagcgtcaacattacggttagacaaagcttgtaagttctggcattgacacaaattaaaagcaacttcaattaggtgaaacgtagttagaccgctagcaaatttgtttaatagctcctcaaaatccattcatgaattttcgacgtaagaggattcagctgccaaaaggtcgggagccctgttgagagccatatcattcacatggtggctcagaaaattcattgacattaatagaaaggatattcttctaaacatgacaaaataaagaaaagaaacgagtctcaactcagttacaacagactaaattctttttctttcattcattaactttctgaagcggcttctgtttagttttatctaaggccattctaagtagatgaattaatggacaagtagcagttgtagttctatttgcaatacataaccattgtggttaaggaagttgataaagaaattactcaatttatactgtctctccgttattaatggagcatttttcttattttcatttttctaccatccatgaattctagatgcatttacttgttcttatagttcaagaaagtcaggctcacttataactgaaaaattataccataagtaatttgaagaataaaattaagacgtcttcttcccattccttgacattcatccacatgatacaatggaacatatgatttccctagagccacagcggtgcccaccactccgtattatcctggcctcggttgagcataatcttaagagagcaaccgtatagcccaccacaagcagagggtggcccagagactggcttggattctttgtgttccaactgggctattaatggaatggactgtcattctaaagacattgatatcaattacctgcaccagtgtacggtttgataattatgaatagacccttctcttgcatgctgcgttgcctttcacattcgagtttctttagccttaatgttttctttttgaacaggaaaagattcgagtagctttatacgtgcaaaaggc

SEQ ID NO: 13388 - DNA, 5773 bp, Vitis vinifera
  Intron number 9 from transcript GSVIVT01035204001 (locus G SVIVG01035204001) derived from phytozome v7.0 (chr-ID chr4 ; pos 10436032 to 10441804)
ctttttgagaccgaggaatcaagtgttcgtaggtattatgctaattaataattcactatgacattaagtaccttcaattgattcatatttgttgaaagattacgtttctttagttagtttaaatttgtgttatttaatataagatcagatcagatttgtttgttaggcaactatcttatctgatcaggttgtttatttttaaatttatttttatgttcctagattttaggtcaggcaagaggttatctttggcttctgttttacatttgttgtaactctataaattagagtttgatgcagtggaaaaatgcggttgaataaaaaattatttttttcaattcaatatggtatcaaaacactctctgatttcctaaaaaaaggttattatccatggttaaaacaacaatgattggccatgcttgtgatggagcctctagagtatccttcgagacaattaccaaaccatccaactctgtttctaccagcaatattgttgaatctcacatcctgtagattacccaacataaattaaatgggaccaattgtttggactggtcccaatctgtccttcttgtcattcgcagcaagggatgactaggctacttaacaggggagactcaaaaaccagcagcaactgaacatggctatctcacatgggaattcaagaattacatggtgatggcttggctggtaaactcgatgggacctaaaatagggtggaattatctctcttacaagacaacgaaaaagatttgggacattgctagggttatgtattcagatcttggtaatgtttctcaactctttgaactacagtttgaactcaaggagaagaagcaaggcgattccacaatgacagattattacaataccttgattggtttgtggcaggagtcagatttgtttgatgataacactggggcttgccctgattgtagcataagatataccaagaaactggagaaagaaaggttgtttgcttttctccatggtcttaacaaagacctagatgagctccgtggacgtattttaggaacaaaacccttgccagggattcaagatgcctttgctgaagttagacgggaagaaagtagaaagtgagtaatgctcaaaacctccaaggatccatcagccgaatccttgctgcaaaactttgctcttgtcacaaaacgtagtagtttagcctctggagagtagcggccaaattttggtgagtagcgttcgactcctaacctgcgtgaagggcgatggaataatcgtgtatggtgtgatcattgttagcgatataaccatagttgagaaaattgttggaaattacatgggaaaccaacaaattggcaaccaagaaagcaaggtgatggacgaggatagcaggccacagtagaggacaacaagccacatggacattctacttttaccattgagcagatgacaaaactgcaataacttttcatgcaggcacaattccagcaacacaatactcaacctaatcctactccctctagttctatagcccaaaaaggtagcttctcatttgccctgaccacaaaatcagcaactgttgagtcatggattattgacttcggtgcactcgaccacatgacgggcagccttgacctgtttactaattatacactatgccttgggatttttaagatttaaattgttgatggctccttgtcatctgtggctggcaaaggaacagtgtccatttcacctaatataacactacactcaatcctccatgttcctagtctcaattgcaatttggtttcaattagcaaattaattagggagttgcagtgtgtggttaaatttttcccttcttattgtgagtttcaggatttgtatttggggaggacaattggcagtgctaaggaacaatgatggtttgtactacttagaggatcacaaacaagttgtgaataaacaagctcaagctttaagtagtggatctgttccgattcccatttctgtttcagataagattatgttatggcataaaagattagggcatcctagcttctcttatctaaaaagatcatttccctcgttattttaaaataaagatctaaatttattttagtgtgagatatgtcaattagccaagcatacacgagttgtttatcccatccgaccttatagaatgtcgaaaccgttttcaatgattcatagtgacatttggggaccttcgaaagtaaataatatcacaggagctagatggtttatcacctttattgatgatcacacacgtctatgttagatcttcctacttaaggaaaaatctgatgccgagtccaccttccatttttttcaccaaatgatcaaaacccagtttcaaacccacatacaaattctacatacagataatggtcgcgaatactttaacgctatccttgggacctaccttaagaataatggaattgttcatcaaagcaattgtgttggaaccccacaatagaatggcatagctgaacgaaaaaatagacatttattagaagttgactgtcctataatgttcacaaataatgtccctaagttgttttggggagaagccatcctcactgcctcttatcttataattcgtcttccatctagggttctccaatttcaaactcccttacaaatcctactccaaacctatcctcacccacgattaatccaaaatcttcccataaaaacctttggttgaattgtctttgctcatatttccactaataccaagcttgatccttgagccacaaaatgccttttcctcgtatattcaccatgccaaaaaggatacaagtgctattgccctaaaactagaaaactgtttgtcaccatggatgctactttctttgaggaccaaccatactatccaaatccttctctttagggggagaaattaagtgaagattgtctttgggatttctcaactattcctcttctaatgtcaatcgggtcaccaaatttgtccaaacctccagctgagtcaattatggtactaaataattatggaaaatatagaaacaaagttgggaacaggaggagatttgcccatgcttaatcaccaacctaagctccgtgtttattcgcgaaagacaaagcatcaggttcctcaggaagtacttgctgtcacactccaatagcactgccaagagactgaatcagaaacaaatcccaaatctaaaggagtctcagggtgggaaggagtctcaagtttcccgggcaatcaacaagaagatatgttgcaacaacaaaatgacttggacttggacatgccaattgcagtcaggaaaggtattagatcatgtacaaagtattcgatatccaactatctgtcctacaacaacctatcttcatcatattaggctctaagtgaaaaaattacagttgcagaagttcctacaagaattcataaagctctataaattcccaagtggaaagctgcaattatggaagagatgcaagtcttaaaaaagaatgatacttgggatattgtggagctaccaaaagggaaatacctagtggactgcaaatgggttttcaccatcaagtataaatcagatggcaatataaatagatacaaggctcaactagtggtcaaaggttttacccaaagttttggtgtcgattacaatgagacttttgctccaattgctaagcttaataccattagagtactgttataactagctgcaaaccttgattggccgcttcatcatatggacgtgaagaatgctttccttaatggggaacttgatgaggaagtgtatatggacttaccctcgggatttgatggggattatgaaggtaaaaaagtatgtaggtttaagaaatctctctatggattgaaacagttaccaagagcttggtttgatcacttcacaaagtctgtaaaaaaatatgggtacaatcagggctaggatcatatattattcttcaagcactctcaaaatgggaaagtgactattctaatagtgtatgtaggtgatattatacttacagaagatgactcagaggaattagtacaattaaaaggatttttagcacaagaatttgagatcaagggtctaggtcaactgcggtacttcttaggcatggaagtggctagaacaaaaaaagggatttctatatcccagaagaaatacataattgacttattgaaggaaacaagcatgcttggttgcaagccatctgatacacctatagaatggaatgacaagctaagaatgaaggcaggtaatccaatagatagggggagatactagagattggttggaaaactaatataccttgctcacacaagacttgacatagcttttgcagtgagtttagttagtcaatatatgcaagacccatttcaagaacatctagattctgtgcatagaatattgagatacctaaagactatacctggaaaagggatattctttggcaaaaatgagaaaaggggtgtggaggcttatacagatgcagattgggtgggttatattgatgatagaaagtcaacaacaggatactgaacttttgtatggggaaacctagtcacatggaggagcaagaagcagaatgttgtggctcggagtagtacagaaactgtatatagagcattagcaggagcaacatgtgagttgatctggcttcagagactgttggaagaacacaagataccaagtaagaaacctatgaagcttttttgtgataacaaagctgtgattagcattgcctacatcccagttcaccatgatcacacgaagcatgtagaggtggataagcatttcatcaaggaaaaatttgaaaatggagtgatctgcatgacttatgtaccaaccacacaacaaataggagatatactcaccaaaggactgtccagacatatttttgaagatttggcaaacaagctgggaatgatagatatctattcaccaacttgagggggagtgttgaaagattacgtttttttagttagtttaaatttatgttatttaatataagattagatttgtttgttaggcaactatcttatctgatcaagttgtttatttttaaatttatttttctgttcctagatttcaggttagctaagaggttatctctggcttctgtttcacatatgttgtaactctataaattagagtttgatgtagtggaaaaataaggttgaataaaaaattatttttttcaactcaataatattttcacatttcttgcattatgcaatgacattttttatattctgaggcttctatgatgttgaaaacttttagcaattttatggcattttttttgccatttctgcaatttgttgagttaatatcctttcagtctttgatcaatgatgaatgagctagaattatgggccactagaaaatatttattatgtggaggaagtgttccctgcaaactagtatggaagggcatgccatttttataggttttacctttggggcaaagctgatttttgagtggattgccaaataatttctgccttaaaactaagattttatgtttaaatcatttgcctctattgtaagcttgtagtgaaccccttagattagagcatctaaacgtagatgccaacggtttatttgcctgttggattgatttggtctttaaattggtgagtggtagaaatagcttcttgcaaaaggtgcagcttaaattcttgttgcatattcctgaatggtgtggcaccaaggaactgctttgtggaggtgacaaatatattattattccatgtttataattacacgtatatttatgtgtgaagcttgtgtggttcaggtac

SEQ ID NO: 13389 - DNA, 2995 bp, Vitis vinifera
  Intron number 2 from transcript GSVIVT01010707001 (locus G SVIVG01010707001) derived from phytozome v7.0 (chr-ID chr1 3; pos 12173968 to 12176962 reverse strand)
ctggtgctctttatcaccaacaactttcccgcctggttcttctctctctcttttttctgttttgtaacagaactgaggttttaaatataacctttattagaaaagcatgcaaagagagatgaagatgtcaagatagggttattgaacttaacttattatcattgtttttttacagtcaacttcagcattttcctgttaaaacatgtgatggaatataaaattattactgatgcaaaaactttttgatcattaatgggacttggtagttttataagttatatctgtcaaacctatgtctgaagtatttgaatatacatacacttcaaatttaatgcaccctatcataaccctaaggtaatgcaacacatcaggtggtcctcatgagtagcacaaggctcagttttgggagatatgattgatatgggaaacagaagccgttggaagtctatttataaggacatttttatatttcctctattttccttaaagaattttcagtggctttaagaatggaatttgagtcctagtgtgttactatgttgggtagggagatttcatatggttttagggttaagaaaaatataagtaaacaaaaacatgaatattccttaatttttctataattttccttgtggacaatttggatataaaagatagaatatccctactagtgtcatgttaatggttctgacaataagttgaaaattataaagatgaaaaagcaggagcctcaaagcatagaattagtagagagtggggccagggacatctgaagtggtggggagctttcttggagctagtagttgcaaactaattttaaatccaaagatgtgggttggttaaagaagctaactaaatttaaaataaaaattttaatgagaaatattttctgctctctggaagtattgaataaactgcacaaacagacacaccactgacctggtctaacttatcaagcttccatttgtgcgaatatgcatgagagcccaaatgttgataggttgtaaactagcccctttcttgatccacaattctctagatgatcttggaatgatttaatggaagcaagttcagcaggtatattgtcatattatctttaaggcttttagcttaaccgccagaatatgactgtacgagcactgtacactgtacccatcccaccagttcttacactgtacccgtcccaccagttcttgataagatctttaaaaccttccaccttcaaccacatattttcaaatctgaaaggagtttatcctttccttatctctctaccatctagtaggattgttgcatggtgtaaggctggatttggaagggtgctttggaacaagccactgaactgattctcccaatcattagaaagaagaaaatggtccagcctagaagctaacctgttatttaatctgccacaccaagtaaacgaatctactagatagtgggagatctttaagatccaactcctggataccattgcccctacagcagaagactagttgtcccattccaaagcaactccctcagtctcctgtatctccgtctgcagcctactgaaaagcctgaagaaccctcacttcctacaactctcaaccctccaaaattcgacacctcacctgcttgttgaaaacctgcagaccccatgcatccaggcatgtgtgaagcccccaatgttttctcccttgcttccagcctttccttgtaaggagtcacctgagcgaccccaggtgggagctattgaacagtgaaacagagctgccttacaaccacctgcaacctccctgacacctttctcccatttatcttgatcaaaatccttgcccactgaaggttctttccccctgtagtctcctgatccacccccagatagcccccatgagcatcacccacttgtttgaagaaatctctttgccaaaggaaaagcagaaggcccacaatcctctgaaacagctagtttctgggcatcatctttctagcattaggtcttttgcttaaaaacatgcacccgttcttgcaacaccctttttgcctcccttccaagctcaaattaaaaaaagataatggagcctcccaacaaggatagctttaaggttcccttttagtttccaatgatatctagcccactcctttaaaggaggtaacagtggagcctcatccaagaagtctccccaccacttcacctggcactgcttaagtagctgcattttcaaatcttatcaaaagaagagatggagaaaactactccaatggaattaagagtataaccatacatcactgaagcactacatgaacatgtataagaaaaagctgctcgacactcaaaggcgtaaaaaatccccaaaaaaggaccctaatacatttctcctccttttgctaaaagattggtgacattaatagctgaacaaggagaccaagaggaagaacaatccaaggtgcaagcaatatctagagttggatggagcgagccatcttaaagtagtgcatgtgtataatatctactatggctgttgtatcataccatgcaatagaggcaaaaatcacaagaatctaagattgcttagaatgaacttgggactttgttctccttttttctttattggacatgctcattcagtacacatacaatcaacagtttttttttttaataggtaaatttttgtctccattgggacttgaatctggagccccccacaaaccctcccctatcctttaccacttgatccaagattcaagggcttacatacaatcaataggcttgaacacactatcccataatcagcccttgtcatgtcatgtccagtgtgggtatgttatactttatggagtatctatgtaatataggtttcacagcaccaatctcatttttcctcatattttacttaattccatttttcttgttatgatttttcatggatatttttcaatggttgaatgacaaattgtcttttttttttcactgctagttggcagattttgtcaaaattccacttgagaaagc

SEQ ID NO: 13390 - DNA, 10769 bp, Vitis vinifera
  Intron number 9 from transcript GSVIVT01000044001 (locus G SVIVG01000044001) derived from phytozome v7.0 (chr-ID chr1 4; pos 3038660 to 3049428)
gagcttgtagatcttttttctactgcaccagaaaggtacttctgttttcctaaaacatcaatttatggttttgtttttgctactttacttcaacatatatcatttcctattttatcaataagaaatatgatatgtgttattgtctgttggaatttataaacatcctgttggaatttgtagttgcacaacatatatcatttcctatgtaattgtttatttggcagtattttgtttaataaaaaacaatgaagctgttgttgactaatatttcatatggaaattagggtagaatgcattgattataagttttatgaggcttgttaaccaattttgtgttccttaagggcatctggttttgctgtcatctgagctgtcaaagtcaatgtcagtatgcatactgtgctgtacttttatattgcttaaaaaaaaaaaaacatgagtatcacatgtcaaacttcattgttgaaggatgcttaacaaatttgatgctgtagaagagaattgccacctacaaccatagcatgtgatgaattcatggtattgtttagaaaccttggctgccaatgaaagtgagtttctttgcatgggaagtaaatcggggcaggatccttaccagagattagttgaaaaagaggggctggaccatggtgaactgatgtttcgtatgtaaggatgaggacgaatcaacaaatcaccttttgcttcattgtaccaaaacaagaatcatacggcagctagtcttctctttgtttggggtagaagaatgagtggcaccgacttcagttaaaggggccttcttaagttggtagcgatcctttgtgggaaagacaagaaagaaagcgtggaagactatcccccttatgtgtccttatgtgttttttagactgcttggaaggagagaaataatgggtcttttgaggacgtggaacaaatggatcaaatgctaaggctttgttttgtaactgattttgaaggcatttcccaaaaaacagtcataaaaatcagcttttaagaatagtttttaaaaactgttttataatgttttgtagaacaaatgtctatttgagaacttgaaatgtttttaacctatttttatgtttttaaatatattttaaaaataacttatatatgtagtattttatttttaatcattcttcatatttgtgtaattattttttaaaacagtcctcaaataacaagtaaaaacaactgaaaacaactaaaaaatgttatatgaaaacataatgttttctgtttttaaaaatagaaaaatgatttatgattttaagaacagaaaactaatttttgttttctgattgccaaacgtgttttcgtgtttctttgttcaagagaatagaaaaccgttttaaaaaacaattaccaaacaggacttaaaggtttctttgggattgtttttaaaaacaatacaatgttctttaaaacataaaatagtttcctaatttggaaaatacatttgacaattttttttataagaatttgttctaaaaacaagtggttttcaatgtttttttttgtaggataatgttatttttttgtagaatattatcaagaacaattaaaaacatagaaaatactttaggaacttttccattatgcataaatgtatgatacctttgttgagagaataagttgaaaaaactatttttcatatttgagatgaaactatctgttggttgggtaaaaagcaagttggctatgttcagtaggattgtggggttgccaatggaggggtttgagaaggaaattttttccctgttgaggtgaggaaggtcctttctgtagcaaaagtaggaagacaactctttcatccaaaattgagagatctgaaattggaatttttagtgaggtataatggcacaaaagggaaagtggggttttttgggaggatgggttttgttggctgaaaagcttcactcccttggtgttatgtctcgggatgagcctaggggaaatgctgtttcctatgggacagggagtacagttggggaatctgaaggaaaagcccaaaaatcctatgtcgatgtggtgaaatcaagagagaaaaaggtaggggaaacactatggttatagttgggggagaaagacatctcaagtgagaggaagttaatggaccgatgtctggttggcagatggggacatactccactgttggatccagatatgtatgctcttgaaagttgggggagaacctgttggaatattaaaggaggaatgaagtttgcgaggatagggggccctctcttgctgattgagtttgagaataaagatgaggcagacaaggtgcttttaagaggaaacagatggttcaaggaatcgcctctgcatttggacaggtgggacccaaaagtggggtgttctcaaaatggcgagagagccgagagtgtttgggtgagagtcgtgggattgccgttgcatttttggagtcaggaagctttcagaaagataggggactgttgcggggggttcgtcgaagtggatgtaaatactgctaatcttaaggaactaaggtgggccagaatatcagtgagatatgtaggtgtagagtggccgagtaccatgcaagtagtagtgggatctttttgttacgctctccagctgtggtgggaggtgaaaccaggcttgtcagaagtggttccggcgataagaaaagaaaagggcaaggagcgggaggttagggatgacggagaaggagatacacgcgctgaattcaaaagggtgagagaaaagacgtatggggaacctgcaaaagtggctgagaagtacaaagtaggtgaaggaagctgcagcaagaaagctcagccctctggtactgtgtcgggagcagcatcagaggctgacgggtcaacaggagaccgatcttcagcttgggggaagagttcttgctatgggcctggagaaaatctaccactgggccggcaaggcgaatcgggttgggaaagagagcccgctgtggagggccaagggattaaaaaataagaggaaatgggccggcccaatttgaagctttctaaaggccaggtgggggagggacgacccattttgaagattgcaaaatgggttagggctcccgatgggcgtcgcagtggtggcggagagcaggagggggatttgtttgggtccaagctgggatcgcctcgtccgaccgtcaatctctcagaaatcactgacgaggcgttattggaggaggcctccaggtattccgatcaaacctcttctcctttcttgtctctggggaaacgggatatctctctcttttctactccttctgggtgggacggggaaggtgctgtcatggctagggcttccgaccggggaacagtttcagatgacgaagggggagcagtcatggacccgctacggatgattttggcggatggaagggaggctgaggtttcggacttggtgggtagagagtctgggattaccgaggtgttatcagtaggggttttggaaagagtctcccatgaggacaaaggaggagaggggcaaagagggggatctgtgttggcagtctagtagcctggctaaatttagctgctatctaggaatgccgacggaggggatttgaaggggaaatattgttcttgcttaaaagaatgaaagagaggaaaattcaaaaaggtaattttggatggtagaaaaaggagaaaattagagacgtcaaaattcgaaagagaattgagaaaattggaatggactgtgaactatattggaggtggaggaggaggaggaggagaaggagggggaagcacgagtaggtctaaatgaagctccgaatgctcacctggaatgtaagaggggctaataattgcgacaaaaggaaggtgatcaaagccttgattaggaaaaatagggtggacttggtttgcctacaggaaaccaagattcaggaaatgtctacgggcattgttcggagcttaggagtgggcaggttccttgaatggggagctgtagactcaaggggtgcagccggaggaatagtggtgatatgggacagcaggatgctggagttggttgacatgcaaaaaggattgttctctatttcgtgcacttttaagagctgcgaggatggttttatatggacgtttacaggggtttatgggctaactttaaggagggagagggagagtttttgggaagagctgggggccattaaggggctttggaatgggccgtggtgcgttgcaggggactttaatgccattctgagaccggaagagtgcaacagaggagggagattgaactcaattatgagaaggttcgcagaagtgatagaagagctggagttaaaggatctgcccatggtggggggcccttttacttggactggaggagcggataaccagtctttttcaaggttggatcgctttttggttaatgaggtgtgggatagccattttggagatgcaagacagtttctccttccaagacccgtgtccgatcacttttcgattcttatggacggtgggggtctgagaagaggccctatcccgtttagatttgagaatatgtggttgaaagcggaaggcgtaaaggatctattgaagcaatggtgggaggaaggcagcttcagtggatccgcaagttttatcttggctgaaaaattaaaatttatgaaggctaagctgaaggagtggaacagaaacagttttggacgagttgaatatagaaagaatacgactctggagcagatggagtattgggatgcaaaggagaaaaccagcaggctgtcattggaagagctggaagccagaaacgaagcgaaggaagaatataaaaaatgggtcttacttgaagaaatcacgtggaggcaaaaatccagggaagtgtggctgaaagagggagatagaaatatcggttttttccacaaaatggccaacgcacataggaggaggaataatgtggacagaattaagattaacggagcgtggcttacgaaggagaatgatattagggaagggatcgccaatgcttttaagacgttattgtctaacccgggggaatggaggccttctgtatctgggctgcagtttgagatgttagagcctttggacgctagtgcattggagtctccttttatggaagaggaggtatttgacgccctagtgggctgtaatggggataaagccccgaggctagatggattctctatggccttttggctttttgcttgggatttcgtgaaggctgatgtgatgagcttctttaaggagttttacgaaaatgacaaatttgttaaaagcctaaatgcaacatttatggtcttaattccaaaaaaagcaggggctgaagctttaggggattataggcctataagcttggtgggaagcttgtacaagtggctggccaaggtattagtcaataggctaaaaaaaagtggttggaaaggtggtttccaaagctcaaggggcgtttatggaaggtagacaaatcctagatgcagtattgatagccaatgaagccattgattcgacccttaagaataatgagagcggcattttgtgcaaactggatatagagaaggcgtatgataaagtggactggaattttattctcacaatcatgaagaaaatgggctttggggagaaatggattaggtggatttggtggtgcatatccactgcaagtttctcagtgatgatcaatggaacccctacgggcttttttcaaagctccaggggtttgaggcagggcgatcccctttccccctacctctttgtcattgctatggaggtctttagtgttttcattaaaagggcagtagagggagattttttatttggttgtagggtaaaaggtcggagcgaagaaggggtcctaatttcccacttgttgtttgctgatgatacacttgtgttttgtaaaccttcacaagatcagttgacttacctcagttggcttctcatgtggtttgaggctgctttaggattgaggataaacttggaaaaaagtgaattaattccagtagggagggtggagagtatggatgatcttgctggggagtttggttgtagtttgggtagtcttccaaccacctatttggggatgcccctgggtgctccttttaagtcagtcacagtttaggatggtgtggaagagcgctttcgaagaaggttaactatgtggaagagataatacttgtccaagggaggaagggcgactctcattcatagtacattatcgaatttacccatttatttaatgtcattgttgtgcttaccaagctcagttagacggagattagagaaaatccaaagggatttcctatggggtgggggcaatctggaacataagcctcacttagtaagatgggagttggtgtgtttaagcaaggcgaaaggaggcttgggggtcaaaagcctttccctccttaacaagactcttcttgctaagtggaattgacgtttcgcaaatgagagagaggctttgtggaatcaagtgattagagggaagtatggagaagctagagggggatggtgctcgcgggaagtgagagaggctcatggtttgggtttgtggaaaggaattagggtggattggaagttggtgagtgataggatggctttcatagttggtaatgggagaagggtgagcttctggagggatagatggtgtggggagtctcctctgtgtatgacctttccctctctttttgctttgacggttgagaaggaagcgtgggtggcagatatatgggatcccttggctgaggggggctgggggggttggaacccctgttttttaagagcgttcaatgattgggaggttgaggaggcggaaagatttatggagaggattcagagtaaaagagttattgaggatgtggaggatacggtatcctagattgaaaccaagagcggtaaattctcggtcaagtctctatacatagctcttgaagcaagtggttcatctttgtttccttcaagctttatttggaatgcgaatgtgcagcccaagattagtttcttcacatgggaggccacgtggggcaaagccttaacttttgatctagtccagaaaagaggatgggccttggcgaatagatgttttatgtgtcttgagaaagaggagaccataaaccaccttcttcttcattgttctaggacgagggcgctatgggatcttctctttgctttatttggggtgtcttgggttttgcctttttcagttagagagacccttctaagttggaatgactttttcatgggcaaaaatcgcaagaaggtgtggagagctgctcctcttcatattttttggacggtttggaaggagaggaatcgattggctttcaagaatgaatcggtgtcaattcagagattgaaacactcttttattcttactttatgggctgaggctaagttgttcatagacgattgccctctaactatagctaattttattgattggttgggttttaagtaggtttgtggcaatcggttttttgtcttttggcctttgatggcgggtgtataggttttgtatacttagagtcgctattttagcgtctctctccttttttaatgaaattcatttacttatcaaaaaaaaaaaaaaaattggtggttgggctataggttcagaggctctagcagtcgtattctggttttcaaattgaaagccttgaagatgaacttaaaagcttggaatcgggaggtgtttggaaatgtgtcagtcacctaatcagcagccttcaatcagttaggcttttgggatgccaaggaaacggaaagctcctttggttgaggaagaagtggaggtttaaaggagtagttgtagaagattataataagtgagcaaagctagaagaaacctcttggagacttaagttgagagtgatatggctgaaggagggagacaaaaacacaatattcttctactaggtgacaaatgcttatcaaagaattactttatggcttgaataagagtgaacgagatttggttatcctgtgagaggagattaaggagggggtgactaactcctattgaagccttcttgttgagtccagagaatggaggccttgcattaatgcgatgccctttgcttttttgagagcggaggaagagcttggagttacctttttgagagggggaagattattttgccctcttaccctggaagtgggataaagtcttgggaccaaatgggtttattatagccttttggcagctgtgttgggaatttgtgaagagttgcgtgatggggttctttggggaattctatgagcaaggtctgagtgctactttcttgaccatggataaatcaaagaagagaggatgaactttgatgaatagatgttttatgtgcaaaggtgaggaaaaatctattgagcacatcctctttcactgttccaatgctagaattctatggcagtagtcttctccttatttggaattgtttgggtgctaagttcatcaattaaaacaactctacaagttgacatggatctttcattgggcagaagcggaagaaagcatgaaaaactgcttctttgtgtttgttttggacttttgggaaaaagataaataggaaggctttttttttgataggaaaaataggaaggcttttgataatatagtaatatggatacccaatagattttataaaatatttatttgtttttattttaattatatttataatttatataattaaattttatttaaatcctaatatacattataaaatttattttaaagattgataaaaaaaatgtatatataaaatttattttaataaattgttttttttggtaattttctattgatattttattaaatattcttttagtagtggattgtcttcagtttgattttgagattttgtttaaatgtttatattttagagttaatcaagtagttatgaatttacaattaactacggagttatttaaattatatactatttaatcgttgataaaatttaaattatttaatgattcacatggagtcattaaattataggtaataactatatattttttttattaccacttatctattatttgagaagacttgtgactccaccaaatctctaaccatcaaatgacatgttttaatgatgactcttagatgaaaattttatatcttataaaatatttatttgtttttattttaattatatttaaaatttatataattaaattttatttaaatcctaatatacattataaaatttattttaaagattgataaaaaaaaatgtatatataaaatttattttaataaattgttttttttggtaattttctattgatattttattaaatattcttttagtagtggattgtcttcagtttgattttgagattttgtttaaatgtttatattttagagttaatcaagtagttatgaatttacaattaactacggagttatttaaattatatactatttaatcgttgataaaatttaaattatttaatgattcacatagagtcattaaattataggtaataactatattttttttttattaccacttatctattatttgagaagacttgtgactccaccaaatctctaaccatcaaatgacatgttttaatgatgactcttagatgaaaattttatcactgtcaagtgatttatgtttaattatttgaaaaaattcaaaaaatttattagtgaaattattaaaatattcatcacaaaaacttattaaaattattaaaattttttagtgatgcttcttgctgttttttaaaatgcttttgaaaaatcctttgaattttttaataaatttttataaaagctcaaattttaactaatatttttagtttttttgttgtttaatttgataaactgtattttttttttcatgattaatgtctataattgcttacctttttgaattgatattctataccctttttttttttttttaaaaaaaatatataaaaatttctttcactgtttaatattgcattatcaaaatgttctcttggccatcaagaaattattgacctttttcttttggtggaagcttatatttaagggggatattcaactttattttagaaatgcaattgttatttttggctgttccatttttatttttagcaatttttagcatgagccttgccagtttttctatatacactaacatgtccatattcttgcatgtaattatctgtatgcatgtttgtatatgcaaaattattgttttgtcaatctttcagtcattcgttttactccatttttgatttatcacttgaattgattattacctagtttacaattagggcctgtgttgtaataccttctatgcacttttttgatactctgagaactatgttaatgtctgtgtctgttgtgctaatcaaagatttggacacctataactcaccccatgtatttcacttgttttcttactcatgagaaaatgataatcatctgatgttaatatctgatcttgttctaatatttttctttgtgtgtttaatatttctaccatgtaacaaatgagaacagattaaaatttggaaaccccatggggcatggtgttctgactgcatatatatatatatatttttaattcagatattaacttttaacattactgttgtggattatcagaacttcatgctatcaatttgagtaaatgcactttatgagtttttatgttggtatgtctattggttgcagtataatacaagacatttgttaggcctctgccccccccaatctttcatttttttttgacacttcctttttgaaattcagtccttggattgaagctccatataagg

SEQ ID NO: 13391 - DNA, 2864 bp, Vitis vinifera
  Intron number 1 from transcript GSVIVT01023972001 (locus G SVIVG01023972001) derived from phytozome v7.0 (chr-ID chr3 ; pos 2028873 to 2031736 reverse strand)
gaagccagaggtgtgggagtggaatgagaattgaagatcagaaacttccttaattgaacccattccttttttacataaacggaaatcaagtcttggtgggaaagaattctgctctaatttgcatatacagatttggaaagttttgcagaggttgacggagaggatgggagagagtgtagatgagaactatcagcttgggagactgaatttgctgagaatataaagatttggctttaatatgacaatgtcactcacgatggagacgatggagatagagagagctcatggggaatagtaaaacagacaacgacgaactttttgttttccctctttttaactgatttttttgcatatttatgatgataaattaagaaaaaataatttttatttttatttttatttttatttaaataaattggaagttttaggatttttattcaacgactattgattttgtctatgatacttcaattttgagcaaagataacttcaagcggaactcatggcaataaccgcatcctaacctcttttgaaaatatcccaaagttttactagttgtagtcaataattaaatacaaaaaaaaattattaaaattaattaaaacgaaaataaaaatcatgacttttcttctttatttatttattttttttaagtcttttttatcccttactatatttaattgaccgaataaaagacatgataacatatttggtcttggattaaataattatatattcaatcaaaccttcaatagataaataatgagatatattatgaacattttcttttatatatcttcactatcatatatattaatgctaatctaagatataagatatacatatttcatatattataaattttttcttttttttatcaattttttaactcattttacaaaataaaactttttaaaattaaattaaatttttggttaaaaaacacctaaaaatgaatttataaaatattatatatattattttttatggaatgacttatcaattctttatccaagaaacagtgtaagtaatgttttaattttgtaaaaaaaaaatttaaatttttttaaacagttgatttttcttcaaaaacactttttaaacaaagtactttttaaaaatgctatcaaacagattctcaaatgaacttaaattatgtttagtatagtgcttttagaaaacgtttgtaatataaaaaataaaaatttaaaattagtcacaagtttcaaagaatacttttaaacaattaaaaatcacttttagtacttcatgaagaaatattttaaggatgattctaaaaaaaaaaacatttcaaaacaacgcattcattaaaaacattttaagtaaaagtactaagatttcgtttaatagtgattttagtaagtgtttttaatatttttaacattttaaattttttatctttttaagtgttaagaatgatagaaattttttctacaatcactatcaaatgtagtcttaaagtgcgtttcgtaatgatttcaataaatgtttttgccatttctaatacttaaaatataaaaaatttaaagtgtaagaaatattataaatacttcttaaaatcactgacaaatacacattaaaaaacacattcttaaacctgcttgatgttattttaatgggatagaagtcttttcttatataaattaagtatttgataaaattttgaaattcacttttaaaaatctaaagaatcactcttctaatctaaaagtacttgataaaattttgaaattcacttttaaaaatctaaagaatcactcttctaatctaaaagtacattcttaaacctaacggaagtcttttcttatagaaattaagtatttgataaaattttgaaattcatttttaaaaatataaaaatcacccttctaatctatcaacaattgttgggtgagtgattctcttaaaatctttttttattattattattattattatattgttacccaaaaccattatcaaatttttattttttatttttattttttatgtccaaacagtaagctaatctccttacaaaacatttctaacgaaaacgctacttattataggaccacaaggctcagggagaatctagtcatgacttgacctagtctagtttaccccaaggcaagcggaccgtgccgtgcccagcccagcacatcatgaaaacgggccctgcttagcgctatgtaagtgggaaatgggccttacttggcccaaaattcatcttactacgtcgatgttggtgggcctatatcaattttaacctacttaggcgcctctctccttttactcttttattttattcttcattttgctgaccatcacaatcagaatgaactacgaaggattagaaattttttatttctctttttgctttgtggagccaccacgtgccattcacttgagaatgcttcagcttttttaggcaagaggtggatacactaaagaatcaaaacgacgtcgttcactcaatctttcaagacccaaccaactgtcttttccactttgatccaacatcaactaccaaaaaaatccgcatctcagcctctctataatcctctgattcaccagctctgagtttcaaaatctgcggttcatagaattccaagaaaaccagagatggggttatctggattgacgccaaaacgctgttgaagtaatgccaaaaaactctgtaaagtaatgctaaatcgatggttttatggtgtgtcggcacagcatttcctctgaagaggacgcgtgttgacccacctctacggcccgttcgtgatattatgacacagccaccaaacccactttacccctttaatggttagctgttagcaccactatcttgtttttcttgtagtccggagccc

SEQ ID NO: 13392 - DNA, 10019 bp, Vitis vinifera
  Intron number 6 from transcript GSVIVT01005714001 (locus G SVIVG01005714001) derived from phytozome v7.0 (chr-ID chrU n; pos 21502591 to 21512609)
cgaaggattgagaagcatccaaattggactcttatgtgtgcaagaatttgcaatagattgacctaccatgttgacaattatttccatgttgggtaacaactccactcttcctcctcctaatcaacctgcatttatcatgaaaacatgtcataatgatgcaaagtcacctaatgtaggagcttgttccataaatgaggtaacaataactatggatgcgtgctaaatgctcaagctctcatgtgtaaatttatttaccatgacaagaaattttgcacacaatatcattaaatttctctacttttgtaactcatttttcctttttaattaaatgcaattataaggtaatatatatgcttatgtggatgacaaataaaataatttgtttatttacataattgaccaagtcttgttgttttgcaaggcttttggatacgtagttgagcaattgatcaaacatattttcttcattgaaagcttaattaagcctttaagcagggtctttgattagttcaccaattctaatttggaaatgagcatttgcactagtattcttatacttggttgaaatatcaatggttttcacttaagaaatttgtcgaagttcaattccaaattttgaaaaaaaacataatgcttgtagggtgtcgatataaattagaacacagaagcaatgttgttattttgagctaatttgaaaattttttaggattatccttgggcccaatttgactcttatttgatttttgaacttttcttgtgtcttaaaatgaacttttttacaaattaaaaatcctaaaatttaatataataaatgataacataatagagaaatttgaacataactcaatggtttcttttttgtgttattgcaattaacagatatatgaatatgtaatgagaaatttattttttgtaaactctggtgcctaccatatggggcattactattagagataacttgtggaggaaaaacactacttattatcaagacaattcctcattgcattttgttagtcatgtgtacaattaaatggattgatattaatttattttggttggtcatgtgattaattaaatggatagttatttcaatcatttacttacctaagtactccttgtgaacactaattctaagaagatataaaatattttaggtatggaatatatgaaaagaagagttagccttggatataattgattcatcactattaaagtggtattccagtttttccaagtactcttgagatacatttaaattgggttcttaggcatacaagaacctataattatatatcaagtgttagcccaaggattctcctaatcaagttttaattattacaaaacaaggttaagttcattaacattttaaatcaagtcatgaaatttttaggtttcaatgaaaaattccagagaaatcttaaacaaccttgagagaaaatcaaataacatgaagatgtgaatcccttgaaaacttaaaagtgtctaagaaatctataagatagtattttatggtacacttaggtttaaattttttttcatatactttaaatttgttttcttcatccttatttaagattaaaaatgaaatttgctaaaaataaaataaaattggatgaatgtgttttaatttaaaaccttaagcctatttctttttaagccgattttaaaaagtttttaaaggggttacttcctagaagattggaataaaaaattgaaagttcttatgcacttttgggtgtaactagttgagggtaacctgaatcaatcaaaccaattaagaaaccaactcaatcgattaggctcacctgatcaaggactggttaatggtgcacaaaattttcactcttctagtagctaatatgatatcgattgaggttttgactcactcagtcaagcatcagttgagggttagtcgaacttaaaacaaaaaatcaatgatcacctacaaagtattaaatgcatccatgactagtcaaccatttgaactatagctagaatggttgaggctactttttgtggttttaagtgtccaaagttgttttctataaattgaagtcctactacatttattaaaaaaaaagaaaaacacacacacattcattgaattaatgaaaatcaccaactttcttacttttaaagcttttcatttaagtgcattgaatttcaacttgctctcttagtgcaccaaaaaatccattctagtttttcttgtattatgagccaaattctttctaggatttggaagtattgaattctcctcccatttgttctatcttgagaaaaaaaatgctttaacgctatggaaacttgaagagagtgtgaagatccatcagaatcttgtaatacaagagtaagaaggttgaaaactttggccttaaagtcttggagatagtgaaacttttattcgattaagaacttaaggagagtgaacgtaggtggattgttaaaccattataaaagagttcgcaatttttctctctactttgaactttcttctactatcttacttaactcttcttgtctcattaaactttttaaaacattttcaaatggttttataacattgaattcaccttcctctcaccttttttaggatgatttgcttaattttattagtcatctttcatgacatagtatcaaaggtaggactttttcttttaatttaataatctaagaggatataacaaattcttacaactcatctcatatggaaagactttcaattaattgacctctattcttttcgagagttgattattcttattgggaaattaaaatgacagtttttaaaatccattaactatgatatttggaatttcattcaaaacggttcccatgttccaactaaagtagaaaatggagtagttattcctaaaccaagtcaagaatatgacaagcttgataaaaagaaaactcaataaaatgaaagagttatttattatttacattgtgtaataaatagaaatgagtataataatgtatgtcaatgtgaatccattaaggatatttgaaaactacttgaaacaactaatgagggaaccaatcatgtcaaaggatctaagattaatattcttatgcatagttatgagttattttctatgaaaaataaccaatccatcagggaaatgatcactatgttcatcgatatcatcaatggacttcaagcattgtgaaagatctataaagaattgaagaaagtggtgaagattttaagatcttttttggaaagtggaaataaaaaatcactgcaaagccaaggatctctcaaaacttcctttaagggaattaattggatctttaatgactcgtgagattataatgaaaagtcataaaaaaaaaaatagaagacaaaaagaaaaaaagtaggatttccaccattgatgaaaaaaactgacgggaaagaagctagcaaagaaggtgaggatcttgcactcatcaaaaggaagataaaaagtttattagatctaataagaacaaggaaaaaaattccaaccattgaaaaactctcaaaagaaggagttaacaaatggagaaaaaaaaaagagggacttcatatgctacaaatgcaagaaacctagacatatcaagtatgattgtcctctctacaaaaataaagaaaagaaaagaaaaaaagaagactatggtgactacttggagtaatagtgaagacaactccatggaagaggaaaatgaaaataaagtgatcaacatgtgcttcatggcaattgatgaagtggatgaggtaaatttgaggatttgcaagatgtttttgaggaactctatagagaccttaaaaaatgtctcttaaaaggaaaatcctacgtattgaaaaagaacgcaaggatatgtaagaaagttttgcaaatgttgaaaatgaaaagatttctcttaaaaaggaaaataagattttgaaaatgaaaaattattggttgacctcttttctctcaatcatttcttgtagacaaaaatcctttgacctaattctttcaagtcaaaaatgcatttttgataaaaatggattaggctatgagtcatttaagaagaaaaaatatttcaaaaattattttgtcaaaaatacatctagtacaagtctatccactatttgtaacttttatggaagagaaggttacataagtagaacttgttctcttagaaattaaaaaaaaaaaaaagttttgagttgaaaaatcaaagagcactaatccccaaggatgcaaaaaaatatgagtatctagattatcttaacttgtcttgtagagtttaaagaaagacaaatgattcttggatagtgaatgtttaagacatagatttctttctaagtgatgaatagtttacagtcggttcatggcatttaagtaatccatctaagactgtaatgcactaccttataattagaaagatgacttgttttagtcatcaagatggttttctcacggtgagtgcaatagtgtatgtgatgcacactagataggatctataataaatcatgacgtaagcctatcaatttttataattcaccaagctactatactgcatggattcttaatcttgagatggtattgaacttacatcaaaatcaacaagaagctttgacttatgggtaaaaccctaaagtggtcttatatccctatggattgggtcattgttgatgaaggttagtggaggtagatattctcaataaaggtaccatgatatctcatggtattgaaacaatgtgtttcattgggtgatctaaaagacatgtgatttaaaaaactatggtcatatcattttatttagtcaaatttgatatatgctccttggagatagagtatattaattgatcacataataaggagaatttgtaacttaaggattaaagaggtaatcttaataggtaataacactaccttgttagattacaaacatcaattcatgaagagtctgcatgtagtggattgtgggcacaaatccgagctatgttcattgtaatttcataggatactaaagtgtagttgattaataattagattataagagagctagtattttccttttagtcccagtggtctccatttaagctcctattacatatatatatgtatgtttattttgagagatttgagtttctggttcataagtgtgcataagggcattttgataaaaatgtaaggttgcactagtttttttgaactatttttgtagtaagggttaattaattaattaggacttagttaggttagattaggtgatccaaacccattttgggcttaagtcacttaagtttacaagaaaccttataaatacccttgttaggggctaagatttcaatttttgcttgtcattttctagagaaagcctctagagaaaaaccttagctaccctctaaagagaaaaacccacacttttctcattgctagttacatttgaggagagattatgtagaaaactagtaggtggatgagatctttaacaacttcgatttgatcttcaccacacggatttgatctgggaacatccaaatctaggtatggtttctatttctttagataattattctatatggtttttattaccattgttttcatcaaaataatttctaaagctagagaagcctagggtagtttgcatgctccctatagaatccaagttgtaggataggtttttatttgttagatatactctaaggtatgctaactctattttgtaaggttgtttatttcatcccattgcctcaaagatgaatgtttatggtttttttttttttttttaatatgatggttataattgtaatttgcttttgctttctcttagattgagttgtaagcttcatgtttaggggcataagattttttctatattgtaaaaatctagtttttaattattagattgattgtaaactctgttttgagaagtataagaacttttgttgcaaaagctctagtttttttatcaatcttataacccaaagaggagaagaaaacattttaaacgtgccatcatgttccacatggagatttggactggctaaggtaagttttttgatagaaaaatgaccaaaaattgttatggtagtagtatcaggtacataacaaaagggtgtagtgcttgaatgcttatattagtgctcaagcggtggtgtcaagcgctcaagcgactaaatacgcgtcgagtgctcaagcggctaaataagcgtttgagcactcaagcggctaaataagtgcccgagcactcaaacggtagtaatgaaagttgctttcaacacccttctcaactttttaagtgcttgagcggccttcgaatgcttatgataacggttacacagtaaagaaaagggtcatggcatattggggacttatgtaataacataggatttgattgtaaacactcactaaccctactttgtgttgcaaatattatattaggtaaatttggatgattatccaaatgggttaccaaatttatacaataggtccctaaggccatgggagcaattgctttatttatttttattttttttatgttatattttattttattatttatttttatgctatattttattttagcacatgttaaattaatagtaaaataatggaaacgtgattttgggtttttcttaagaaaataaatttttatgagaaacattttttcattgttatttttcttaaactagttgttgttgaaagttgtattgctattctcttttggaccatttacttggttttggataggtggttttccaggctctccacattgacagaaagaaagttaaattctttctaggattgaaagtattaaattcttccctaatctattttatcttgagaaaaaagacttcaaatatatgtaaacttgaagagagtgaaaatccattgaaaccttacaatctaagcgaaagaaggttgaaaacttgaacttttaagtcttggagataggggaactcttacttgattaggagtttgaagagaatggacttagatggattttcgaaccaccataaaatagtttgcattttctttctctctactcttaactcttctattgtcttacttaactctacttgtctcattgaatttgtttaaacaattttaaaaagttttataaaactccattcacccccttccttccttcccccactctaaggtgattaatttgcttaatttaatcagccatcttccacatcaagtaattatctgaagtagaaatttgagatatttttcaatcatattcacttgggctcaaattcaaataaattagtcttcttgagacacgtcgtcatcatgcgtatgtgttctcggaaatgccttcacctaattatatgcacagctcttctaatatgttagtattgaagtagttaatcaatttattttattgacaacttgcttaaaccatatttattagaaatgaacattccaactatggcttccacattgtcaattgtttatcttggttctactaccgtttagtgtaattaatcttgaaagctctgcttaacaaaaaacataaagtttgatttttctataacctattttcatttactcccatcatcccataaaattagatatactctaattaaactaagcctaatcctaacacgattacgtatgccctaaaaagacccctcaattttaactttaaagcataagaaactgacaccatcgattagggaaccctgaaaattgaaattcaatattccagtattttctttcattaaataaaaaaaagttgtggcactatgaatttaatagtaagatggatgattaaaccatgatcaaactatggtgcaagtatcatattataaatatttaatttatatattattaaatttaaaactaattataaaaaattaaaattatatatagacaattaaattttttaaaatattttgatgattgcatctttaatattttcatattaaaaataaaatgtaaatatattaatattttttattttattaaataataaaagtatactatctaattattaaaaagatatgcaaaattgaaataaaattgcactattatttcattcttgtttcattaattttatattgtttatttttttatttacatattattaattttatattttataattttattacttaatatgttttatgtatgagaagttaactgtattccaatttattataagtcgttcctacaataatagaaatatttgtcataatactcatataagtaaggatgaaaatattggtaattatgcatatattagcatttagattttatggatatattagatatattataaaaatatcggtgaatattttgacataaaatattgattgataataattaattaaaaaatcataaaaatattaggaaaaactccaaaaatgataaacaataataatacatatattaaagttatttaaacaaaagaatttgatatacattgaaggatataatgtatttaatttggatatattatagaatataaaagaaatgtttatatatatttaaaagtatttttatttaaaaaatttaataatttcatttataaatttatatttttcttgtatttaattactataattaaatttaacttctttacaataattttattttaattaatctataacaaacacacacacacacactaataaattttattttataaaagtaatatgcatttgataaaactaagagcattgcaacctttacttaaattcgatgtagcataccagggttcaagtcctggtggtgtgctttctgggtttatggtttttctaatctttgtggaagtgaatcccacatcggaaatggggagcaaaatgaatacagagatgctcccttcacgcttgaggcttggattgggcttcagcaaattgagccggataatgtattcttttgaggcccttcaagcatttccatcccatggtatcgggccatataaggcaagccaattccaccggtgtttctttctttcaaagagaatcaattaaatcaattcaattccatatcctttacacacatttgaaaataaccacaaaataaaagctttttaaaaataatttgttaaaaaatagaattaattagctaaaaagaataaaataattctcatattcgttaatttaacctttttcatacttttacttgaaaagtaacatatttttcacataatgtcaagcatttacacgtaattttaaaagaaattgttatttttataaataaaaaaaaaagaaaagtgagggtatttttattaaaatggggttagaaaatgatagaggattaaattttcaaatctaggttatccatcacccttttaatcaaataacactaaaaaataataccttcaggaaaaattatataaaatcttaattattttaaaataaatgtattaattttgaattttttaagaatgagtttttatttgtgatctttttgaaatattcgagaaatcaagggtctatttgggaagtgtttttaaaaacaattttttatgtttttaaaaaaaatgtatttgggaactaaattaaaaaaaaacagtttttttttttttgaaaagaaaaacacatttgattgagttaataaaaacagtttttaagaacaagtaaaacaaaaaacttgtttcagaattgttgttgttggaattttttatttttattttaaattgagtgttttcctcatttaacttgatattgtaaatatatatacattttgttggaatttttattttcattttaaattgagtgttttcctcgtttaacttgatattgtaaatatatatacatttactagtcataaaaaatatatataatattcatatatattaccactttaatacctcatggacataaattaagataaaaaatgcttttatttctttccctttttttctctctcttcagtatctccactgtttttttttagtcctctatctcctcttattctttgtttctcttcttctacctcttcttattctctatttctcttccaaaattcaaactttattcattgaagttgaatcatatctctttaaatcaaaacattactcactaagaccaaaatcaagat

SEQ ID NO: 13393 - DNA, 18687 bp, Vitis vinifera
  Intron number 15 from transcript GSVIVT01013853001 (locus GSVIVG01013853001) derived from phytozome v7.0 (chr-ID chr 16; pos 5267188 to 5285874 reverse strand)
atacctcaggtttgtcttctcattcaccaagatatccatgtagtaacagtcaactagcagatgtcgcaactgacaattacacaacaaatatgccatttttgttagtcactgatgtttttattttgcttttacttgatggtcatttgggattttttttttggagcattaaagagatacaactaatcctccataatgctataaataggtaccccgcctggaattttttgtggggctcatgtgggtaaacatcccatatcaagaaaaatgcatctgaaaatgtatttttcactatctgtataatatattatattattttcattagtagaagaatatttgtggctttgttgccactacaaaccagattttccaccatccccatggtagtgttgattttcaggcaacttataattatgtagactgggttatcataccctttataagacgggttatacacatagttggaggaggtggatccatggatgcttttcatcagttaattttatggtgcttgttgatgggaatgccaaaggttggtttggcagctccagaggaatttgtcagggtgactctacattggcctttttgtccattctggtcatgaatttgttttgtggattaattatcaggggtcaggactctggtctagtggagagttttcaggtttgtagaaagagatcaagcatatatcatcttcagtgcagatgacaccttttttttttttctcttcaacaaaggaagagggaaacatcctagaatgcactcctaggcacaagagtgttgcagtaatacttttggtgagtcagatattgtgtccaagagggtttgcaaggaaagagaaatattatgaacataaagaagggaaggatatggatgggagttgaagcaaataaaggactgtaccatagggtaagcaaacaactaatggcagacaaaagtgaactgggctacagagggagtcaacaattggggaggctagggcttttgaactattgcttttagatcaaataaggagacgaaatatattccaataaaagtcagttttctcactaatgagtgaatcccaaattggaggataattctcttaaagtgctaatttaaaacaactagaatttaacagttctacaactctatctcaatatttaggtcagtctaacacataatatgagactcaagcattcaatatatcttcaatgaagaaaatactaaatcaagagagtaatgcctaaagaaatgccaaaattaatggaagagattcatggaaatgatggattttcatatatttgtcaaaattaagtacaatctgacctcttttgaagattcaaaactcttcctcgatcctagccctcaaggtttagcttatcatggagtgaatagagcaatcaacttagaaaatccccaagaataaagaagaaaaggaagaagaagatgatgtgcaggaagaagaaacttggtagaggaagaagcctcccctctcttccttcagaactgccttttatatcggaggcctgtaaaactttagtattgactgcttggatggtccagattgagcttcaaaaacatccttgtttggaagtagtgctgcttctagcaggaatctgcaggtgtgagcctaaattcccttgagaagatgggctttgcatcagtcagtcatttgctcctattttctcttgtgcgaaaggggatctgctcaagtggatctttgtggctcaaatcctcagtcagctcaggggagtcaaatcaagcgctttgtgattctgctagacctaattctgttgctccatgctttgtcccttcaattgtaaactgcttgtcccctggtgattatgcttgagcagattttccttcttctgattcctttctcctccattttacttcccaatctttgccaaccctaatctccaatttctgcaaataacaagataccgaaattcaagagaggagcctgttatggaagctctgatcggttaccaataggctgtctaagggaggagcctcttcttcagttgattttgttggggatctttctacacttctcattatttatagaagtgcacgaagtgatggaaatatgctcatactgactaaaaggaattgagtacagaaattagtggtgaagttgactactctcaactcttcacttcacctgttgctatgtcatgcatggctaggtgaccttaaatactatcaaaatcagcattttatcccttcatcaggatattggcaagttgatttcataccaagcaaaactgcaccccactggtttggctagagtgagaaaggaactcctgaaggagcctggatcaggtgattgcttaaattgatcccatttttctgaactggataaaacccaaaataaccaataaacctggtcccattgctcttaaatataacatatatgatcttgtgaaagagatgaactcaaaggatggcagcatcagttgcaagtattagcattgtcatgaagtgtcttttcttctattattgagcttctatgagattttaaattcttgcttggttaagttgttatactattagaaaaataaaatggaatttcttagggttctattgtattaggatttccttttttgtagggtttgttgtagaagagaatttgtcttaaaggtttcttatagtctagaaagataagagctcctcatagagaatgaatcctagtccaataaggaattaagtctgaagtttctatgtaggttttagtggaattctagagagagaagtgaaaaagagtgagagttgagatgaatgacaagttttgtaacttttccatattgttgacactgaattttttttttctcaccttgtaggtagtcatgtcatgccaaaccatgtgactcttctttgtttgtgtggtttgtggttgattctttacttggatgtacaagcaacatatggacaataatcatcattggctttacatgcaagtgccattgctgatggtgaatttcaattgaatttcaattgaaaattcttggtctaagtctaagttgaatttgttatttgtgaggctttaatgtgtgggaaaaggacaaaaaaatgaaaatagatgaagaagagagaagaaaaaagacaatgttgcaagagagagaacagggttctctcatgagaaagatgaagagaagatggagtcttgccttgctacttaggatgctcccaatttgaaatttcctggtgatgagtctagccttcttgttggtgtgcccatttcagaaggtgtggcgtcccttagagaagcctctaaccaaaaacttaaaggttttttttttccatggggaaccacttagtagcccagaggagctttgcgtcttaggtagaggttcatccctagatccaaaacctcccagtctcccgttggaaggttttcaggttaagggcctcacgcccaggaaaatggtaaaggttcaatcagtgttggagagtttaaggatcagaattgtcaaagaaagtgaaaaaggtgtggcgttggagagtaggagtactctttctgcgtacatggtctattttagaaggaagagaaaacctatttgtcgaatctagggggaggcttaggtttgttctggtttttgttgggctcttttctatttacatgaagatcataagttggaatacaagagggttgggttctaagaagaaaaggaagattgtcagaagttttttaagttatcaaaatccagatattgtgatgcttaaggaaacaaagagagaaatttgggataggaggtttgtgggtagtgtctagaaaggaagaaacagagagtgggcttttcttcctgcttgtgaggctttaggggggattgtgatcctatgggattcaaataagttaaagtgtatagagaaagtgttagggtatttctctgtatctgtgaagttgaattctggtgaaaaaggtttcttttggttaactttagtgcatggtccgaataagcttttgtggaggagggattttttgatggagctacaagacttatatggtcttacgttcccaatgtggtgtgtaggttaatgtaataaggaggatctttgagaaattgggcgcttctaggttaacaccgaacatgaggtgttttgatgagtttatcagggagagtggtttgtttgatccccctcttagaaacgcggcttttacttagtcaaatatgcaagatgttcctatttacaagagattggatagatttttgatttcatttgagtgggaccattttttctctcaaagtcttcaagtggcacttcctagatggacctcagatcataacccaatttgtttgaaaactaatcctttaaagtggggcccaattccttttaggtttgagaatatgtggttgctccatcttgagtttaaggacaattttagtgcttggtggcaagagtgtccaattgaaggttaggaaggtcataagtttatgaggaaattaaagtttgttaaatcaaagttgaaagattggaataaagtggcctttagagatttaagagagaggaaaaattcctttctttcaaacttaggtagaattgatctaattgaacaagaagggaacttgaattagtatttgttataaaaacgagccttaagaagaagggagttagaggaattgttgttaaaggaagaggttcactggaggcaaaaatctagggtcaagtggataaaagaaggggatttcaattctaagttctttcatatggtgaccaatggaaggcaaaacaggaagttcattaagtcattggtctctttgaggggatcatggagccttttgtcaaatcttgctgatgatatgctccataagtagttagttagactgtgagagagtatgggagtgagggactccaatggagtttcgaagggaggtaagtgctggtttgccgttgaatctaaggcattcgaaatctccgttgaagaggtcagaggaaagctgagaggaactatttgggaaaggagtaaaggtctttcctcttggataagatttggagaaaaaggtttaagtcttctgttgaaaggtgtggaagcttggtgcaaaggagaatctaactcgaagcttttaaaagtctgggatgaaggagcaagaaaattcagactagaatgccgctctaatgtggctgggagatttttactctgctctgtcagagatgtggaaaggaaaaagttctgtctagtttttcttgagggaaatggcttagtagggggttggttcttgctggctaagaaattgagggctcttggggtctcttccacagaagtgaggaatagctaccagtgtgagtcaaccatgggtaaggtggagagcaatgtcaatacctcagagaatgagtcaggttcgtatgcagaagtagttaaagggaagataggtgagtctgtggattctatgagggtgtacctaggggaaaaggaaatgatgtgcagggaggaacagcttaggcgttgcctagtgggctgtttcggtggtagtcctgagtctatcccgtcactgccttctttgaagagatgggcgtatgagagttggttactgaaaggggagttaagaatatccaggttgggtggggccctggtgctgtttgagtttcaaaacaaatgggaagctgatatggtgcttcttagagggagcagacgttgtaaggatagggactttctattgcaaaggtggggaccggtagtggggtgcacttggaaagagagccatgctaaggaagtttgggtgagagttgtaggacttcctcttcatctttggagtagggaggttttcaagcgtattggagattgttgtggggggtttgtagctgtggatgaggaaacgaccctcttctctcagttgcagtgggctcggattttggtcaaagattcgggaatgaaatggccagggtcgatgcaggtggaggctggtaactctaggtgggagctttgcctgtggtgggaagccacaccgagggtgatgcaggctgtgtcttgctcttggatgcagatgagaagtgagtgggaggttagggatgaaggtgggggagcctcacgcgttgaatctagagtacgggagccccaagctgattttcaaaaaaggggggctgaagtgaaggtggcgtgtggcagtgaaagtaggaaggctgacagagtagggggtaggctggctgataaccttgcagtggcagaggggattttttaaaaggcgctggtgggccgctttcaagtcaagatgcgggttgggccgagggcccgtcttccctttgccccaagttgtcgggctggactaaggggcttgaggagcctattgggctttttaagcctgaggcccatttggatcttttaagggagcctgtctcttctagggcttcccccgaggctgtcgggactcttgcggagctagagcaggagcttctggtcgtgggtagcgtcagtggcatggagccatccctcggtcatctgaagcctactgatgacgcgcttttggacgaagcttccaggtacccccgtcacctcaaactccctattttctctttggagtttggggcttcttctccttctactcctttcatggggccggatggtgttgtgttggggaaggtgggggttttcagtggattggttggggctgtggaagaagcaaggagcagggtctctccgtgtgaagagaggctggtagacatctcggtccatgaagataggaacttgtctccgcgagtgacgggtggtgaggcaagtgggcccgatctagccattgttccttttggaggggttttagaaagcccattagtggagacggtggcccttcaggtggaagtgggggaagaagaggaagaatggagctccagctgccttgcgaaattcagtcactgcttgggaatgccgacagttgggtttgaggaggaaatcctatacctgttgaggagaatgagggggagaattgaaaaaaaaaatcaggacagggagaataaaaagacaaagtcttcggttacaaaatccagtagggaattaaagaagctggaatggacggtaagttataaaagagctaagttggcttccaatgtaggcaagtttggaggggcttctgggttaggggttaaatgaagataaagattttatcatggaatgttagaggggcaaatgatagtgataagaggaaaatcattaagtccgtaataaaatccaacaaagtggatgtggtgtgcttacaggagactaaaatcaaggatatgagtacggggattgttcgcagccttggggccctttattctatgatggagtcggggggcctttctatgttccctagcgaaagaatttggagggcaagagtgcctcccaaggtagctttctttgcttgggaggcttcttggggtaaagttttaacacaggagcaacttcaaaggagggggttctctttggcaaacaggtgctttctctgtctatctgaagaagaaacagtggatcatctcctactgcattgtgtcaagatgcgggtcctatggaacctccttttctccctttttggtatatcttggactctctcgtgtacagtgaagacaacccttcttgggtggaatggagggtttgtgggaaaaagacgcaagaaggcttggcaaatggcgcctttatgtattttttggtcagtttggaaggagagaaataggttagcgtttggggatgaggatctttcgcttcaaaggttgaaatattcttttgtatgtaatctttggtcttgggtcaggggttccctagcagagagtcattcttctcttgtaagttttgtaaactggataggctcctagttagggaaggtggtgtgtatactccctgtatacttagagggcaccggtttttggtgtttcctcttttcgtttaatatacttcttttacttatcaaaaaaaaaaaaaattggcctctctgaggggcgggggggagggggagttgactctaagcaacattgaaattattttagaggagattgtgaatttctttgggaaactctattccaaatccaaaggtgcttctgttgaaggtttagattgggtccccatttctggagagagtacggcttggctagacagacccttttctgaagaagcggtacgcttggcagttttccaattgaataagggaaaagcccctgatccagatgggttcactattgcagcgtatcaagagtgctaggatgtgatcaaagaggatcttatgatggtctttctaggttccacactaatgggataataaatcaaagtataaatgctacctttattgctttggtgcccaagaaaagccaaacctttaaaatatagattttagacctattagcttagttacaagtttatataagataattgctaaggttttatcagggcgtttacacaaagtcctctatgaaacaatctttggctcttaaggagactttgttgaagggagacaaattttggatgctatgttgatggccaatgaaatggtgtatgagaaaaggaggttgagggaggaaggggcggtcttcaaaattgattttgagaaggcctatgatcatgtggattgaggcttttttgaccatgtgttagaaaggaggggatttagcccaaaatggagatcttggatgaggggttgtttatcttcaacaacttttgcaatcctagttaacggaaatgcaaaaggttggttaaggccactagaagtttgagacaaggaaaacttttttatttttatttatttatttatttgccttcgtagcagatgttctaagtaggatgatgattagagcagaggaaactaggttaattgagggcttcattgtgggaagggataggattagagtgtttttactacagtttgcagatgacactatttttttctctaaagtttctccagaacatagttttataaggcttaaaggacaccaaggcacaaagtagtcctggagcctgaggcgcaaggcgctaaggcgtgggctttagtgaagtgaggtacaccctaatttatatatattttcctctatttttctcctatttttcctctatttttcctcattttcttcgtcttcttcacttctccattgcacgactgaggctagggcaaaatttggaagacttgtcgggttgaaaacaatcagaaaagggacagactccaaaatggcattgttttggcctgttttttttaaaataaaaagggccaaaatgatgtcgttttgacctttttaaaataggtcaaaaacaacgtcattttgacccttttaaaaaggtaaaaaacgacgtcgttttggaccttgctattttaaaagaacagggaccaaacgacgttgttttggttccaaaaaagaaaaaaagaaattagggcttctctttgccctttacaacccgatgttggagaagaagagaaggagaagaaggagaagaaggaggtaggggatcgaggcgcacctgtggatcgcgttgtgtcttgccgaaaacgagcaccttgtgcgcctaagcggcgccttcgtgaaggggcgtcgcctgccttcaggcaaggcgccaaagggtggcgtcgcgccgcccgaagcctaggcgcgcctttcacaactatgttctagaacatcttcaaaacctcaagctaatccttttggattttgggcaagtatcgggattaaaaatcaatttagaaaaaagcaccatatcaggtattaatagaagccaggagttgttgtctattttggtttcgatccttgattgcagagtgtcatagtggcctttgtcttatttaggtcttccattgggagggaactcaaagacaatcggcttttgggatctggtggttgagagaatatcgaggaggttggatggattgaaaaaaaacatttttgtctttggggggaagattactttaattcagtcaagtttgtctcacatctcaagctactttctctccctcttcaaaatcctagtatcaatagcctcgaagattgataaactgcaaagggatttcctttggtctggggtggggaaagagaaaaaagatcatcttatcaggtgggatgttgtttgtaggccaaaggagttgggaggtttaggattcgggaagacttcgttgagaaataatgctctcttagcgaaatgactttggaggttccttagggaaaggagtggtctttcgcataaggttattatgagtatttatgggacacatccttatggatgggatgccaacatggtggttagatggtcacacatatgtccttggaagactattgctcaagttttccaagatttttccccatctatccgcttaatggtaggtaatggggagagaatatgtttttgggaagatccatggtggggtaaccaacctttgtgttctcaattccttggtctttatagagttatttttgtaaaaaacctcactgtcttagttgtctatggcaattcctatccactgttttggaatttgaattttcgtcataatctcactgatacgaaaattgaactccttcagaaactcacgtcctttcttagttcagtgcatttttctccttctatggcagattcaagagtttggtctttgtcctcatcagacttgttttctgttaaatttttttttcttggccttgtcaaatttctcaaaccctgtcttgttccttcctggccaagtttttgtggagatcaaaagccccttcaaaggttaagcccttgcttggttagtagtacatgggaatgtaaacaccaatgacaagttgcagttgagaagaccttacaaatccctttgtcctcggtattgcattctatgcaaaggaaatggagaatcgatcaaccacctttttcttcattgctctttaactattgggctttggcacaatggtttggggaattcaattagaggcaagacactttggcaaatcgtttgcctcactttgttgtggattgtgtggtaagagagaaatgctaggattttttagaataaggagagatcggaagggatgttatgggatttacttcactcctattcctctctattggcctcttgtactgctacttttagaggagttccttttagtgttttacaactcaactagactgcgggttgtgattcgaaagtttgacatagttggggtttatctttgtatatagttttctatagatgggtgtattctcttttgatcagtttttgtattttgtgggaatgacttctcatccttctcttgtatctttacttctattaatacatattttttcatttctgataaaaaaaaaggaaaaaaagaaaaaaagaaaaagaaaaatgagaaatgctacaaagtgagatcaaatttcgagcctgagtaacttgtttacctcaatgatttttttttttaattttttttttccgagtcaattgaccaagtattaaaacaattaatactcatggcaacaaaaaactcaagtacttatttgacataaaggctcttgggttccaagcacagttggtaaataggttagatagagacataacaaaattttaatttattctttttcttcaatttcttgtgttataataacagtgtatacctatttattatatgctaattttgtcaaaggacaacttgctatccacacttcttctttccttattttagcccacacttctttccttattttagcccacaattgtttccttatttctccatttattattctgtacagttagcatatattatttgagagattatagtttacatgtatagggctagaatcatgcgggaatttatttgcttttatttgctttccatgtatagcatccttgtaaagtctatatataatatacaaaactcaaggccaaggtattcggccattcatacaatattttgacatggtatcagagcttgtgttctgaacctagagtttacacgctttctagttttgctttgggttttctcggatttagccctaagggctcaaagattttagccctaggggctctcggatttagccctaggggctatcggatttagccctaggggctctcggatttagccttaggggctctcagatttagccttaggggctctcggatttagccctaggggctctaggactctagcccagtttttcggttctttttcttcttttttttctggtggttgtgacaacacatctgtggtgtgatcttggagttttctttaggtttcttcgcttctaggctcttggagatcttcgattatttggaggtttgttatcagatttaggctctttgacgatattttttttttttttttttttgtttcctaggctatttctgtcatcataatgtctggagaatattctattgttcgtttcaatggaaaaaaaactatcttagttgggagttttagtttaagatgtttgtgaaaagtaagaagcaagacagagtctctaagtcatctacggaatctgagtaccgggagatgtctcttgcttgttttgaaatcatttggcttcgaggtttgcttgtggagttagatttttctgagaccgatcctacacctctacatgccgataatacaagtgctattcagatcacgaccaatcctgcctatcatgagcgcacaaagcatattgaagtggactgtcactctatccgtgcaacctttgaagctcgtgttatcactcttccacatatttccactgacttacaagttgctgatatcttcaccaaggctctccctcgtcatcgacattgcttgctaagtagcaaattgatgcttgttgattaacctgcatcaatttgaggggggctgttaaaggacaacttgctatccacacttcttctttccttattttagcccacacttctttccttattttagcccacaattgtttccttatttctccatttattattctgtacagttagcatatattatttgagagattatagtttacatgtatagggctagaatcatgcgggaatttatttgcttttatttgctttctatgtatagcatccttgtaaagtctatatataatatacaaaactcaaggccaaggtattcggccattcatacaatattttgacaaatttgagttcagctactgaattactgttgttgaatataatgtatgtatagtatactatctttccttgttaatataggtcacatgtatggtagttaggactcctagccttgtatatatatatctctcaattgtaagtagagattacaatgaatgagaataaggtttttctcctctctctctctctcaacatggtatcagagccaaaggagaaaacctaattttttcggtttagccgtgtactcaattccggcgaaccgtccagtgaccgtgttttcactccggtcccctcactctctttccgaaccaccccggacaacctcatcgccgtcggatctccaccatgccggcaaccttttccggcgaaattttccggcgaccttttttccgggcaaagaccacatattccgaaccgccggaggctgatctacacgccagtggaaaccccaccggcaaccggcatctcacgcgcccccacgcgccggcgcctgacggcgcgtggctcactttccggccacttccgacacctctccaggctcgtccggcgccgtcttggccttctagccctccgacagtcctccccgagccctgcatctccatttttttccctgtttttggctttcttgccattccggccacctccgacagggctccccctccatccccgaggcttgggtgttgcttctcttcctctccaggcacgtcacgaccttttttctccattgattgcacctctcacagccgtggtttcactgtttttctctctccgccgaaatctgaacccatcttagggctctcttcgatccaaatacgtgaatatgaccaccaaaaatcagatctttacgtctgttctctctggatctcctctgattacctcagagatattggttggcagtgagaattatctctcctggtctgcctctgttgaactttggtttatgggtcaaggatatgaggatcacttggttacccaggaggcagatatccctgaggttgatcgcgtacagtggaggaagatagatgcacagttgtgtagtgtaatatggcaatcggttgatccccggattcttcttcatcttcaggcctatcaaacttgttttaaattttggactcaggccaaaggattatacacaaatgatatccagcgtctttataaggtggcttctgctattgtccatctcagccaacaggacttggatctatctacttatattggtcagattgcctctcttaaggagcagttcttgactgtgatgcctcttactcctgatgttggggctcaacaaacacagcttgacaagttcttcatggtctttactcttattggcctccgtccggatcttgagcctattcgtgatcagattcttggtagttcatcagttccgtccttggatgatgtgtttgctcgcctcctccgtatctcgtccactcagactttgccatctgatagcgcttcagatttttctgtgttagtttctcaaactacctctcgaggaggacgcagtggtacccgaggtagaggtagaggccaacgtcctcattgcacctattgcaataaacttggccacactcgtgatcgttgctatcagttacatggaagacctcctcgcactgcccatatggcccagtcctctgattctccgctgcctcagcttccgagctcctccgcatctcagacatctcaggcttctattgcctctattgcccagcctggtaatgcctctgcctgccttacccacacatcttctcttggaccctggattctagattctggagcatctgatcacctatctggtaataaggatcttttctcctctattactactacctctgatttacctactgttaccttagctaatggttctcaaactgtggctaaaggtattggtttggcccttcctctgccttctatacctctcacttctgtcctttatactcctgaatgtccttttaatcttatttccatcagcaaaatcactcgtactcttaattgctctattaccttttctgataaatttgtgaccttgcaggaccggagtacggggaagacgattggcataggacgtgagtctcaaggcctctatcacctcacctcagattcatctcctgcagtttgcatttccactgatgctcctctcctcattcacaatcgtctgggccaccctagtctctccaagttccagaagatggttcctcgtttttcaactttgtcgtcgcttccgtgtgagtcatgtcagcttgggaaacatactcgtgtctcgttcccaaagtgtttgaataatcgggcaaagtctccttttgagcttgtccacactgatgtttggggtccttgtcggactgcgtctactttaggatttcagtattttgtcactttcattgatgactattctcgatgtacttggttatttttaatgaaaaatcgagctgagttattctctattttccagaaattttatactgaaatccaaacccagttcaatatttctattcgtgtgttacgcagtgacaatgctagggaatatttttcagcccaatttacttcgtttatgtctcatcatgggattcttcatcagtcttcttgtgctcatactcctcaacaaaatggggtagctgaaagcaagaatcgacatcttgttgagacagctcgtactctcctcctccatagtcatgttccttttcgcttttggggggacgctgttcttactgcttgttatttgattaatcgtatgccctcctctgtcttacacgatcagattcctcactcccttcttttccctgaccaaccactttatttccttcctcctcgtgtctttggttgtacttgctttgttcatattctcactcctggacaggacaagctttccgccaaagccatgaagtgcctcttcttgggatattccagacttcagaagggttatcgttgttattcccttgagactcatcggtactttatctccgctgatgtcaccttctttgaggactcaccattcttttccaccacttctgagtctcttcctgtttctgaagtcttgcccattcccattgtctccccacctgatgttatgccccctcgaccacttcaggtttatcatcgtcgccctcgtgtcgttgctcctctcccttttcctgaggcacctgctgactcacttcctatcccttcggcttcacctgcctcggctctgccttctcctaatgacttacctattgctgttcggaaaggtactcgctctactcgtaatcctcatcctatttacaattttttgagttatcatcgattatcttcaccctattctgcttttgtttctgctatatcctttgtttctcttccaaagagcacccatgaagctctttcccatccaggctggcgacaggcaatggtggatgaaatggctgctctgcactctaatggcacttgggatcttgttgttttaccctctggtaaatctacagttggttgtcgttgggtctatgcagttaaggttggtcctgatggtcaggttgatcgccttaaggcccgtttagttgctaaaggctatactcaagtttatggttctgattatggtgacacattctcccctgttgccaagattgcttctgtccgcttgcttctctccatggctgctatgtgttcttggtctctttatcagttggatattaaaaatgccttccttcatggtgatcttgcctaggaagtttatatggagcaacctcctggttttgttgctcagggggagtctggtttagtgtgcaggttacgccgttctctatatggcttgaaacaatctcctcgagcatggtttagccgttttagttctgttgttcaagagtttggcatgcttcgcagtacagcagaccattcagttttttatcatcataactccttggggcagtgtatttatctggttgtttatgtggacgacatcgtcattacaggcagtgatcaggatggtattcagaaactaaagcaacatctttttacccactttcagaccaaagacttggggaaactcaagtatttcttgggaattgagatagctcaatccagttctggtgtggtcctttcccaaaggaagtatgctttagacatcctggaagaaaccggtatgttagactgtaaaccggtagacacacctatggatccgaatgtcaaacttgtaccaggacagggggagcctttaggagaccccgggagatatcgacggctcgtaggtaaattgaactatctcaccattactcgtccagacatttcttttcctgtgagtgttgttagtcaattcctacagtcaccatgtgatagccattgggatgccgtaatccgtatccttcaatatatcaaaagtacaccaggccaaggtgtattgtacgagaacagaggtcatactcaagttgttggttacacagatgcagattgggctggctcacccacagatagacgttccacttcagggtactgtgtttttattggaggtaatctaatatcttggaaaagtaagaaacaagatgtagtggccagatctagcgctgaagccgagtatcgagctatggctttggcaacatgtgaacacatatggttgagacatcttcttcaggagttgagatttggaaaggatgaacagatgaaactcatctgtgataaccaggccgcattacatattgcatccaatccagtctttcatgaaaggaccaagcatattgaagttgactgtcatttcattagagagaagatcgcatcaggatgtgttgctacaagttttgtcaattcaaatgatcaactagcagacatcttcactaaatctctcagaggtcctaggattaaatatatttgtaacaagcttggtgcatatgacgtatatgctccagcttgagggggagtgttgaatataatgtatgtatagtatactatctttccttgttaatataggtcacatgtatggtagttaggactcctagccttgtatatatatatctctcaattgtaagtagagattacaatgaatgagaataaggtttttctcctctctctctctctcaacaactgttatttcctgaattatgtcatgcttatggttttcagaatatggattatcattcaaagtgttacctgtaaaatgtgattattatttatatcactttctggttttcaaaaaattaataattttaatgtagtagaatagggttccattatgcactgattttccttgtttcttaatcaagtattctgatttttattagttggttgttattgcccatttaaaaaaaatgttggttgttagaactaattttcaaatatgaatttgtcctcttaagggttatgtagatcaaaactctgttgatgtttctcctgattttcttctatcttgttcacatgcatcttttattttcctatcttgttaagttttgtatatttgttttctgactgtccacttttattatcaatcagcaaaatgctgaatctagctgcaactttgtcttatgtgtgttatttttttctgtgtttataagcatgatgtgctacttaattttctttgcttttctggtggactgcagtgagttggccctggtcttttgttactttctttcatctacaaaatgatgactctcttttcaatgattaaaataccttgattttggtgcattatacctacattaacatttgtcatgttccaatacacatttaaatttgtagaaatacctacttgagcagcgagcagttgttg

SEQ ID NO: 13394 - DNA, 251 bp, Vitis vinifera
  Intron number 3 from transcript GSVIVT01019824001 (locus G SVIVG01019824001) derived from phytozome v7.0 (chr-ID chr2 ; pos 3653055 to 3653305 reverse strand)
agcttattaccaactggagtatttataccaacaaggtgactgctgctaatccttgatttacctttttttttccttttgtgtgtgtagttggggtgggggagatgtttttcactcaagttgttgctctaattattaatttgattttgaggcaggaagtttgaagaagattgtttagattcttggcatttaacctttcctcctttcttgcttttgtaggctgcagctctgttcacacttgtcgtgatcattgc

SEQ ID NO: 13395 - DNA, 4065 bp, Vitis vinifera
  Intron number 14 from transcript GSVIVT01008876001 (locus GSVIVG01008876001) derived from phytozome v7.0 (chr-ID chr 18; pos 2988416 to 2992480 reverse strand)
cttctgagcagtttgttttctcagaattgtgcaaggtgtactgatctcgaattttttttctaaatactgttggatatgattttatttatatgttttattaataatgcaacttaaattctatggaatcatttgatttcagacattttgactttttgcagtgattttatttatgtgcttagtgcaagtccagttatacataatctaattttctatggtgttgctttcctttgatgtctttctaataatggcatactgtatgatgagaaagaacattagtttagttaaggccaatttattgtgttataagctatgatactgagatcttctcccattacttcagtttcatgcaacatgaaactatgtttcatttttccctgcgatttcgtaacatatacttcttgtttttttttcctggtccatgtttagttttacttggtagtaagcttgtagaaaatagtattgcatgttgcaattgcttaaattaccacttaatttttgtcaagagcttgggggagcctcttgtacctagctttgtcatcttctgttctgtcaccttaacttgcatcaacatccacttccctgtttgcattttttgaagtattgttaatctctaaataatctctcttagattatttagccaaggtgcacggttatcagaattgagcatcaagggccattataagcccatgacacatttggagctcatttttatctttgataagtgagcaatgtgaaaggtagcatctgtttgccaaagaccatcctcttctttgaagttgatctaaagtcaaggtctttcaccagcaaacttcctaagcaaagaatgaagagatttgactgaaaagggattgatcgacttaactccagcatagaataaaaaatgtgaccaaaaagacagcattccttgaccttgtccacaccaccttgtccttctctccctttttcacaatttttgcttcaaacttagggggataaaatcctctataatttttgactcccaatcgtttaggtgtttggcaaaagatgaagtccaatgtcccctctcccttagcttttcccatatatctggcagtcggccatcatatatgccaatgttaagacatatagagtgggaaaagacacttgtaagggttcttctctgcaccatctatccttccaaaactttgtcctcctcccatcccccacctctaaagaagttttaattgttgaaaaggtcccacccttttcaaaaagaagttttaaagaagtccatatgcatgacctctaggccccttcctttctctccatacttttccttaataacccgctttcaaaaggccttttcttgaaagacatatctctaactccactttcaaagaagagttttttttttttttgataggcaaccaagaatatattaaagatgccaagcaaaaagagggaggtgcaccccaagtacatggtaggtatacaaaggatgccaaaaaaaaaacataaacacctcaaaagagcacacaaaactccctcacactaacacacaaccaataaataaaatctaacaaggaaccaagaccttcttgaatatgtcggtgagtccaatagaaaagggtatgaataagagagtcctttagtgctcgatttgagcgatgaattccatcaaagcatctttgattcctcccttgccactgaattcaaaacaagtaaaaaggggttgtcctctgaatcttttttctatttttgctaacaaaactcccatgccatcctttaccaaatatttcataggaatagggaggacccaagaaaagctaaagaaagaactaacaaatgctaaagactctttcctttctacaatggattagtaggtgattagctgattcttctgaatttatacataaataacaatggttagctaaccttcctcttctcttaagctaatctaaggttaggaacctttcccagaccatcttgcaagcaaaaatacccacttttaaaggcacccaagagccccacactagcttcaaggggaaagaaatagctccatttgactttaaggaagagtacaaagatttcaccaagaacttccacccttgctagtcttccaaatcaacttattgccatcctcactgtacttcccaagcacttagagcctcctatgtaactccttaatggtgtgtacccaatcttggagctgcctcgtgaatcccaggttccacacaactcggccgctaacaacctcccaagtactcatcacctaacctccctccctaaataaaattcctttgaattttcttaagcctcattttgactttttttaggaatgctgaataaagacataaagtagataggtaaattagataaggtatcgtgaataaaagtgagtctccgccctttcaaaataaaaaatatccattgcgaaggttctctgccctagtaagaataggtaggtggtggaggtcatatagggtccttttcaaactcaatcatacaatatcttgtcacgttgagtgggttcttgctatgtacaccaagccttggggtcacaatgactatccattagaattgtggcttgtcagagtgattgtagaccaacctttaacggatcaggtattgcgaatgaaagcaagtcttcccccttttgagatatactatcttttccacattgatagctttcgtcaaagcctttcctccaccctatctcacactgtttttgccctaaatggagctccgaaaggtagaccccagtagacaaaagatttcccaccttatgacacatttagagttcatgtctaatttggtgtggtcaattcctaatttgttgcagtcaattcctgagttggtgcaatcaattaggggataaaattagtagaatcaacagttcttatttaaagttttctgttactgattttaagtctattatttttatgtaaagttgtcctcttttttgtatgatggttccttgtaaactcaattctaagaatgtatgagaaatacaatatttttttctcaaaactgtgttgatgccataatgcacacttgtgggaactcaaaggtactttccatgtccactttaggcctggtgttgaaccttatggtcctcatgttcctcaagactatttttgcagtggatggccttgttgttataccttcgtttgcatcaaaagaggattttttgttgcctgacatttctttttcactgatcactttgtcgcttcgttatcccctagtttcacatgtggttaccttgacaagttcgttctttgattgaactgttattgtctctacgttcctcttgaactaggtaatgatgctagcttactctattaactgattttcctggttttgttcctttctgtacctccaaacccttttatgaaggtccattttttcaatcaaatgtgacattatttatatccttctgtatcatcccaccctccaaaagtccggccacgagctaaatgtaatttgaattggatggtttggtttcccaaggcatccttgtgagatgtgcaagtaggttaatgtctatttgtagctggttaaagatgaatgacatcatcatcctctatattctgttattcttttgtacccattagttggagttctatgtgcatgagggatgcatccttctaaagcaatttatctcttttgaagattaagtatttgaagatttggtaataaggaatttgtgcttgagatctagctcaagtggtaagaggttggggtggggatatgggaggtcctagtttgattccatgtaatagtcacgtacaccaaataaaacgaaaaacaaaaaacaaaaaacaaaaaccttaccattaaaagaaagtgatgaggacatttcagatagatattatacaaagtagtaaatatcttctgggctatcttactagtgacatccatgctatacccaagtcaggaaggtgggaaggtttcttgatccgatgtgtagttcatacatgtgtatccatccatgtttgttgatgcaactcattaataatggcactgttatgtacaaatgcctgttgaggtgataatctaacttacctacttatgttcatcttgtccaggcacttgtggattctctac

SEQ ID NO: 13396 - DNA, 2592 bp, Vitis vinifera
  Intron number 3 from transcript GSVIVT01011745001 (locus G SVIVG01011745001) derived from phytozome v7.0 (chr-ID chr1 ; pos 4642099 to 4644690 reverse strand)
cttgctgttggtggcgaggtagagactatccttgattttttttcgctgttcaatttaaattcattttggtaaataattataatactcaatatggttactaagaaaataggaatagaaaacaaattaaaattttgaatttagttctgcattttttaggacccatatgaacaaattcgctactcaatcgagctttaatatatcaatttgtcttagttgaagtaagttttcttttttgaaacaaaacgctataaaatatatatttgaaaattttcttcttctctttcctgcattttccgtagcaaataaaaacactgacaattaacccctatgcttgtttaggtccataatataaaagcacaataattatgtatgcatgttgtacccttctcagattttctatacatatatatatatatatatacattttttttgttttgagcaaagatttaaatttcggagaatttctgagaaatttggatcaaaatattggaaatctagcctgcctgaagcgaaaaacagcaggggaagtcggatggggcaagttttggcaattttgcaaaaaaaatcaatgaccacaaggctccagcagctgggagtgagtttcagtgatttattaccgattatttacccatttttcagtttcttttctttttttgaaaaatcatcgataattatccttgtattttaatttaatttttttaagttttaatttatagtgcttttattttacattatcttttttaaagagactttgaaaatgaacttttaaataaaatatccgatataaaatcttatttaaaaattttgaatgatttaattttttatttaaaatgtaataaaaaaatgtttcaataaaattaataattttattgtcagggtttgttttcaaataaatgaatataaatgaattgaaaggaatttaagataattttagtagaaagtaagataaatatagattgattaaaaatttaaataagttctaattaatttgaagttatttactttcaagacattatgttacaatatttttaagttagtttttttaatatggaaatatttcttgtctaaaatttaaattattttataaatataacgtgttttaaattttgaaatattatatgttttcctataatgcaattccataaaaataaattttttatctccacattagtatttgttattcactaaactcaaatttgttgctagaacaatgacactaattttttcaaactagtattattttgttaaaaactttgtttagtttttttaaacttcacattagtattaagtctatactttcaaaattcatatttctgattagtgcacattatattattgctcaatgtcacaaattttatcataaatggattgttttcttaaaaataacaacttcaatatgtgttttattgcttatttcatcatttcttaaagtttttccaatattttcatgagttttgatcaatttccgttctattggttttttttctttgaattcttattcaatatgtatgatatctctgaaaaagccaactatggatattccacaattttttatattttcatccttggttttgagttagccaatagtatcttggtccatggaaacagttcctggggaagaattttgtctagcaaggatttgagctggttatgtctgaaactatacttagttttaaataagtccacatgcagcatagagttttcctaccaatttctgtcggatacattcttgagggggagttttggtgggcatctgcagccatagatttgatcctctgttgattttctttgttgagtttgaaactttatccaaaaagcagcttttagtataaggttcattgcaggttagccatgttccatctcccaaaggtagacaatccttggtttgaaggtttgaaatttggtgcagatggatctttatttttcgctttatgcatttggtagttttgtgcatcagttgtgctgttttaggctttattttattttattttatttttattattattttttttctgtcaaaaaactttttctggaaagcattcagcattttcagttgttcactgcaataagaaaaatctgatagtttttcagagggaaaacaaaatggctatatgacggacgccactgccaccaggactcaccatcacagccatgatgactaatgccacactatcagcaattctactgcccatcaatacactgcctagctgccaccagtacatcccagctactacctccttatccattgccagaataccatcattgcccttgtctagggattaatttggattcttcatcaataggcaactttagggtttactttttctaatcgccagtgcattttaaagtcttaaccaaaggccagaagaaccataatcactaatttatttctaaatcaatttacttaaaaaaatctttctggtgtgaagttatactgaaacaaacagaaccttgtataatgaaattaaatactgttttattgctcagtagcatgttttttttaataggtcatgctcgatagcatgttatatgacactccaattttgttgcagtacaggacggcaatttaagggtgttcaagtggcctagcat

SEQ ID NO: 13397 - DNA, 6463 bp, Vitis vinifera
  Intron number 9 from transcript GSVIVT01023660001 (locus G SVIVG01023660001) derived from phytozome v7.0 (chr-ID chr1 1; pos 8676940 to 8683402)
cccatactgtcatctcccacctgccgattcatcaggtaagtgtttaattagatgcattggattggattggcagaattatattttctcatgtatgcatgctgaggatcttgtctggttttcttcaaggatggagttcttatttttcaggaaaaaatatcaaatgttatgaattaatgacaagtacagatgtgctttttccctttttatttttttttttgacaggcgaaggcacaaaaaaagtatattaataaaaacatggcgcccaacggctaacccaaagcatataggaagtttacaacagacgcctataggtgaaaacaaaagaaagagggatacaaaaaactgaccttccctcatctatagcccaaccactcaaaaaagttaagtaaagaattagggctttcagctatacacaacttagatcaataccacaaattacaaacaaaagaatatttcaacctttggatcgaaaaatcctcatttaaaaaacaatcctatttctttctttccaaactgtccaaaaaaggcacaaagaggctgctttccatacctttactcacttcttgcccacgaacacaccatgccacctaagaaggatctctttcactgacgatggaagaacccacatcacaccaaaaaggttaaataacaactcccataatgccctagccttggtgcaatgaattagaagatgatcaacagtttcttcagcaataccacaaaggtaacatctatttggaagagaccagcccctcttttttagctggtccaacattagagctttacctcaagtggcttcccaagcaaaaaaattgaccttagtaggaacacaagggctccaaatgatgctttttgggaacgggattgtgctgctgccctccatagctctataaaaggatttcacagaaaaattaccatccttagccttcttccaccgcatcttatcctccaaattgataacccctcttcccttgcaatgagaatatgaatctctccaccatctccatctcccaatcgttaaaacacctagaaaagcgtggattccagcccccgtcctcccctgtagcatcccaaacctccgccacccacgcctctttagaagtcaccaaagcatacaaagaagggaaagaatgacttagagcctcatcaccacaccacctatcctcccaaaatctcactcttcttccatcccctatagaaaatacaaaattgtttttcataaaggccattcctttctaatttccttccaaagccccacaccataccccttccttacttctcgcaccccccttcttctacctcatacttcctgctaataacttgattccaaagggtctccttttcttccacaaagcgccaactccatttacctaagagggctttattgagtttagagaggcatctaacaaccaagccacccttttttttatctgaacaaacaatggaccacttctcaagataaggcttcttctccaacccccaccccaagagaaaatccctttgaattttctctaacctcaatcttactacttgtggcaactgtagcatagacatatagaatatgggtccaagtcaataacttaaacattatctagattccattattagggtgtatattgactccattgatagccttatcacatttgaaaagttgtatttggtgtaagcaattattgcgtttttggctgtttggaaaaaatatctgaggttccctctgacaaaaatcattcatatggttgctttgtgcatcatattatctggattgatacaccttggatttttaaggacttggagtagactaaggcctcaacctatgcttaaggacacacttagtggatattgaaagaaaggatccatgattggtggagggacctaaattccattgcgatattcaatatattaggatatatttttagaaattttttatgattgaagaaatccacaagagttccagaagaggatgcaatgcaattgcacatgggtatacaagaaaagaaagtaaagtaagaaaatctgaaatagaatggtgaaaaacctatcttacaggcttcattatatcaacaaaaacaattggagctccctaccagacaacctaaaactctacatctattgtaaccatgtcatggttcagtgctgctttgggttcgacagtaagcaatatgttcttgagttggcatgggagttttgttgtgagaggagggaggggtaggagaggtggggtgtgggggagcacccctccaaatcaacctactcttacaattcttaatcaccaccatctcttggatttgcttaaggaaagattctacacttttcatgaaaatgcctcaaaaagaaaatatttcaatgcccatagccaccaaacttaaaaacaagaagaacaagctatgcatctttatggcaaaaaatggagaagtgattgggaaaagaggcaccaaacatgaaatcacaaaatcaggcttctttccaaaactttagtctcttgtcattactcattgctaggaaggttccttaataaaatccattgtgggctctccttattgctttccacaacctcactcaaaattccccccttccctccttagtacatcaaccatccatccttttctcaaattttacctaggatagcacatctccacaaatctatcttggttgattgtaaatctccaaccctttttccaagtagggcgttgttgagcaagacaaatttttaagacctagctctctcttcttttatcaaagcaaacaaattacagtttggtaaataaggtttcttttaaagcgcactaaccacctgcaaaaagtcatgctgaatcttttgaagccttagatacaccattctagggataacaaaaagggacatgtaataaataggtaagttagatactgtacaatttagaagagttaatctttcaaccttagacaattagtgccactgtgaagaagaaagtctgtcatggattctcctattcattgcatcctacacaactgatgaactgaacaaagcatagaaagggagatttaagtatatggaaggtagctttcccacttctatgtatactacttttccactgaggcactgtttttggcatctcctcttttctatatatactaagaacttctccaaattgatattccatcccaacattgatgcaaaccaaagaaaactctatctcaaaaacatcaattattgaaaagtagcactgaaaaagagaaggttactactaggaaaaagtgaatgagaaatctctacattccctccacctcaatctcatcataaatcctcaagggatatctattaaaagggatggaatattctttaaatcagataaatgtctctcacattttgaaaatagagaaaatagtcattttcagacaaaaataccctccattaaatttttaatacctatttcacatcaaagcacttttatgagaagaaaaagggagtgtttttatgtatttgagtttttttttttttttctttttgataggtaatattaattatattaagcggcaactaaaagggcatataaaagcatgcatgatgtatacaagtagacaaaggccaaaaaaagcagaggggaacacaaaaaaaaactccgtcaccttatttacagctcaaccaaacaataaaatcaaacaatgacaaggaactatctcctatgtgcacccctaacccattctagaaacatatacataaaagatttttaattgtttgatccaacttttcgcttcaaaagctctcctacttctctccttctataaggtccaaaataaacacaaaagagctactctccacgctttcttcctctttttccccacaaaggagttgcgctagctaagaaggacatcattgattgaggagagtatcacccattaaacactaaacaaagcaaaaattagccgccatagtatggttgctttggaacaatgaagaaagataagatccaccattttttcctcacctttacataaatgaaacctacttgccaatctctaactccttttttgctgattcagagttagtattttttttcccataaatatttcgaaacaaaaaagttaaccttcatcaaaattgaaagattatgtacaattcaagatggaaatgcctccattccacaatttgttgaggagtaaaaggatttaactgtaaatttgctgcactttgatgcttaccaaatcatgatgtccttgtcatcctttctaattgtgtacccttgaaaactcctaaaaaaaccttttacctctcttagctcctagtcattattttgtcttgtgaacaaaggattccaatagccaccttccctagtctgctcccataaatggcctacctaggtatctttagcaaagactatagagacaacttgggaaaagccttttctggggagttatcaccagaccacttatccttccaaaatttcaccctcttaccatttcccattgttttattaaactcctctcacccacgatatccttcccttgatgctctagaacaccaatccccttcttcctccctatactttcctaaatcacttgtttcgagaggtctcattatcaattgcaaatctctaacaccattttccaaagaggaccttgtttagagttgacaaatttttgatatgcaagctcaatcctttgttttttttttcaatgtagactgccaattagtttactagatgaacctttctctgaacctctccttccacccccctccccagaaagaaatccttttgaatcttttccaattttaaattcattttttgaggaatgacaaataaagacaagaagtaaatgagtgagcttgaaaggatgctctttatcaaagtcaatctctctcctttagataagcactgtatcttccatatagtgaggcatttttgaaatctttcctccatcacatcttaaactcacaatgatttgaatggggctcctaatgggagtcctaaataggtggtttgtagagaacccgctctatagctcgacaccctttctaaatccccagaatcaacatcctcctcaattggaattaactcacttttctccaaatttatttttaaactcaagatcgtctcaacacacatgacagtcctactcaagcgcacaatatgcttcttgatggaatcgtatagtcatcaacatgtaaaagatgagacacttctgtaagttctccttctctttcgttggtcaagaatccctcaataaagccccattccttaggcctcttcagaatgcaagataacaccttcattgccataatgaagagataaggggaaaagggtcatcttgtctcaagcctctagaactttggaagaaacctattgggatcctattaataagaaaattgaaaagcgagccaaagggatgtaccacttaaagcatttataaatttttttaaaatagaggttcttgttccgaagtgaggattattttggcctttttgcctaaatatttcaaacctaaaattcatagatctcccttacctaccaacaaaacagcttagagcactctcaccaacaatgtcttgttatttcaatagccatttgtttgaaacagaatatatttgatcaatactgataaatcttgaatggattactataataaatatatatgtgtgtgtgtgcccccaatttggccaatggattcaaaatctttcatgctttccagtcctcccctcatggggactaataccaaaacagtaagatacctgtgtctgtgtttgttgggggggtgggtgggcagtggggggcgatttggccaatggattcaaaatctttcatgctttccagtccccccttcttggggactaataccaaaatggtaagatgtgacttctcttagaagtacctatactctatcccaaaatggcatgaaacttccctcttgatatagtataccaatgattcttccaaaatgacataggaaaaccatcagactgtggcccaaccaagaaagggcagcagaagtttcctgttttggaaaaggctccttgaaagccacaaagtcaatccctacactcggcctccaaaatcttaaaaacaacttattcaaagacttgaaaacaactccctctggtaggcctccaattcccagagttcgaaaaacaatctaggtatgatccctttccttgatctcataatcctcaatattctagacattattcaagctcaactttctcataatcctcagtattctagacattgttcaggctcaactttcaatggggttcctcatttcttcactagttttttctcccaaaacatttgtaccctttcaccatcgggtctgcaatcacacaggagattgctctgtcattgctgtccctttcaatctctctctctctctctctctctctctctctcttattgctctgcttagttatagatctctttacttgtttatacatgaatttgtgtcccttttccatctttgtttatttctaatgttgagtttgtgctgttttagg

SEQ ID NO: 13398 - DNA, 9559 bp, Vitis vinifera
  Intron number 2 from transcript GSVIVT01029735001 (locus G SVIVG01029735001) derived from phytozome v7.0 (chr-ID chr1 2; pos 13904794 to 13914352 reverse strand)
ggagaacaaacgttccgtacagagacttctgatcagttacgcatctgttaaacttttaattcatatttttttgggaccatttgcacttctattgttattagtagttattgttatttaaacaactagcgaaaaaaataaaatagaaaaaggcacttaattagatattatttatattatggtcagtaaaggaaacttgacaattttttttttataattaattacatatcgttttgtttttttatcaagtgagtggaatttgaatttattccttaggagagagcaatatccaaatctattttccaaattctcatctgttttaacattcaaatgcattttccaaattcatatatttttttgacttatttaaatttcaaaataatccaatgcaggaagatttgaatatttgctctataacggaattttttcactatatagatagtttttttaattgtttttcttcattgataagaagattactatgaaagtgtcaagcaaaaagatttcagaagtcaaccacttcaagaattattctgaatcttgcattaatataaaaaagttttgtgcaaacgtcgaggcatgcttggctaatattttgctgtctgcgaaggattgaaagaaaataagcataaagaagtacttccaaatatctaaaatccagaaagagaaattttgctgttactgtaccttcagcagtgcaagctactgtagctgcaatacttataataacttgctctaagtgctgtggttactcacaatgctaatgctacagtaaatctgagtttcaatcaactagcatgtatgagcatgtctaagaaactagcaaacttccaagctgggtccccgtcttgacacaaccatatatgaatttggctcagtcattgtattgtgattgcaaattgcttgtagtaagttaatgcagtgttcttgaaaaattgaagctgatattaagttgtaaaagggcctggttttcaatcacctgatccatgatgtaaaatatgaaagcatgacaatattacaaagaagtgcaaaaatattgaaccacctggaattttaagctggctctttgtttagtctcatgttttgcccgttgacatgttttaattgtacattccaaaactctgtacctgtgattctgttgtttgattatttatgttaatgtccaagtgcaaatgatgtgaaaggatcctgcctaaattcagctatgttgatttgatgggatgtcacgtcttgctatttatttggtaaaactaaagccagttttttattgatcacccctgaactatcatgagaatcattgtgcgcaatgagtgaaatcttgggctaaaattttgaagaaatatgagaaggaaaaaatgattctatttttcatttcttgaatagagaagaaaatacactgctataaataatggagtggctgaaaataccatcccattattcacgtgatacatctactaacttacctagaaagattctctaattttaggaaacaaaataactatgagatcgggtaacatgctaccaaaatctccttattatagaaaatgccaaacacaatcaattaatttacaattgtaaaactccaagaaattagaccaataactgaaagatttccacactccccctcaaattgggttgtaggtgtgatcaaacctagcttggtatccaaatcttcaaagttgatccttggtagagctttggtgaggatatttgctatttgaaggcatgttggtgtgtatactagctgaatttatcccttcctctattttttcctttatgaagtgatgatctatctccataggttttgtcgtgtcaggatgaactaggttcttagcaatgcttatggctgactgcttgtcacagaacatcttcataggtttctcaattgagattctcaattctcttagtgtccttgtcagccatattccttcaaacatgccttgtgccatggctctaaacttgtattttgcactacttcttgacacaataaattgtttcttgctttgccatgtaacgagatttccctacacataggtacaatattcagatgttaatctatggtcagttattgatctggcgcaatcaacattagtggagatttcaatatctttgcttcacgtcttcttgaagtataggcccttcattggtgtcatctttaggcatcttaggatttgatgcatagcctccatgtgttctttggttggattgttcatgaactgagttacctcattgatagagaaaccaatattaggtctagtgtgagaaggatatatgagttttcctactggttttgtctactcatgcactgtcttctttagctcctagtttagttgttgaatccattagagtatcaataggattgcactcgtgcatccctgtttcctttagtaagtctggaacatattttcgttgagaaacaaaaataccctttcttgattgagcaacttccataccaaggaagtatttgagattgaccaagtctttgatttcaaactctttggctagaaagtccttacgtttgcttatttcctcctcatagtcccttgttagaatgatgtcatctatatacatgatgaggatggttatttttcctttaggtgagtgtttgacaactaaggtgtgatttgtctaacactaaaaatacccatacctcttcactgcctttgtaaacctgtcaaactaacctcttagggatgcttgagaccatataatgactttttgagcttacacactttgttgatagttgtttatgtctcaaagctaggaggaatttccatgtagacatcttcttctagaacttcattgaggaaaacattcttgacatctagttgataagaggccaatttaaaattgttgcgaatgataatagtacccaaattgtgctgagtttagctactagggcaaatatctcctggtagtcaattccataggattgagtgaactctttagcaacaagctaagccttgaacctgtccacacttccatctgccttgtgtttaactatgaagatacgtttacatcccactggatgttttttggttggtaaatttgaaatttcctaaattccatttttctttagtgcaggaatctctttccaatggtaacttttcattttggtaacattagagcttcttggatagtgttgggaatctgtattttgtcaagattggtgacaaagacatgaaaactaggtgataacccttcataagagacaaaattatagattgggtgacttgtataggatctcacacctttcctcaaggcaatcgggtgattaagatcatcattagaaatttcaatactggcagatgtacaactagtgttacctggtgaaatttcaattaatcttgaatttggatcaaactcttggatttgcttgggaagtgtttgttgctctatactctcttcaatcttttttctccttgaatagacaataagctcactattttttgcaagttgagtggactttggatggtgtgaaggacttgaggactaggatcaatatatgaatttgaaggactacaagacaagtttggagcattggtttcaacatcctaaagtttgtattcctatgtgtaattctcctcttgaatatcggatttgggatgctaaggttgttaaaaaattgtgacattcatggagttataatctttttgtgatcagtgaaatagcacttgtatgccactatgccttttgatttgaagagtacccaatgaatatgcacttgattgcattgagataagttttctccaattttgttaatgtatgtttttatttttttatgagaaacaacaatatagtatattgaagtgagtaaaataagtacaaagaaggatgagagatcctccaaaaagtacacaaacaaaaagcaagaatctccaagtttaagaatctatacaactatgatgttccacaacctaagtcccatttgggaacatacaaaaataatctatccttgctagcccactcccttggagttacacaccaacatccaatcaagttgaatcaaattaaggggaacacccttaaaagttgtggagcaagatgcctaaaaggaggttacgaaaaagatcatgtcccaaagaccctttgaggatctcgccttatcctcaaagatcctgacatttcccacaccacccacattagagcaagataagcaagcttccacaacaccttgcctctattgttgtttcccaatcctctatatgaaatactcatcatgtcgcatatactcctgggaggaaccaatccatatgaaccaagttgaatagtttgtgccatagtcccaaactcaataggcaatgtaaaaagatgtgatctgccattttacaactctccatacacaacagacaaatattaggactaagggctttgtaagatcttttgagttgtagcatgtcattggtgtttacttccttaagtaccactaatcaagcaaaagatttgaccttaaatggggcttgtgatttccatataaaatcaatagggaatgatggagttggatcaatatgattggttaagacccaaaataacaactttactgtgaataaacatggagaaaatagggactaaactcttgaatcatgaccaataggagataagtgcaagtgtgagaaagatgacatgagtttttcaagatcttctatcttaagatttgaaagattgttgcaaaagtttagattccaagagaaaggatgagtgtacccaggaactgatgagatagtgaggtttttaatagtgacaattttgaatagacttgagaattgagagcacaaagattgatccctccaccacaaatcttccctaaaccaaattcttgtcctatctcccactactggctgagtgtatcttgaaaaatctagaaagacctgtgcaatgactttccaaggacagcgatgtgactacctaactatagtgttggcattccacccgttagtatgtgcccaatgccttataaatgcttagaataaactgatgctaaagagcgtacttttcctcagtaaacctctaaaaccatttccctaataaagcacgattccttacagagatcttctcgaaccctaatcccccttcccccttagttttacacactaagtcccaattgacaagacggtctctcttttgctctttaagccaaggccataaaaaatccctttacaatttctcaattttcaatgccattgaagaagagatcttgaatatggacataaagtagttagggatatgaaataagcacaagtggataagagttatcctcccacctaaagacaaatagacttttctccacccatccaatcttcaggaaactctctcaatcattgggtcccaaaatgcacttgcctttgggttccctcccaatggaagtcccaagtatggaataggctaatccaacaccatgcaatcaaggaccaaatgcagagcacccaaacactctaatgggaatggtggaaatgattcaagttctaggatataaattgagaagaacttggcaaggtgtttggaagataagttgttgtaagaactacatctccccaaaaatgttttggaacatgtgtcgagaacattttttttttttgatgggaaatgacacagagatatattgatagataaaaagaagtacaaaaagaaggatgagaaatcctcccgccaaagaaaactaaactacaggaaattacattgtaaaacaagcgaactctctataaaggaccattcctcatggagtacacaccgctaaccaatcaagttgtaacacattaaggggagttcccttaaaaaccttggaacagaaagcccaaagagaagttaggaaaacaatagagtcctaaagatactctgaattccttgctttatcctaaaaaatccttgcgtttctttccctccacacaatccgaattagagcgatgctcgcagcttgccacaaaactatccctctcttagaagaaccaaaaccattaaatttgatggacatcatgtcaaagatgctcctcggggggacccaatccatcttagctaactgaaattcgggtgcatgggagaggagtcctcttcgcttttagtctttttggagtggctaatggctacttaagagccggtgaggctgcttgtttcttttgtttttgggtttagctgcgttgtatactccctgtatgctttgtggcttcttgccctttaatataatttgtgctcacttataaaaaaaaaaaaaaaaataaccggtgccacaacccaatcgtcaaggaacaatgaagaaaaagatgatctgctgattcctcatgcttcatgcacaaaatgcaaatatcaagactaagggctttgtagggtcttttcacttgtagcatgtcattagtattcaccttcttgtgtgccactaaccagacaaaggacttcactttgaaaggaatttgagaattccaaacgaacttagaagggaaaacttgaggagatccagaaaattgagataatgctagaaagaaggagttgattgaaaaaagccctgaagaagataatggccaaaatctggcatctggaaccgaaggagatagatgcaatccatcaagtgaccgcatgaggccttctaagtcctctatcttagaatttgacattagtaacctagcaacttctagaagatgtattttttttttaacaaccccattttgttgaggagtatcaacataagaactttgatatactatgccttaacttgagagataatcaccaaggattgatttgaagtgctcttttgcattgttagttcttaacacttgtattttggcttggaattaagtttgaatcatactattgaaatttttgaaagtttaccaacttttgattttttttttcatgagaaatagccatgtaattctagtgtgatcaataacaaaagatataagccattgagttttagtgatattttttatttgagaaggtccccatgcatcactatgtatggttgcttgggataggaattacacacatgtttggaaaattgacaaatttcacattgaaaaaattttggacttttattattgaataatgaagcaaaaagtttctcaaggtgtaagaaatttggatgacctaacctataatgctacaacatgactacactatcagtattagaattagcaattgaaaaagaacttttatgaaataaactttttgacgcaacacaagctaccttgtgagcttgtctttcaagcgaatcatcaactttgaggatattaagccctgaacacatcttagcactgccaatagtcttccctgaatccaagttctgaaattcaaaagagtttgagaagaatttagtaacacaattgagttctcgagtgagtttactaatagatagtagattaaaatttggaattaagagaacaaaatccaaggtcagattatttgaaataatgatagagcctgcattggccacctttgagagagatccatctgctatcatgatagtaaaattttgatggcctgagctatacttatggaaaatattagcatttctagtcatgtggtctgatgctcctaagtccacaatccatggactcatcttctctcttttaacatttaaagcatttaaaaaattacctttctatgccaaggacctggtccagtcatagaggtgagaggagcttgttgtgactaaccgaacattttctgcaaaagttctagttgttccttgctaaaaagactaagtccggatggtgtggggttctcatcaattgagattagattgccatgactttgtctgttgttagtaggatgtgtaggcttccaatctgctagtttatcatgagtcttccaccatgtttctttggtgtgtccaagtctgcaatggtgatcactccagggttttatcgattgtcattgctatggtgttgaatcccttgagcagcaagggtagaattttctatggtaggtgtggcattttgtgaacctattatcttttttcgattctcttctttgcagacttctgaggaagcttctcaaatattgggtaaaggcttcgatcccaacactctccctcgaacttcatcaggatacatattgagcctcgtaaaacactttaatattcttctcttttttatgatctccttgtacctgattccatcatctggggagtcccaatcatgttctttgagcatgcccaactgttgctagtgacatatgagtgtgtagaagtagagtgacggacatgtctccttgatgtagctcatggagaatactttcaatttcaagcaattctgatgtattttcattgttggagcatgtctcattagttgcatcccatatttcctttgttgttccttagagctgaaagttttctcctatatcattgatcatggagttgataagccaggatatgagcatgttattctctgatttccatgatttaaattttagatctttcttcttgggaggaactacagcctcggtaagatgatcatttttcccttttccatagatgaacatcatgacggattgtgatcactggagatagttgtgcccattcagtttgtgtcctgtaatgggaagaatattgccatatgatctttcattgttgtttgagatgatagcttcatgattggaggtgacttcagaggtggagctttgcctttcaatggccattccatattttgtcattcaagaaactaagtttttagaggaggctcttgtaccatgaagaaatatgagaaggaaaagatggtcctatttttcattccttgaatagagaagaagatacattgttataaatagtggagtggctgaaaataacatcccattattcacaggatactaacttacctaaaaagattccctaattttaggaaacaaaatagctatgagattgggtaacatgctaccagaatctccttattataggaaataccaaacatggtaaattaatttatagctgtaaaactccgagaaatcagacatatagctgaaagatttctgcaaatttcaaattatggtgtgctatattctgcaaaaaagtgagtgatggcttaagaaaacagagtaatttatatgtaaagaagaagaataacactaattgaggacaaaagtgagaaagatgtttattatatatttagaatattgttcccatggataacaacatttgtttttaggtgagtaccagtattatgctcttggatttcattgatggattgggtagtggctaggggtttcagtcttttgtcttctttctttctcttttacccttgagcattccatgtatacatcttgtatactttggttgcggcaatttttattcggtgcttctctaatttaattttttgtttgcttataagaaaaaaaatggaggaaaaaaaatgaaaaaagaagaaaaatacatagcatctgttatttccaacttggtagacttggcacaaatatttaatcaacacatgctcaagatatgcttccctgtaaggatgaaattactttatggaaatgactttgaattctgttctaagttcaattcgtacttcttccatttgttgattttggtttgattggttatgcaggacagacaaacctgtttggaactctgtgagtacac

SEQ ID NO: 13399 - DNA, 1730 bp, Vitis vinifera
  Intron number 11 from transcript GSVIVT01022187001 (locus GSVIVG01022187001) derived from phytozome v7.0 (chr-ID chr 7; pos 17277355 to 17279084 reverse strand)
cctcaagtgaaacagtaagagctatcactggtaagttatctcgctcacttgtacaacattttccaacttttggtttatttgaggagcatatatctgctgggattgtaaatccacttgcatatgtgcctcttggttcgtgatagattcttttcccatgtctgtcttttgattgcagtgtagagtttgcaatttcttgattagttcactaaaatcattttaataaaatcttttgatttttattggttacttgagcattgttttgacagtccataatattctcagccataccttttgttaatgcatgcacgttcaaatcattcctcattatcttgtctgctgcccttttcttccctcatttttatttttttgttttcttttctctcttctttttgaggctttctatgtagtgctattaactcctaacttgtgctgttgttcacttcatttcacgcgtgacttgatcggctagatttgtttatttaattattctgtggattttctatatggtgtttaattttacatagtttttccacgcttagctgggaaaactatgtttggcactcaaggtgtcaatttacaggtcttgtgcaatcttagcaaaaattatgtttaggatttattaaatgtgctgaaagagtgcataacgttctttttcgtttgagaaagtattaaacaagatcacttccttcattgtgtgacttcatttatttgtttatttttagtagtatttcttcatcatgtaacttaatacactttgatatatgaataccaaatggcacttgtcatattgtttatagggttacttgtatttttgactcaactattaaagacaattctttctggttcttccatgcctagaaatgtaaatgagtaccacattccattacaaacacaaatgactaatagctctttccatgtgcctagataacattatggagtaacgggcttcagagaaaagatgaattttgctatctgtttcagtattcttgtagattactgttcctagtgaggatcttgttatttctgttttcatatgttaggattgataaaatgagttaaaagcattgtgaggaaaaaataaaattcggtttaagggtcatgacgattcaaatcagcttaagatggaagtatggggtcatggaaatgttatttgattaatactgatctttaagtagcaaggaatcaacacttcaaaaagtgaaatcaaattctttgagatagcattcttgaactggaaatgctccttccctcctgtatgaaaggtgataggagtatttataatttcattgtatgtatagaagcggctttgaggaaaaaatcatttcctgtgggaaatgaaatgatttctaatgaacacttgactgctctctttcaatcttcaaaaactagatctttttctttttgttttatgcatgaattggcatggcctggttgtctggaaggaaaatgaatagaaacaaaaatgttcccttaccatcttcgtcttgtatttgagaaagggtttgctgtattttatctttttcaattacctaaaagcgtatgttcaagttaagtgattcagaaccttaataagattggctgtttacatgttcatgatgctgtttaatatctgaaacaaacacttttatcagtatcagttgtcactttgatggctggaccctgcatgcaaatacttatttgtgttgaataattttttcctgtgttcttgcagctgctatcgaaaaggattt

SEQ ID NO: 13400 - DNA, 2119 bp, Vitis vinifera
  Intron number 3 from transcript GSVIVT01024730001 (locus G SVIVG01024730001) derived from phytozome v7.0 (chr-ID chr6 ; pos 7391071 to 7393189 reverse strand)
atcagaagtctctctacaagtccaatttcaagtaatttcttttatctttactaattctactgaaaccatgttttgcaattgacttttggaaattgttttgcaagtaggtttatgttccccctttctggaagattactagatttgcattgctgaatttggttcttctaagaatatggatatgcggtagtggtcactttgttcttactctttaacaccattttgggctgaatggtgatagtcttttagttgatttaatatctctatagtcggtaagaatcgaattttagaagatcttctattagtagtttcttcttgtatgatcattgtctccatcaagagttcatggtttgggtgtgcttttttaggttttaggagttatttcagtgttgacttaccattattttgccttaagattcacagtcaaaaatattttatgatatcaaagagagtaatctcttatacagaaagaaataaattggttttgagagaaatttaattgtttgagatatttagcattgagtcaactcaagccctatccagttgtttgtgatcagctgcattggtatgtaatcactctgtcacatctaagacttttcttttttcaaaaaaataataataaaataaatcatgggttaacgcttcttcatttcttgtaggtgtacttcttgcagcatttaacaccttagactaacacacacacatatatataaatatataaatatatatatatttatatatttattttttctgtcatattcatgattgtatgcctacacatgtccccatttgtaactttagagaaaaaatatttgttcttgttatacttttatgctctctctttataaagattacattgttgtcttccattcttttgtttctaatgaattcactatagcctaagcctcctcatttgttcttcattcatgtatattacttggtctactttcatcgcatctcttacttagccactttacatactttgcatttgtgttggatgtatcatattatcttatattttggagttagagaaacaaaagggggactagaaatagatccacacaaatttagattttttaagaaaacgatttttaggttaaaaatttagaatatgattaccaagtaccactgaggaagaaatcatagtagattcaaaaggatatttacatgctctcttttgattttataatgcatgttgatattattacaaaagtatactctttaaagcaaaaaaaaaaaaaaaaatcatgtagagaagataaaatgatcaccagaggaataattgtttgtttcttttctttcttttcttttttggtacttggtatttagtacaaggcaagaaaataattgtctagaaaagagcattttaactttcagattttcttagagttcgttgttgagataagaactccatatatttgccgaactcttcctcaaggcatagcaggagagaattgcatttaggggttttccaactaattagaaatttgattcgtgtcccatctatgttggtagaattcttatcccagataaccaaatctagattctcatgattgttacatgcatgggtttgcctctttctgtcgatcacccagaggaataaccatctgtttttttttttttttttccctctccttttttttttttggtacttggtatttagtacaagggaagaaaataattgtgtggaaaagggcattttaactttcagatatattcttagaattcattgttgatataataactccatatatgggcctaactctttctcaaggcataggaggagaggattgcatttaggggttttccaactaattagaaatttgattagtgtcccatctatgttggtagaattcttatcccagataaccaaatctagattctgatgattgttacatgcatgggtttgcctctttctattgatctggtgattctggtgcaatggcactaacttgtagttttactattccagatattactaaccacaagttcaaaaggggaatccttctccagtggtttattttattctacaatgcttctcagttggtaattgttttctagtgtttcttgttgttaccacctaagaactctatttttcatgtcttgaatctttaaacagata

SEQ ID NO: 13401 - DNA, 6654 bp, Vitis vinifera
  Intron number 12 from transcript GSVIVT01013493001 (locus GSVIVG01013493001) derived from phytozome v7.0 (chr-ID chr 13_random; pos 1800262 to 1806915)
ggacctctgttactaccacataccctaaaaaaaaaaatctcataattttagcttcaccatatatgtcacatcgtgagcttttcgagtcaaaccaaaaaaaatatccatcttgacatggattccaatgtaagaaatgaaaaaacaaactttaatcttcaacaaaaaaatcttcaccttttctgcaaacccctcaggacaactcaacaacaaatagtgactaagtccaagtaatgcttaaacttggctggagggagtgacttggtcaccatatcagcaggattatcatgggtgctaactttgcccacaacaatatcaccacgagcaatgatatcacacacaaaatgatactacacatcaatgtgttttgtcctatcatgaaacatttgatcttttgtgaggaaaataacactttgactatcacaaaaaactatggtaatctgcaaatttttttgagttcaccaagtagtcccttcaatcaaatagctttcttacaagcctctataatagccatgtactcagcttcagtagtaggcaattgtagtttgtaagtaactttccaactgatagcacaaccaccaacaataaacacgtaccctgtaagagaccttcttttatcaaggtcactagaaaatttagaatcgacatacccaatgactccatatctagttctcttaaaatgcaaaaaaacatcaatagagccacacaagtatttgaaaatccattgaacttctttccaatgtttttaaccaagatttgccatgtatctactgactgtactgactgaattgactgcatatgataaatttggatgtgaacaaaccataacatacatgagggaccccactaaactataatatgaaactcatgacatataatcaacatcatcatctgattatggagataaagcagctgaaagtttgaaatgagttattaaaggagtactaacaagtttggcattttgcatatttaacctataaagaactttctcaatgtaccatttctaacttagatataatttacctacctttctatatcctagaatctcctttccaagttttttttttgttttgtcgctcctaagtctttcatctcaaactccttactaagctagactttgacatttcttatctcttccttattcttggctgctattaacatatcatcaacatattagagtagatatacaaatgaaccatcatcactcttcttaaagtagacataactgtcataactgcttcttttgaaatcatgagtagtcataaataagttaaacatcttataccattgtttgggcgactactattttaggccataaaaagatttttttttagtaagcacatataatcctcccttcttgagactaaaaccctttgattgctacatgtagatgtcctcatcaagttttccatgtaagcacattgtcttcacatccaactactcaagctaaaaatcgtgcatgaccacaatactaagaaaagctcaaatcgaattatgctttacaactggagaaaacaggtaagtgaagtctacacctggaacctgactgtagccctttgcaactaatcttaccttatacttgacttctttaactcccagtattctttttttccttttgaacacccatttgcaacaaataacctttttacctttaggttgtcttactaagtctcatatgccattcttatgaagcaattccatctctttttacattgcaataatccatttgctagagtcgtgacaactaattgcctcggagtaggtagaaggttcttcactggaatcaatacatttgaccacatttaaggcataaacaaccaaattagcctcaacatacctttttggaggtttaatatcttttctaggtctgtctttagcaatagaataatgtggtggtactagtggtagtgaggaagcaacaccattatgcatttctgaactagattgagatgtagactttggtaaagatcttgaaccaatctcaaactccacctatgtgcttgatttctattgctttttatcacaagaatctttagaagttgagtcatgaaagatactagttttataaaaaataacatctctattgactatcactttattggtttttgaacaccataacttatatcccttaacaccagacttatagccaagaaaaacacactttataaatctaggttccaattttccatcatcaacataagcataggcaagacatctaaacatcttcaaattagaatagctagtaggagtaccataccatacctcttgtggagttcttttgtcaatagcagttgagggagaatgattaataaggaaacaagctgtagaagcagcttcaacccaaaaagacttaggtaaatcaacattagagagcatacaatgtactttctccatcaaagtcttattcatttgctctgccacactatttttgatgagaatcaacaagcattcaaggatccattgcatgttccagttgggcctattactaaaacaagattcaagaagatcaaagaagcacttaatgggctaattcaagagattttggctgattctaacgtaggacattccaagcttggcccaaaggaagatgaaggtgtaataaatttattttagctttcttgggcaattattccaatactgtttgttgggtctcaaagcgtgtcgattgaggttcgcattagttttgctgcagagtatgacgaatagtatgatgcctcacaattccttctcactcgcatagaacattaaactcataagaacaaactccaagccattataagtgcatagacgttttacttgcttccttgtttgcctctcaatcatagtcttccactccttgaatgtagttaacacatcacttttttgctttaagaagatcatccaaacttttctggaaaaatcatcaatgatagtcagcatatagttagcacatcccttagaaggcttcctagatggtccctagagatcagaatgtatataatcgagtgtcccctttgggaatttactattttttgcttcccaaaaatgcaatcctcatagaactttagtttactaatactctaaccattaagaagccctcttctgctcagttcagccatcccattctcactcatatgcccaagacgcatatgctagagtccagtaacatcaccatttgataaggaaggagtagcaataactgtatcacctgtaatcgtagaaccctataagacataatttggcagatcttttctaccatttcatcacaacaagaacacctttgctagcctttaggactccatcttcacaagtgtatttgtaccttcttgaatcaagagtatttaaagatataagattcctctttgaatctgggatgtgtctcacatcaccaagtgtcctgacaaccccatcaaacattttaattctacccgtttcaataccaactatcttaaaagatgcattatttcttatcgacataacacctttagacgttgtttcatatgttgaaaaccggtcccgattaggacacatgaaacgtgcaacttgtatcaagaatccaatcctcgcaaggtttggagtcatcataataaataattaggagttctccatcattgtagtcattttatgaaagattggctttaccagaattttttggttgttttcctttctaattagcaacaactttcttattcttattctgcaacttatagcattcagatttgatgtgttcttttttcttgcaatgcttgtaagttttgtctttattactagattttgatctgcttctcacatcaccaccataattcctttcttatgttcactaatgaagagggcagtgaacacaataaaatcaaccctaaattttcttcattgtatttaacctccatggtttctagatcagagacaatttccttaaagatagttaagtgatcttctaaagatgtatattttgttatatggtgaggatacatttgttgctttagatgcaacttactagttagacttttcgtcatgcacaattgctccaactttaaccacaacgtaatgacaattttcttcttcaaaatgtcctatagaatttgatttgatagaagaagatgagtttgagatagggcctttcgatccctacattgtttttccttcggtgtccatgatgagggcatcttatcaaaccctaacaatgcatcatcctaatctatctgcgtgagcacaacctgcatcttgacctaccatagcgaaaatatagtgttgcgatctaaaagcagaatatcgtgttttcatagtttccattgtcgagatcaagcctaacatgctctgatactagtttattacgaaataacaagaataaggcataagaaaaattgaataagaacacacagatttaggtggaaaaccttagacaggaaaaaccacggacagaggagaagaagatttactatgtcaaaaattggtataagagagaagttgtgagtgactatagtagaaacataatcatcatcataaccttaaaactatacattatcacacacacacacacacacacatgcaagagttataaacattaagcatgagacctttgctactaacacaaacccccaaaaaatctcataattttactttcaccacatatgtcataccgcaaactttttcaggttggaccaaaaggaattcgagtcaccaaactctaacacttaatctttaagacaagtgtatgaatactagtaggatcaaccaggtagtattccaatatgatacttgtactacatgcctagttgagctgcaaggcgggaaaggagggcaccacaaccaatacatgtctagtgacaaacgcttagctcgatcaagtttaagataatggatcttatgcctatttaaagttctgcatccaagagcacaaacaacaaccatgggccatgctccaccccttgagtgcatggggtgagtatggaacacaatcactatttttgaggtctactcacaccacttgagtggagctaggtgaaaacaagaaacctttggggcaataattccattcgttatgctagcaacacaaaaaaccatagtttacgcccaaggtttgttgaagtgcttgaagtagaaatgaatggggacatgtggtggtagttcattgcatgaacatggagcctaccagcccacacgacccagacaccaccacttacgcgagattaggttcacttcaacacaacatcacaagatgaaccacaactcattgagaaatagatcctaacaagcacatggaagcattgagtgaagccctagtagaaccgatataggcatacctactcatctattcttaatgcccacacaaatcaccattgggtggcaggggactctatttggggagggatagattttggtggaagtggcatgacactcatcaatgataaaggtagcatgttggcgcacccttttgttggcaacatcatgctaaaatgtgtgtacaacccgtactaatgatgagtttttgtgagaagcacgaatagtgccaatataagccttaggtcaatgcctatggctcctcgttgtggagggattgagtggagtagggtgaacacgatacttgttaatcagaatcttaaaatgtttttcccaccaacttaatttctaatagaaacaaaaatttaaaataatataaattatttcaataggattaggactaggatcacgattccaatagttccattttttaagaaatgccatgatttggagttgctcttattttcaaaatcttagttattgagatattattctatattgcaaaattgatctctatatttcaagacaagaagaataatattttttggacaaaaataccctccaccaaattttgtatatccatttcacatcaaagcacttttttttataaaaaataaaataaaaaatgaagggtattttggtacatttgaggctatatttataattgcaaaatggaaaatatttttcctttgacacaaatatttctatttatgttttaaatacttattttatttttctttcattccttattttaacaattaaataatgaaagtgaattatttagatatttaattgcctttaacttattttttttatcaaacaattaaataagagaaaattttgtatttttttttatattttttattttcttttcttcaaaattttctacaaaaatatctttgttttcaagtttatacaaacgccaaaaaaaaaaaaaaaaaaaaaatctatatatagcaaagattgtccttatattcccggcccattttcctttattactttaatatcataaatgttataggacaattatcctacatatttagcaaagatgccgtccttatactccccattttcctttattactctaatatcataaatgttataggacaattattctacataaatggaacgcctaatattttctttaaattatctttccaaatacatagctctaccaaaaaaagatccaatataagatgagcataaattttatgtcaacccacatgtgtggtattgtctccctcctatagcctccttttgacttgagggtgttcagtattcttcaatggatagttctatggcttcacttaatattgttgatgggcatgaagagaatgaagtgtccaccaaaaagagaccctcaaagggtggttggaaatcagccgctttcatcatacgtaa

SEQ ID NO: 13402 - DNA, 5544 bp, Vitis vinifera
  Intron number 3 from transcript GSVIVT01026823001 (locus G SVIVG01026823001) derived from phytozome v7.0 (chr-ID chr1 5; pos 20182210 to 20187753 reverse strand)
aaatctgctgagctcgaggttttcgctctttcttttttcccattttgcccttcgttcttgctgccgttaacatgttcatttcttgaattagtttttgaagtctgagatctctaaccgtcgtactcgttttgaattctgagtttctttgaaaagatggcttctgattatgatctcatcattctgctgttggttgaggaaaactttgttgttattgtggaatccttggtagataaagtatcaaacagtggaattattaatatagcatctgatcccgatttgaaattttgaaactctaattctgtgcaaccaagtgcaacccgaggttgcatacaactacggagaactggatttggacaagataaaatatataaaaacataacaaattataagtatcttattgggattaaaatgaagatgttttatgtgattttcatttttattcctgtgtctaagcctagaaggctaaaattacttttaaaccattaaaccgtggagagataccaacaattatgtatatgttactatgatgtctgattttggtataatttttataacttataaagggttttcaaacatcaaatgcaaagtttgagatgggggtacttttaattaaaaggcatggagatggaattgtctatctgtgctttggattgtgctgctgagaaatgctgaacaaatgagataagatacttgaaagctatgaacaacaaagatgacattgaaggcgacagctctaagtgaaaggcaaaatcttaaatataaaagttctacactgtttaaggcttttagcatctaatttggtaaatccatgcccttagtagttttcctttggtgccatagactcacaacacctgatttctatagcaagttaataaggaatcgaaaatgtgaaggttaatatagtttcaaaatttgtacttttattgtttgttctatagcctgggattagctgatgatgaagtctccttaaacatttgcctgtttggttcattttcttatagaagtaatcatttaatgacaatggttttacaaaatgcaaatgtatcttgctatgccatttcaattgtcaaaaatcttttgttcaatcaaattatgaaattgattttcttggtaatccatcccttctttggcattcctcaatctttttgaagattcagcatgcatcaactcacattttctcattgctgccatttttggctgtttatggattttactaagctaccttgataatgagcttggcaccttcctgataaaacttttaaaactctcttctaattagtttcattggggaaaggaggcaaaatgggaaacaaaaggacattttattcaaaaattcaattctggaatcacttgcctaccacattatgcctcaacaatgcactgttttcatggagaaacatgttcccaattgaaatgggtgctatttattatcttacaacccattgtggctgcttctgtgttttttgatgtgtaattctgatttcattttcttggtctttcctctattctgtatttttacttgtctgagcttaatacaaacattttataagtcttttttcagtgagaaatttcattgggacttatgatcctttcattattcttcaagaaattttcctttagtttttttcttgattgactctttgtaagcacacaattaccatagttgtcatatattgaagtttttaagtttaatacaaaaatgcattcggttgataatgcctttttagtgagaaattttgttgggttataatgaaatatcttgataggtacttaagaaaaacttagaaaaatcacatttaagctaggggttgatgcatggttcaaagtattgactgagtccttgttgtgccgagtttgatatttgataccatcttaggcaaagactcagctagaaatcagctatacttagttgacttgggtgaatcatctgagttattgaaatctttttgccaaaactaaaaaaatttccttccaaatcacaacaaatgaacaccaaacaatagccaaaactgagaaaaagaacaacaaacaacaactaaaactgagaaatcttttaaacataagtgattctcttctaaagaagaatttttcatgaacctatgattgaagacttgtgatgaagaagacaccccgatgaagtctttgaaaagttttttagtccaagctataattgtctttaaggtgtatgaaaataggaggttgagggcatttcattgctaacctcaccgtagggtgcaacaccttcatggatccctcatccttcattggtgacgatcttaggtgttggtctctcatctctctactttgtctccatggtgccactagtgtgggtgtgggctatagaggaagctctctgcttttgccaaaataggttctcctctctctctctctcaagttttttagtccaagctatgattgtctttgaggtgtatgaaaataggaggttgagggcatttcattgctaaccttaccatagggtgaaacaccttcatggatccctcatccttcattggtgacgatcttaggtgttggtctctcatctctctactttgtctccatggtgccactaatgtgggtgtgggctatagaggaagctctctgcttttgccaaaataggttctcctctctctctctctctctctctccgtggggtgggttagtgtgtttgagaatttgggatttgaatacagggctaatgtattattttattgttttaaatgccaatatctataatataaattgcatggtagtgatgtgttattttattgttttaaatgctaatgtgtggtaaaaattgtcacttttttttttttttaatttgagtttgctaattgaaggttgatttgttttcaatttcaatattaaaaatatattgaacaattccaatgttcatagtattttattttattaatttttaagcttatttaattaaatttatttatttataataattaatataatatttttataattttttatttatcttattttgagtatcatccgataccgagccgaaatgccaagaccgctatgtctcgagactctccaagtagatgaccggccgcaactttgaaccatgggctgatggtaccagcttcaccattgcatgtcaatgcaattgctgtcatcaccattggcaccatagcacctcattcctaaatgaattgctgctgttgccactctcaatgcactgctattgtctccatcaccaccacccgtcacccctaccaccaccacccaattttccatcattggttaagcattttggaagtagttttcttgccttttgggagaaaataagaacaagaacataattctaacatgctaattaaacgataccaagattatataccaagagaagtctaagttggaggttttacattgtgatatcaagaactcaggttagcttataaggtattaatgttgtttgttaatttaactttaacaatgcaaaattccaaattacactgcattggaatagtcatgtagtgttcggcactttgatatgaaagttgaaacaatagagtttctgaacccaaattggtcagatgtaattcgttttctcatctcttatctgtgagagccttaggtcaacaacttcaattgtttttgatgtgaaactctatagagccatgttgctcaaagctaagtctatatttttgctgcatttaaatgctttcattgctatttactgcaggatggtgctaagtgtttgtatcccttccagtagccattagatgccatttgcccctgacttgcttccaaaaaattttctactctattttatggcctggaaattataggaaaacctggatgtctagttttatcctttccacatttcatttgtacatatccttgtttgtttagttgcaaaatttttacgtttcatactgattcatttgcatgtttattatgctttacaacatttggccattgggattcatttcactggccattagatgccattcggccctaagtgtttttttttttttggataggtaaaagcacagaataagtatatattaataaaaaatagggcgttcaagggtcaacccatagtatacaggaagtatacgacagacgcttataagcaaaaaacagaagaaagaggggtacaaaaaatcgcattcaccctcatctagatcccaaccaatcaaaaaagttaattaaagaattaggcccttcatcaatatacaacttagtccaagaccaaaaattacaaacaaaaaaatatttcatcatttggatcgaaaactcctcattttaaaaagcaatcctatttctttccttccaaatcatccaaaagagacacaatggggctgctctccaacctttcttcacttctttcccacaaaaaagccatgccacccaagaaggatctctttaactgacaaagggagaacccacaacacaccaaagagggtaaataacaactcccacaagacccttgccttggtgcaatggattagaaggtgatcaatagactcttcagtagcacaacaaaggaaacatcaatttgagagtgaccagcccctcttctttagttggtcctacgttaaaattttactccatgaagcttcccaagcaaaaaaaacaaccttagtaggaacacaagggctccaaataacgctttttggaaacagaactgtcctgctgccctctgtaacattataaagggttctaacagaaaaattctcatccttagcctctttccacaaaatcctatcctccaaattcgtaaccaccctcttcccttgtaaggagaaaaggaatctttccaccatctccatctcccaatcattaaacaacccagaaaaccatggattccaaccccccttctcctttaaagaatcccaaacctccaccacctaggtctcttttgaggtcgctaaagcatacaaagaagggaaagaaatactcaaagcatagtctccataccacctatcctcccaaaatctcacttttttaccatccccctctgaaaaaacaattttgcttttcattaaaggccattccttcctaatttccttccaaaaccccacactataccttcccttacttctcgggtgcaccaccccccttattctaccccaaatttcctactattaacttgtttccaaagagtccccctttcttttgcaaagtgccaactccatttacccaataagactttattgagtttagagagacatctaacccccaaaccaccctttcttttattggaacaaacaaccactcactttataagatgagacttcttctccatccccctcccaccccaaaaaaaatccctttggattttctctagtctcaatcttaccactcatggcatacgcaacagagacatgagtttcttacaaacatttcctactctattttatagactgaaatttatatgaaaacaggatgtcgaattttgtcctttccaattttcatttgtatgtatattatctgcgatatgaatttatgatgactgtgatacagagcttacaagaatattttcttgcagcaacggcctcatcaacctattcgtccaattccttc

SEQ ID NO: 13403 - DNA, 15798 bp, Vitis vinifera
  Intron number 3 from transcript GSVIVT01000258001 (locus G SVIVG01000258001) derived from phytozome v7.0 (chr-ID chr7 ; pos 20616160 to 20631957)
tttttgccggaaggagccaacagagaccacgaggcggcgaatgtgagcgggccaagagggagggagttgtcggaggtggagtttccggcgacgatggtattcattggaggattcgatccgttgcaggactggcagaggaggtactgcgagtggctgaagagatcggggaaggacgtgagggtgttggagtatgggagtgcgattcatgcgttttacgtgtttccggaactgccggaggcgtctctcttgtttgcagaggtgaagaatttcgttgagaaacagaagaaaacgcgtaggcaaaacccatccatgatctaggtataatttatgtattatgaatactaatataatgtgtagttctcgtattactgaagaatagtttgctcagaagtctcatttatccctattttttggaaaataattgagggaaaaacataagagaaaataaatagggaggatgtgtttggttggtgggaaaaattgaaaaggaataagaggaaaaaagaaataaagagtttgaggtagtgtaaatatatttattttttgaaaattttgagaaaaaaaaatttgagaaacaaaagtagagaggaaaatagaagtaaaaatagttcaaactcatttaaacttagcatgagttatttttacttttttttttttttttttttttttatgtttgaaagagtttgaaactagattatttctcaataatgtttttgttaaagacacaataagaaggaataaaaatatttaattacaatatatatatatatgtgatatgtttgaggatcaataataaaacataatttacttctcaaaaaacataaataaatgaaactactttttgatgcctaaggttctgtccatttgaatgcgtgggacaaagtttagagcttgcctcgcaagtcgcaaccgcgtctgtgtccaaaactattttaaaaaaacttgataataagtgagaaatgttttaagtaataaaattatgtttggacactcagcatttgaaatgaaagttgcatctttgcagctggaagttataatattttcgatttcatcttataacattggtagaggattcatcggctctgtctttaaccatttcaaatatttataatatatatttaaaaaaaaaaaaacaatgatagcatttttatcaaaatgggataaaaaaaaataaaggtttccaattacccttttaatcaaataatcttatgaccatgtttggttccataaaatttcagaaaaaatgtgagagaaagaaaataaaaagaaaaaataaaatgactcacttaatttcttttattatataaatattatataaatttttaattatatttaattttctttaaaaaattttataataaaattaaatatgaaaatatcaattttttttttgcatttttttttttccttggtactttccgaaccaaacatatcctataagattgtagtttaacccacgttgtgccaaaatgccatccatcaataggaatttgatttgtggttatctgatgggtggcaaataggaggcaggaggagctacgtctactacttacatgcaggctccggctactaaactttttttgagaatgccatccttaatgccaaagctgtcaaaagcaagcaaaacacttatctcaaaggatggatggcatgaatttgacactttttaagtgtgagggctatataagattgcccatgaggagtgtttccagggccttccctacgaattatggtgaatcctattcgaaaccatatacacacgccggacaaaattttgattcattctaatcaattttaacaaatacacatgaagcattagtttgaaaattaagttatggttaaatactctgcagctaaaccttttaaaaagtcggaaaagctaaaaggaactatttaaaacgagccaggggcgctgtgccctgctcttcttcccatgggaaacataggcgagaaaatcccccggtctcggggaattggcaaaaagtgattaaatacattttcctgtacataatacacgagtctaaatttccaacgcgcaatggaatccaaatgaataatatacatccttccatgatagaattggttaattgattttggattatccaagtttgttctccccaaattcttatacccatttaaagagaaatatatatgtaaaacagaattaccagagcagagcacccacggctcttataagaattgaacaataaacatcttttggctttctctcctgcttgcccctgtgcaccccactcagatgccaagaataaagcacaagtgaaggacaatcccattcaaggctatgtttgtctatcaaaaaaaatttgaggaaaatgtcaaaaagagagaaatagaaaaaaagaaaaaaaaaattaattaaattatttttatgtgtagcttaaaactcattttatttgtttcatcttttatacatagaacttaattttttttttaaatgtataagtttctaactaattttaattatattttattttctttgtatttttcaaagtgaaatcaaatattgagaaaatcattttcttttctttccttatattttcctagaactaaatataagaaaatgcacgatcatccctttctatttcaccaaaggattaacatcaaaatagaacacttgtaaaatgcaacaagacttccacaagccacaatcgatctcaaagtgataattaacagatattacctcaagataaaaaccagtatttttaaccactctactctacttgcatgttgaatatttaaaaggaaaaggaaaaaaaaataaaaaataaaaaccaacttaaagttcaatgaatgcaaggacgttaaaaattgagatctggcatgcacctgtcaactagaacccccagaataaattctaccatacctaaatttaatatttcataatctaagcgtaatttaatatacaccacaattgtcccatatccaaattaaacaatttaaattggccaagctcatatcaaatattcaaataatccaactgtggaccctcacccgatccactggaccggcgcgactcgcttttaaaagaaaagaaagaaataaaaagtttgtgttttccagttttaaaaaacccgcccccgatgaggaacggtgttgtatggagtcgccacttactttttttatttttatttttaaaatagggaaaattaagtaagaacaaaaacccctaatgaccctagtatggaaaaatcggtctgcgaaaactagattctgggtccggggatcaggttacccattggaaaggtacctcatgcgaggtagcacccctctaggcccggaactcggtctctactaatgaattgggtatgtgagagcatatgggtcaaaaatggaaccctaggctaaatagatgtcatgaatcacacaatcctaattggtatttggcatgcatatgaattcaaccaaccaaaacaatgggtgcgtacttgtggtccccagccaagcgctgcataaaaggtcagccaaacacagataaacacataacaaacattcaagattaagcaccatgcatgcatatgaattcaacaaccaaagccaatgatgcgtacctgtggtccctagccatgtgctacagcagagggtgagtcagccacgcaacatgtattcaaaatcaagcatcaaagcttgtgccagaaaggaagatagctggttgaaatcaggtaatggactccccaaatgtcatacaaatcaaactagacttacctagaccacactgcccatgacctcaaaataggcccacactaattgaaatcaaacactgacttaaaccttcaagatggctcacaagtgccccatagcaaatgggtttgagccccaatggatacgggcttgaaaaatgccaaaattgagggctgctcaaagtcctcttgcagaataggttgaaccagttctcaactggtacaacctgttgagaaaaagttcccaaattttttaaaagactcctaaataaataaggaatcaaacaaaagcaacgacactcaatcccaagcctagacgagtgagaaccaaacaaagctcaatcaggtgctcctcatgactgatagagttagccagccatggtgctgaaccggttgaaccagttcagccggttgataaaaaatccaagatttggtcagaaagttcctaaatgaatgaggaagcaaacaaaagaaacggttctcaattccaagcatggatgagtgagaaccaaacaaaacaaggtcaggtattcctcatgactgatagagtcagtcaactatggtgctggaccggtcgaaccggttcccaaccagtacatctggttgataaaaaatcccagatttggttaaaaatttcctaaatgaataaggaagcaaacaaaagaaatggttctcaattccgagctcggatgagtaagaaccaaacaaagcaaggtcaggtattcctcatgactgacagagtcagtcaactatggtgctgaaccggtttccaactggtccatccggttgataaaaaatcccaaatttggttagaaagttcctaaatgaataaggaagcaaacaaaataaacggttctcaattccgagcccggatgagtgagaaccaaacaaagcaaggtcaggtgtttctcgtgactgacagagtcaaccaaccatggtgcaaaattgaaaacgatgaatgaattaaacttgagcttaaacgtgattctaacacatcaagaaaacaatcgtcctcaactgtaatcctcaaccattcataaccaatcaacaacaaacatgtgtggcatttattatccacacccaagcaatacaatcttcacatcaaaggaaataaaagaggatgcgaaagaagaaaaagcatacgaagacgatgaagatgacctgtaggtaaaaaaaaattcagcatacttacctcagaatctccgccaaatatgatccatgtacgctgatgatgacttccagaaaccgagatgttgtagctttcctcttcaaaaaaccacagtgctgaagctttcctccatgctctcaactcagaagatgctcctcaccctttgtttttctcaccaacaaaatatctcctctctcaaaaatgccaaaaggtcctttgctctcctatcctctcaccttttatactcatacccctctcagcatttgagcctcctgggttccttccccttcagcaccgaaatcccctccatcagcatgggaaccacaccccccattatttctcttgcacttacgaggctagctcactccctttagttttcagattgcttcaccaccaagaatccatatggatccgtggtgggctgcaaggaacccaaaccaaggcccaaaatgggcccacaacattgcccaaaatcgatctggagcttatgggcctgagccatgtaggatttgggtcccaaaattaccaaaatcagtgttctacaccggctgactcgatgaaccggctgaaccggatgtcaactggtcaaaccggttgcaaaaaatcttgaaaatttgataaaatgtttctggaagagtaaggaatccatgaaaaaaaaatggtgtgcaattccgagtttgaatgagggagctatgatcaaaacaagcccgagtgctccgaacctcaacatgcccccataaactccaactaagctaaaacatcgggatgaccccacttccttcctatagggtgatgtaaacgacgaggaaaatggtcacgatgaccctccaaaatgaaccacatacgcaccacaatggaccacaaacaagcccacacgaggcttagacaccgactaagcccaaaaggggccctagtggtgccatatgagaacaatgggtgcaggtgacgcccaaaggataaatgccagtgtcgagggacaaaattgagggtctacaccaacaaattccacccacattatgggcctcaaaatccacatcaattaacaagcccacataaaaaaaacacatggtcaagagaaataatatttcaagcccaatccaataagcccaaacaaataacaacttaacactaggtccaagtccaaataaacaatatgcaattgatataatctaaatatccccaaattgatcaccaaatacaatatgcccacaaacccaaattaacaaatttcaaattaattcactaacaataaattaaatcaaattatgtattaatctatcaacaataaattaatcccaaatttcatattaattcaacaatccaaatttcaagaacaacaattattattaaaataaaataaaataacaataataacaataataataataataataataataataataataataacaacaacaacaacaacaacaacaacaacaataataataataatcataataataataacgaaaacagatgagatgggaaggggtcaccagtcggtaatggctcgccggcagtgattggccggtggccctatcggcgacagtgagggtggacaggttttcgagaagcaaaataaaatgaaataaaaattaaaatcaaatgggaggtgtggtggagtgttgtgaaggaggaagaagatggaaaaaaatatgggggccgcgcctgtgggagtttggggaggagaagaaaataaaaaaatgcccagaagccaaggtggggtgctggccgtgtgagagtgaatggagaggggggctgccaaaaaccctaaaaaacttcagaaagaaaagaaaaagaaagcagaaaaaaaaatggggggcttctgttgctgttcccgggggaggggaggctgagaaaaaaaagaaaataaattccccccagaaaccctaggttcagtgccggccgtgtgagtgaatggagagaggagggagcctcgaggagagaggagagaggagggaaaaatgggggggagaaacaaaatggcgactccactggggatttttagagggtcaaacttgaactcgagttgaaaagaatgtggcatttgattggttgattaattgatacccccctctatgtgtcttggtatgtttggttgttgattacacgttgagagatttgatatgtttgtatgtaatatatgtttggttgttatgttcatttgtgatgttgacatgttgattacatcgattgattctcttacctactttagcatagtgactcttcttgttgtatgattgttttgctttattggacatgtatattctcatttttgtatatctcattcatcttggcatgattgattctatttgttgtatgttatcttgtttatcttgacatattgtatattcttgttatattcctatcttgcttatcatattcttgcctagcttgtgtgtagatatgagttatatacctgttatttgcatgactgctttggtgcatgactgctattcttttatgtgatgcatgtattgtttgtctgtgtgggacacacatctatccccttacctccaactccttagtctcggtcgatcttgttttccttaatctcgtattatgatatgagatttgttgctttgtttgctctttgaccgagctagcgattaggagtagggtctagctccgggctatattgatgtttgggagcattctagaggaagccgacacgtcaatgctgattggagtccgatctttgaagacctgtatagcccggagctaggtttcatggatattggtgtggctagtgtgtttcctttcccgttttagcttcttagggttatcggatgcacccacatcgttcactgcatactctagttgacttttgagtgttgagagttttgagaggtttcaccataggaatacctttgggatgccgaggtagtgcatgtgtggagctgatgaccatcttgcatggaagcaccccatctcttcggaggcgtgcagagggttacgtaccgtcggagggtatgatcgcttctgctagggatcttttaaagtccacccatatctaattagagccaccttgacctcgtggttgagacgtagatccttctattaggactccctacctacacgtgggtgcatctgagggcctttagagcctctttggtcatagttaggattcagtattccctcttttagtctccaattgagagtgcacagagatcagtacgagtttgagttacagtcggacagtccttctacactttgatgtcttacttattccagttcagactagcatttctttcatgttttccctatgcctaccatatctcgtgtttcatgctattcaggattggttcttcattctcagtgtggatttaccatcttgggttagagtacaggggagctcagttcggttttccgagaagtcaggcatagatcagcagactgtcacagttgactagttcacaaatgccatggattctattaaggtatcttatgctttatgctcttcaggattggtttttcattcttagtgtggatttgtcatcttgggtcagagtagaggagagattagttcgcttttccaagagatcagacatggatcagtggattgtcacaattgatcagttcacggccgccatggcttctatttaagaggccttgaccagtctcaggcaggagatagacagtcagcagagtagacagtccttgaggatactcattcatgtatggatcgtattgagtagcgtatcaagcagttgagagtatctgacagttcatgaacttggaatgatcttgatagtataccagtggccagtctaccgaccaagttcaggatgcctgacattgagaggtacacaggcgttggttgtccatgtattcatcttcaactctacagtactgtgatgagggtccatgggttagacggtcacagataatcaccatgtttcctttatctctgagtggtgcaacccagcattagtttgcatctttggagtcctcgcgacagaggacatgggatgacctagcttaggagtttctgtgacaattttcatttagtactgtcgtggatgtgtcgaggagagagcttgagggtttcagacagagattagatgagtccatttcttccttcatctcccactagtggggaaagatagtagagattgttgattgagcattatagagaggtgacttagtcttgaggttcatcaaaggattgattagagatcatcacttcttagtttgacgttcatagtcacattctcggtttttggcatttagagccatcatcgattttcaatttgacgttcagagtcgtatttttcagtttcggggttcagagtcatcatcatcgcttctcagttttggcattcagagccatcaccacttcttagtttcggctgtcagagtcatcacttctcagtatcggcgtttagagccatcctcatcgcattctcagtttcggtgttcagagtcatcatcatttctcagttcgacgttcagagtcgcattctcaatttcggcgctcagagccatcatcggtttctagcttgacattcagagccgcatcttcagtttggcattcagagccgtcatgatttatccacagttcagacgttcagagtcattcacagttcaggtgttcagagccatcgtccacattcaggcgtatagagtcatcatttctccatagtttggtgtttagagccattgttcacagtttgacattcaaagtcgtcatgatctctttacagtttggcgttcagagtcaggctttcagagccatcatctctgcagtttggtatttagagtcattgttcacagtttggcattcaaatccattgttcatagtcaggcatacaccatttcccaatagtttggattttagagccaccgtgtccttagtttggcgttcaaagccaccatttctccatagtttggtgttcagagtcgtcgttcatggtcaggcatttagagccattggttagcttggcatccagagccatcatatcttcagttcgacatttagagcagtcagcttggcatttagagccattagtcaacttagcattcagagccttgagctcacgacccggagtcattctttttattcatggcccagagtcatccttagcattcagagccttgagctcgtgacccagagtctttttcaccttttaggtgttcagagccactactttctttcatggatgtttagaattataggccttcaaatctttttttggcattcagagccacaattttcttttataaatgttcaaagccatcttttctagtcttaggcgttcagagccattcattttatcaattttaggcattcagagccgtgtcttcattttggcattcagagtcattgcccagcttggcattcgatgccatcttcttcttttagttttggcgttcagagctgtcatgcatactcattcaagcacctagagtcaccatctttcctccttttggcgttcaccaaccttatcattcaagagagcccatgtcatactgagacaaatttggtggtctttcttgttcttcggcaaagttcacttcgtttcattcgtgtatacactcactttactcgtgaactctaccgaagaggggcatatttgtggaccccaaaatttgtcccaattttaattttacattaattttgagcccaattttaaatcccaattacatgtgttattttaggcccactcaccctttactttttagttttcattattttgtaaattattattattattattattttaaatcttatttttacttattaattttatttgttattattattattatattattattatattattatattattattattatattattattttatttatttattattttattttatttttttatatttttttccctcatctctctcttcctttttctcctccacctaccctcacccactcacttcttctctctcttcccatactctcaccaccggccacttttcaatcttctcttattttttttattccctcccactcttctctctctttcccaagactcctccatttggccgggcgcccctctcccatttttttcttttttccccccatttttccctcctctctcctttctccattcactcacacagccggcaccaaacctagggtttctggggagaatttatttccttttttttctcagctccccccccccccctcccccctcctccccgggaacagtagtagaagccccccatttttttctactttctttttcttttctttctgaagttttttagggcttttggcagcccccctctccattcactctcacacggccggcaccccaccttggcttctgggcatttttttattttcttctccccccaaactcccacaagcgcgacacccatatttttttccatattcttcctccttcacagcactccaccacacttcccatttgattttaatttttatttcattttatttgcttctcgaaaactcgtccaccctcactgtcgccgatagggccaccggccaggagccattgccggccgacaaccttttcccatctcatccgtttccgttattattattattattattattattattattattattattattattattatcatcatcgttgttgttattgttgttattattattattattattgttattattgttattttattttattttaataataatttttgtttgtgaaatttggattgttgaattaatatgaaatttgggattaatttattgttggtagattaatacataatttgatttaatttattgttagtgaattaatttgaaatttgttaatttgagtttgtgggcacattgtatttggtgatcaatttggggatgtttagattatatcaattgcatattgtttatttggacttgaacctagtgttaagttgttatttgttcgggcttattggattgggcttgaaatattatttctcttgaccatgtgttttttttatgtgggcttgttaattgatgtggattttggggtccataatgtgggtgggatttgttggattatttgaatatttgatatgagcttggccaatttaaattgtttaatttggatatgggacaattgtggtgtatattaaactacgcttagattatgaaatattaaatttaggtatagtagaatttattttaatttatccaattttaggtttggttgattgtgtttgtattttttgttattaatttggacgttttgggttaagacatatagtaatttgggctcattttaattgaggaaatttatgggactaatttgaaattggaatttgagttagaatatttgtttgggattttatacatctctagatatttgttggttgagtacgaattgatgacacgtggagcttgttgtaagtttatttggatacatattttatttctcactttttatttgattttatttttctagtttatataaatattcgttcgcatgtatttattgagtgtatacagaattgaacatcgaacaaactagaaattttgtttaaatgagaggaagaagtcagtaaatgtgttttaacaaaacaacaattttaaaatattatttttaataaaagaaaatttttattttattttattttattttttatttataaaaattaaaaaaaatgcatttagaaaaatccaaaagaaatgtttttaatggaatttgaaaatttgtttttaaataatatttgtccaaaaatttctttgtttaacaaaaattttccaaatattgttttgtaaataaagttgtcccaaaaattaatttttaataaaatcgtccaaaaaaatgttgttttaaataaattctttttacttaattaaaattggattaaaagtcatttttaaaaatagatgatttatttatttatttatttattttttattcctacttttatttttattttttccttttaattaaaaattcttttgtaaataaagttatgtcattttaaataatttataaaaatcactcttttaaataaaaaagaatataaatacttttgtaaataaaattgtaaaaattcattattttctagtaaaagcaagtaagaaataatttttgtgcccaaattgaaattttgtaatgaattattttgatacaataagtgtaaatagtttttttttaaaaattgtatacaattaaaattgagaaaataaattatttgtttttataagtaaataaatggaaatcattaattcaaaatcatttttaataaaatcctttgaaatttctttaaaactttttttaatatcttttatttatttaattcaataaatcattttgcataattttcttattatttattttgtgtatttttgtaattagatttcatcattgtttttgtgcatattaattctcaccatgacttgtatattgattatttttcttggtatccataattaattaattaattgtcataattttctcaattcgtctagtagaggtcgtacgtatgcgggcttagaggggtgctacggctcaccaccgtacctttccaataagtaacctgacccctggacctagacttggttttttgcagactcgtttttttcttcaggagtcatacttagggttttctttcttatttggtttttcccttaaaaaaaaaataaaacaaaaataaatggcgactccaagtctttttctaaaaatcaaattttcattaaataaaataaaaatcaagtttcgccatcgagtgggaacgcatcgagcaaaatgcggggtccagctttgtacgtctttatacacttagtacattttccttatacaattaatataatacatttgtacagtggcgtaataaatgaataaataatttttttttcatataaaaaaaatagtattaaacaaggttttcaattttcatttttaaaaataagtttcattttttaattaaacgtattttcaaaaaaagacaatatagaaaataaaaattatttttaaaaataaaaaaaaaactataaaaatattttaaaaccaaactcaaatataatctatataatttttagttacttgttttcatctaaaataagtaaatatacatttcaacccttttatataagaaaaatttaatctctactatatattaatataatcaacttctaaaattaggtcatatgaaaatatttttattgagtacttaaaataaaaactcttcatccatcctctttatttatttttctttttcttattttaataaattttcaattaattcaaatcattaaaaaaaatcattaataaacaaatttttaacatttcatataacttattactaaaagtcatgttcaaaaagttattaaaataaggaaggaagaagattaaaaaaaaaaattaaactttttattttataatagtaaaagaaaaactttaaaatagtttttgagtataaaaaaattaaaatagtgaatatatttattttaaatgatattttaatcattaaattatttacttctaaaatgtaaaagataaaaataaatgtaaaagataatttttatttatttaaattaatatttttttagaaagtattttccaaaatagtccttgaatcattaatataatttttatttatttataatttaaaaataaaaaataatgttaattttttaattatttataaaagagtttaaaaaaataatgaaaaataaaaaaatggttaaataagaaagaatagtagcaagtagtagaataaagataaaaataagtcaagttggtatttttatcaattactatttcatatccttatcattaatgggtggttggaggaacttatcttaattatgaatcctatatgggttttgtgaggataaaatcctaccacttatttattatagaaacatgttatcattaggtttttgtttctcatttttatttaaaaaacaattttaatatgagtcttgtatgtgaaagtatatggtagaaaaagtacacatttatcttatatttttaaaaattatttttaaaaaaaattaaatttgagattataaattttttgtagataactcaatttttttaaatattgttcaaaaccattattttttgaattatatatatatatataacataaataatactatcatttttttttttttatttatttattgaaaatatgaaatagattgagacagagaaataatttattttcttgcatttaatgcataatgaagaaaaaatgttaattcgctggccaatcccacggtcccgccaacttgagaggtgtcccagtgatatttggatccagatcccatcttttctcgccgcccaaagaaaagaacaaacaaaatgactcaatcctcacctgttcttccatggaaaaccaagttcgtcctttccgtgctttctgccgttaccgattttgcccgccgtgatgacggcaccatcaaccgccgtctcctcagcttcctcaacttccgcgctccgcccaactctactcccgttaacggagttaagacctccgacgtgactgtcgatccctcacgaaacctctggtttcgcctcttcgagcctacggaggttcctggccgaggtgagaagcttccggtgattgtgttcttccacggcggcggcttcgccttcatgagcgccgattccaaggcctacgacgccgtgtgccgccgattcgcccggaaaatccctgccatcgtggcctccgtcaattaccggctctcgccggagcaccggtgcccggcacagtacgacgacggcttcgatgtcctcaagtacctggattctcaacccccggccaactccgatctgtcaatgtgcttcctcgtcggggacagcgcgggggcgaacctcgcgcacaacttgacagtgcgggcgtgcgaaacaacgacgtttcgggaggtgaaggtggtgggactggttcccattcagcccttctttgggggagaggagaggacggagtcggagaggaggctggaaggttcgccgctggtgtca

SEQ ID NO: 13404 - DNA, 2019 bp, Vitis vinifera
  Intron number 3 from transcript GSVIVT01021163001 (locus G SVIVG01021163001) derived from phytozome v7.0 (chr-ID chr1 0; pos 2053044 to 2055062)
tagcttgcacccaaccaagacgtcttgctgtccaggtgttttatcaatcctcgcctacttcttcaaatgctagtttttgcaaattaaaatttcttgtttcagtgtgtttttttgggcccttttgccttcccattctatcaccagttgtacaagggttgttgtgccaaagttctttagttctctggaatgtagatatacacttggagacatcctgggccttttattcttttgctatattttttatattctctattttgatcttttattataaaaaaaacttcagtaatcctatgaagaaggaatgcaaaaaatgaatgtttgtaaattatgggatttgcaaagtttaatcattgatctgtgaaatttaattctggaacagaaatttacacttccttttcctcatcctgtcagtttcttttctttgttgcctttatttattcaaacaagaatgtttgtcaaagtagatgttgtgtaaggccatagttgttaaaacttctgatacacaatataatatatatttttttcatgaaaatcgataaatattgccatccatatcttatgattcttatctttagtgtatcttaaaatacatgtgttgagatttgatatgatactcaatacaaagatgcatagatctttaattttattttttttttccataatttttaagaaaaattcaaatttaattttttttcttaaaagaattattatactacttgcttgtaacatttggtgaggttagaaatcgatcataaaagggagaaagaggtaaaataatcctacatgaaaaactacattattgttatcgaaggttatagtggaacttaggtaaatttattcttacaatgaatatcaaagaattttcatttgaatgatttgaatgttgacatcgaaaataatggtgattgatgaataagaacttttatttactatttcagtgcatgtttggattcacttcctattttctatttttaaatatagaatgtagttataacttctatgtaaaaagtagaaactcttatacaaaatagtacaagcttaccttatgtccttaaaaatcactttaaaaagttataaaatttaaggtggtaaaatttttttaatacctcaatttttttgaacaatttctaaaacctattatttttttaaggtaagtcgtaaagagttctttcattttacataggagttattattattttctatttttgaaaataggaaacaagaaacacatttaagtgacatcttagtttttcattttttggtgaggaaggaataatgaaacatgaaaagttggaactttggaaataacacataaagacatatatatcaacaacacatatagacatatgcctggttagattttggaagtaaaaaacatacctaaaaatttaaaacaatttatttttgtggattttgtgataaatctttacattaaattcatattttcctaagttcaacttttcaatactctagtattcaatgtttttatatgataggatgcatctttcatgaaattggttatactactctatgttacttgcttttgatatatatttatgtccatgtatgcatattttttctatttatttttcactatataaaaaatttatgatatacgatttgatggaatacgatgcatgaaagaagtgaatagaaaaatgatacatgatacattttatgagttaacaactatgtctaaaaccttggttgattttaacatcattgacaatagaataattttgaagattaggtggtttatcatccagatattttgtaaagccatagattaagttggtatataatatttgtaatataaaacgtctaaaagtggctcaagtgatgagaaattgcatgtgggattgtatttgtcttttgtagtccttcatcattggtgttcctcttatgattgaaaatgatcaagacttcaattgccctagaactatttcattataatagactgctcacaaattttagcatcattgtgatgtacaggccgttgcttcaagggtggctgaggag

SEQ ID NO: 13405 - DNA, 7534 bp, Vitis vinifera
  Intron number 2 from transcript GSVIVT01023017001 (locus G SVIVG01023017001) derived from phytozome v7.0 (chr-ID chr1 2; pos 16847074 to 16854607 reverse strand)
aaagaaagaaagagaagcgactacaggtacttttgctctagctattttcttttttgttccttttgggtgatcaacgcagtgttgttagctagctggcttcattctcctacatgggttttattggccagagtgagtcttgaatcaaataattgattttggtgcttcactgattgttacgaaatgttgaaatatggacttagaaaatatgatttggtttctatttgcagacttttggatggaaatttccttgacacaagagaatcctaattctatgtgctgcttgtcatcaagcttgcacccaagttaggtgtgatatggatatggatttctttacatgctcatggtttgttatgaatgttctttttcctttactattaaaataaatttctttgggagaagaataatatgcatgatgtaaaatcaatgatttgtaaattttatagtaggaatctctaggtttataagcaaaataatttgaagagacaacacaaaagttctcattcctctttcttgagtgctgtcaattgtgacttccaagctttcgagcatatgggatccttcctagggatcaaaaacagtgtaagggacattttcagttggatagggtttgggagtacataggggataggatttgttggaactccaagttcagaagacagatttatgattgggaactagatagggtggaggtctttcttaggatattgcaaatgtaaatgatttgtagggacattggctaaacttgaagtgtggcaaattctcaatcgcatttttctattactctttatctattagaagaatgaaggtgttccctgcaagcattgtttggaacccttgggttctggtgagaatcaactttttcgcttgggaatctacatgggaaggatattgatgttggataagctcaaaatgagaggctcaacagatgttatttgtgcaaaggagaagaagaaatggatgatcacatcctcctacactactcgaaaagggaggaggggaggtggggggcaatcttttattggttcttcttcctctattccatgaatgacacaaacaccccgtccttcatgcctagactctcaaattcctcctagaactttctgggacacatcctgaaacttagagttatgtatcataatttctggtttgttcctgagatcacctcttgagcagctctgtatttcctcctccaatcaacccttacattcaaactaatgaccattgtaacaacaaactacagcccaggagtccactcaaaatgttcagcctattacccttacttagggggaagagggtccttttagccttttccctttcttttattatagaaccttgcccacatattttgaccttgttttctccatcactattgctcccaaaatgggactttagtctctagtcttcatccatatataagtctcatactaatccttcccatgctgaccaaaggattcaaagatatggtttgattgtggccatagtccccaataggactattgatctttccatgatgtgttaggttgtagaatagggaagctgcccacttcctatttgggtcttcctttgggaccctcttgtaaatcttccaagatgtgggatgctagggaggagggatttagggaaagattagtgatgtggaagggcaataactttctaagggtgagatacttattctgatcaaaagcactttatcaagtcttctgatttatttcatgtaagttagagaaaagacctcttttggttaattggagcttagttcgtttgggaaagaaggatgggggcattggagtttgcaacctctctatcctaagcaaggcattgcttggtaagtggaattggagatttgctacaaaaagggaatcttaatggaaacaagtcataagaggcaagtttggagaggaggaagggggtaatgttcaagatgggtgagagatggttatggagtggaggtttgaatagccatcagaaatgaatggaaaggtataataagcaagtcttgtttcttaattgaaaatgggagaagagttaaattttggaaagatttgtgatgcgaggatcaaacataggatgaagccttcccgaatttattctcttttgcttctaacaaagatgaatgggtgacatacgcatgagagtaggttagggaagggggtggttggagctcttgttttttaaagtagtttaatgattggtagcttgatgcagtggagagtttctttcggttattatattcgttgtcaattgaaagggaagtggaggactaagttggaatgagtccaagtgtggcattttttcagttagatcacttgtttcttccttgtccaagggatatagtgagcctttcccgactagtatagtgggaagcacttaagcacctatgaaggtaagtctctttgcctaggaagcttcttaggatagaattctaatccttaaccaactcaaaaggaggggttgcactctcccgtgttacttgtgtaaaggggaggaggaaacgacataccaaattacttttgcattgcttcaaagtaagagtgatgtggcacttgatttattctcttttttggagtggagtgggtgatgctttcgtcagtcagaaggaacttgttggattagcatgactctttcatgtggaaaaaaggggaaaaaaacatggacagtcactcccttgtgcttgatgtttgctctttggagagaaaggaacaaaaggatccttaatgatgttaagcagtcctaccaagcaatcaaatccgattttatgtatacttttgtgaattgggttagggtatatatagaggaccacacaacaacttctattttagattttgtaacttggttgagcttaaagtaaggagaggggttttttgtttcttaaccttctcgcttatattaggcacttttttgtatactttgtttgtactaaactacacctccctttaggcgcttttgatatatgttctctttcgcctatagaaaaaatgatctttccatgatcatttagaaggagaggtggagatgaaattttttgtgggtgaggcataagcctcaagtcattttaattatttataaaataaaaaaataaaagtagagaaataaatatgaaggttgggggttgtgatcttatgaaaaataatgaatctaattgcagaatgagatagttttgtttaaaaatcctttattgtgatgggaaaagaacaagcatctctctctctctctctctctctctctctagctgtttaagaactgatttttcttacattggtctcttcattaggtagtgtctctccaccaatagttgtgacagcacttgtatcaaacattgttatactgccaacattgccgttcttgaaactccattcccttgaatactcattgagatgtaggagtgaaattctttagacttgtgaaaggaatataaataaattacaatagaacatatcggttcagcttgttttttgcaatttttacaagagataaaattaaaagtgagagcagaaaagaatatagagaagacgcagcaatcatggccttattaaatgaaattttgctacattttctggtagggaatgaggaatgctagttttcctttcgcaggagatgtgagacaccaaattccctcaaaaatctgattcacttggatggaaaatgaaggtcataatgattgataaatattcaaaagaagagatcctttttggtgctgctgcaagaaaacatgataaagaagcaataaataatatttcattgcattgtagtacagcttaggagatctagatgttcatttttatcttttgggatagcatgggttatgccgaattctaataaggagttgtgtatggattggaagggatattcagtgaaaaagatgattgggtttacttggagatcagcccctatattattttaggtatgttaggaaagaaagaagtatgagggtctttgaagtatggagcttctgtgcatatgatcaaatttttggtttaagatctctctagtctacttgcctaaaaggtataatatatagagtctactcctttaggtgttaggaatgtcttttcagggggaaggatatgttgttggatctcattgacaagttgatttgcatgcaatttgttttattttaccttttctaaggtgtttctgatacaatgttcatgtgtatgtcatacagcctcaccctcaatgatgcctgttatgaaattcggtcaattatagaagaaaaaatatagttcatagtaaaatattaaattcctctaataacaataaactaaaacttagccatcattgtatccattactgctaccccaccattaccctcttatctattttttaaattttgtggttgtacatgccaccactccatctttttcaacatttcatcaccattgtgttattatgtcaccaccaatacaaactaggtttctgctaccatcaacacatcaatatcatcacatccactgtcaacaagttactactagttacaccacctccaccacacaatcaccaacttgctaccacttccatccccttgttaccggtgctggtgttctgttttttgataaacaaattaaggaaataaatattaatagttattaacattggggccacaatctgaatacataggaagtatacaaggtgcatcaaggggaagagcaaaagaaaactctcatctaatccaacccaatacccaatctattaacaaacttaaggaaagacaaatttaacatttaccatagaacatatttgatcatgacaacaaactcattataagtttttcaccaccagcatttttttttttgataggaaacgacaaagggatatattgataaaaaggaagtacaagagaaggatgatgaatcctcccaccaaagaaaaacaaaactacaaggaatcaaatacaagaaaatacaaactaaaaacaagcaaactctctaggttagagtttttcaccaccagcatcaaatggccaaagccataaaaatattcttcatttctctcttttgatgtagtaaagatgtaatctttcatgccagcttcctcccttgacccacaaaattggcatgccatccttgcaaaatgtcttcgattgtccaagaaagaaccccaacaagaagagcaccaaggaccataaattggaccacaattgggatagaatatgatctcccaactcttcataattcttgcaaagatagcacccattaccaaagtcatctttgactcctgatcatttgtgagaacttttccctataccaccttccaagcaaagaagctaaccttggacagcacctttgaggcccaacggtaaagatgttgcagctactaaacacaacttcttataataggattttactaagaaattgccctttctagtgacctcccaaaccagcttatcatcaaaattactccagattgtcactgacttccaaagcagcagaagcttttccactttctccctactttcaattataaaatctccacctaaacctaagactccaaccaccctgcatcccatccttaagattgcaatagtccaccacccaagtttcttatgagctgcctactttgaggaccagaaaatgaaccataataggtgccttgccaccccagaatttggtccagaggccgtgactgaaaaaaatgatggttcttacatgaaagtctccccactctactaatggctttctagaatttagaaacatgagcctccctgccaccctcaaacaccaaccttcagcaatctcatcatgcatccccattatgactcccccctattgaccatcatgcctactagccattcttggttccccaaagctactttctgaggaaagcatttttagagctgaaagccttctgatgtctggtcctcccttgctcttttcagagcagaccgcttcccacctttcctcctgctttaccttttatattgtatgttatgttatttgtgtttaatttggattttaatttcttttccagcattttttaatttgaagaatctgttctgtactgattcatcgactgattcaaagggtgatattaatgcatgctgcatatgtaatatccaaccctttgaataaaaaatctggattctttctcattgtgattattgacgagacccttggtgtcatttcctaggaaccttgatttgattgctaagattctcttcattctgcctcacccaagtgagattgcttaggaggatttaaatatgataacctaggaaccagggtgtgatttaccaagattcccttttctatccttcacctaagcgagattgcttaggagccttcacgtaattgccaaggattctcttttcttttcttttcttttcttttcttttcttttttcgtgtgtttttttgtcgtctttgatctttcatcccattatacaataaataaaaaacctctatagtgctgaaaattttatgatcctgcaggagctttggcctttctatttttattttatttattcattgtttcttttctgtctcatgcccttcatctattgtacttgttctgtttcttatcggggggagaaagagagagagagagagaggtatcttgtgaattaggaaacatctgtaagaaaaccaggatgagaaaacttgtaggagaaataaggaagagtgacagatgaagatctgtaattttgctagtttgagctttgagtcttgactctgacacctgcactcaaggttgagagtccctgttgggattaatagaatatcaccaacttgtaagcaaaagaaacctcaccacagaaatcaatatgcttgacacttctgattctttttttataggaacttactgttttacttcaaactaatgggaaatgcattcatgaagcctctatgcaaccggggactggggccttgtttattctatcctaatttgtggaatgagtgcccaacgtattccatactctaagaatcttagactaacaaacgcacatcagttagaataacaaattatacttttcttattcatgcaatctgtgcccatgtccttcttcgattcttcttccatttaatcaactgtccaagctgagcagttcctttggtgttagaaatattaacagttagtgaacatagctgggcatgggatcagaggaaattgtatggtaaacaaagttatctgattttcttggatggaaatcattgtcataccaacagtccccagtttctggtgcactacatcacttttgatacattgaaggaaaacttccataagatgtagaacttattttatcaaatgactgacatgtcagctcatcaaaggttttatgaagtttataaatcatgtagggagatggatattgtttgcaacaggcctcacaattactgggaatagagtactctttttcatatttctagttttcacctatattatcaataccaggcaaataaatttcataaagtgtgtgaagttcacagtaagctgctgcttgctttcctatttctctttccttttctctgattggaggtaaatttaataaattacttgtggcaggctgcacttgataagggtaagaacttggagcaaat

SEQ ID NO: 13406 - DNA, 1095 bp, Vitis vinifera
  Intron number 1 from transcript GSVIVT01011911001 (locus G SVIVG01011911001) derived from phytozome v7.0 (chr-ID chr1 ; pos 3050000 to 3051094 reverse strand)
agaggtgattgattggttgaactccctagttcaaggtgtgtgcaccgttttgcttgaagaaattttgctctttaaatttttttttttttttaaaaaaaaaaattctgacgcgaaggggaatttttgttatttgttctacaacattttgggattgtattttgaggaaggcgtttctctgaataagagtttttggtagatctgagtggtcttaatgaagtttatctacagaggctggtgttatctcctaaattttaatgagttgttgcaaatttttttcatttccctttggaacttccgttggtatttacaagatctacgcttctcaattaaacaaaccggaggtttgataaatcctgcgtttctttcatgctcttcaatcgagctattcagcgatcctaatccttgtttacggagtaaatctcgtttatgataattagggtttacagatccggacaggctattgggcattgttaataccatctttgaagggcagggcagtggttctttatggttcgccgtgtagacgtacagttttcgtggttcatccttttgtagattttactcctaggaagatggatttgttttcccattgggccagaagcaatactttctgtctgttttttcttctcctttgcggctcccctggccctcctgtttgatattgaggaaaacagattaacatgtttcattttataaattttcaatcttctgttctttttctggtttcaaaggatacaactctcaattttttatatttgcggcatttattcgttatgtttttcttatgatacaaaattctatgcttttgtttgaattttgatttaattgcttgaaatccctaaaaataagattgcttcagattttttggtcatctaatgataaaaacgagtttcctctggtctctgtcttttgggccagcccctttttccctaataagctggaaggaaggatttgagtctctttccttcacttttgcaattcttagccttccaaccttcttccaacattatgagttattcttcattgtatatctggtgttcatgttattgagaactgacaatggtctgggctgcaggaatattaattcaattttaa

SEQ ID NO: 13407 - DNA, 4182 bp, Vitis vinifera
  Intron number 1 from transcript GSVIVT01031118001 (locus G SVIVG01031118001) derived from phytozome v7.0 (chr-ID chr1 4; pos 2022565 to 2026746 reverse strand)
tgcaaaccggcatctctataaagagcctcctcgaggtataactgatatgcctcccttttgtgtccttgataatctttttgtgctggtttatgctacattttgtgttattgagatatatgtaatttgtttataaggacgcatgtacaaccttattaatttgcttttaacctttagattttactacatatagtcatgcagtaagttggggtagaattgccagtttatatgatgtctgaaatgcacatcgcatcttgggaactgttttgtagcttttatggctgccttgatgggcttctgtttgtgttttgttgggattttactcttatatgtagcttttcctgagattgtacctccattaggtgcttttagttagtttaatgttaggtagatactgcagaaaatcagtatgaatcatatgcaacaatgagtttatttctcaacagaaatgttgatttgacttctgtaccatcgagggactgacattttatggctaatgcctttgtcctttctatttggttaagaagatgtagaagtggttatttgcttagcgtgggttgagttcttcatgtagagactgattatgggccttaaaaacaaaaattccttaatttccagttgtagggttgcatcaattaatttgtattgccatgagatgtgtgctagggatcgagggcagtaacatttaggattcctacttgtgttactttgagatacgggcacaactgcattaacataaattttaaattatgttccatttttgtgatatagtgcttaagactcctagttgcattatgcccattgtatacatcctgtatactttggagcactttttttttgtgcttatttataaaattttatcatttgcgtatcaaaaaagactcctagttgcattactttgagatgtaagcataatcatgttaacaggattctttctttaatctgctttgcttttttcgtcaaaagaataaatgtaagtttatgctttgtattttaataattactgaattatggttgaataaccttgatatcgtgctttttttgaactctctgatcattcctgatagccatggaattacagttgattcttattttttatcatgcgtttctttcctccctctcattggatgcttaagttatttaaaaaataactccaaattttgagtaaggcaaatgcaaatgattcccaaatcttggattcatcactgtgatatggttatgtttcttggaaaattgcgtcccccccccccctctttcctttttttattttttatttatcagagccatttggatggagattcagtgttgtgaagttctcagttcaatccttgaaagatgttcttatttggtcctcttgctttggtttcagttttgctttagtggtctttacatggctttattgattctatgaggtctctgcctattattaaagaaaaaaaggattatatagggtctcactagtgtggctttggttccctttcttttttggccttttcatcctttgtatatctcctatctcctcgaggtgtgcctcttcttttaatttgtgcttattaataaatgctgcttctattaattggtgcttattaatgaattccctgtttggataaacaaagaccttatagaatgttgaatcaaataagcctttcttgacctagttttcaaaaaccttgtaaaagagctatataggtaagtttttagagctggtttattggaagaaatttggggatagattttatgttatttgccaattcctatttgcataaacatcatcaaatcgtgagagtacttcacatcagttgatccatgatgaggatctttttccgaacagctctgccacaaaaacaaacaaaaatgttttaattgagaaactgtcctttgaggttcttcaaactcaaaattctctcaactctgattttttgttgataaatgtggaccaggtagctccatacatccttcaattcgtaatcatgaagactccagaaatcttagatttcaatgtctagaaccatgctccgaataccaataatcagctatatgtgtttctatattgactgccaaggtcaaggaagttgacctttgagtccacttcaacgaagtttgctgtttctgataagaagaatattaattgccaaggtcaacagaggcaggaactgaacttttagaccaacctctatgcctatcctagattttgttgatttattgggttctttttgatgtgtgactgttattttttgtcgatctctccatctatttctctttttgacacctttgtgtacaactggtgtactttggtgtgcgcttaataattttatttttgcctgtcagaaaaaaaataataataaaattcaaacaccacaccagaacttagtccatctaccacttcccaaagataaacaactcatttttaatatgcacacccaggaagggaaaatgagtttagaccatttttatgtgcaaaataaaatttgacaatccaaaagcattagagtcaacctacctttacttgatgagtgattttatttttaattttaaatgattttcttgtgaaatttggtgtccaaacccctctaatttattaaattttagaattcattggaagagtccaaatgtgtaatctgtgttgaattcatcaaattctcaatttctgttccgatataattttgtgaatttaaagattaagatttcattttcaattttaaggccaaagacttgataatttggaatatgcaaaatattatatctattgccaattattgcccatccaaaaaaataaatttatatctattaccaataggttttatagaaaaagcttcaatccattgcttcggtcatagaaggatccttcttagaaaacattatatgaacggttataaataaaaaatattgctaattaggaggatgttgttttatgaaggatccttcttatagatataaaatattgagataatttattttgaggttagaatgtgtagataataaaataacttgatttggaggtcgtaatgtggtagtatcttatattttagtgtgtttatgtgaggtttttgggggcagcattctttgaaattatccattcttgatgggcatggtagaaaactgctcagattttgtctatcacgtcagagaatttttgcttcgtgaactgtgaatggaacgctttttaaactcagtgactgtgccaaatattcttgactcactgggcaactataagaatagtgttaaggatggggaaagtcatggaagaagtgatgatgtggtagctcctatactttcagacatttatatgagttgcatggaaaatttcttaatggcctaatagagggcatcattatgactgttaatctatcaagtttgaaagtttttccttttgtgaaagaatggtggaagccattttcagaagtatgagaagaatttgccaactttgggcacttagggacgatacaatggtcagcatcaggaaaactatagcatgccttattatgctgtttggttttgttctcaatgtcactggaaataatctttgtaacagttaattcgacctttgaatcaacttatgatgattttgttatgtttttttcagactaatcacggttttgtagtggtttctttgaagtgatttagcattggatacattcatatgttgccttatttgtcatcttttcctagtttagagaaagtggaatgagaccttaggagtgttttaggatgtgcaaaggtatttcatttattttattttctcattctttttctttagcttcaaagaacttaatgaagaaacgaaatgtatgagatttcatttgtcagatgtatactctcttgagttcccaatgtttcgtctccttcctattaacaaatattgtaggctctattaatttgtagtcttagcgaagcttttctcattcattggtaggcctcctattttatgacaaatttgatgcattatttcttagtacttgaaaattgctgaggcccttttatgctttcctacttaattatgttgatgagctgactacataaatctcacatttgttgccttttgttttactagtgaaaattgtcaagtctatatgttgcctcagtcttataagttaagcttgcgtagtccatgaaaatttctctcatgttacggttttgtcactttcttcagctccattgagtggtcctctggtgattgcggaagct

SEQ ID NO: 13408 - DNA, 2272 bp, Vitis vinifera
  Intron number 3 from transcript GSVIVT01032781001 (locus G SVIVG01032781001) derived from phytozome v7.0 (chr-ID chr1 3; pos 813566 to 815837)
aagcgcactgcaggtgaaattcaaatcttctaatttgctcttgtttcggcttaatgattttagtcgtgtggattttcaatcgatttagcatttggatttcatagaatcttcagtagtttctatataatgggaaaaatggtaatcatagtgtagcagtttctgaaaatggggcttttaatataatatcaaagaaagaaaattgattttggggcatctgaatttatttgtttgagggtgttttagtgttgaaaatttacttatttgatctgaaaggggctgatatttagtttacagggtgtgggtagtgcaagcatctgaatttcgaaactacccaattaatcggcctgtagaagaattacttatccaaaaaaaaaaaaatacatcgtcttgtggaagaaatggttgaaggattttgaacccctgttaagccttttggctatccttttcttggttgttagtaaatatcttgttgagagatgctctccttgtaatacattttttcgatgaaacagtggcaaacaatgaatcttcttcctaattaggtaaccctatcaggcctcatgagtaggcgggtatcttttctggcttctatttgtcctacatttggtaggaataacacaggcagaggcattaatcatatagcatgagttggtgaagatgtgcaactaaagtttggattaggggtttaggtttattccttttttaggagctgttagttcttagttggaatcacatttcctaatttttttttatagtaatttcttattttatttgcaatgattttctgcatacttccattttctattcctgcttcggctgtatgccttatcatggtgaaatcatgcataggtttcttccagagattggtttacttctgaggtgctcctgctagaccatttctagagctacaaatttccattaagaatgtcaagcaaactgaatcttcctgtgatcacattaatttcatccgagaaatctttcccccataaactattgagagatctacacaactatccatcatcaggcttagatttatatgtgtacattgagatagggatactcgaacatatagtttataacatattctcttataacaaatttccttggataaattctattggctgatctttgattttttttcctgaaggacctgactatttttttttctttctattttgacaagaaaggaaaatatagttgaggaaaaggatgataagatagggatgaatacacctcttagtcagtgtgcagatccatcacgtttggtggggcttgcatgttggcaacagagcgccagccatttaagttgtaggaaaaataaaaaaaaagattgttctttggcttattcattttaaagaatcatgtttaattcatggttctctatttataggttagtctctctctctctctctctccttcttttattttttattttttatttttatttttctgtttcatccttcttcctttttactccttctgtttctggtcttgtctattgaattgacatcaacctgctagtaagtttggttcatggtccaactggtgagcttttagaaaacatggtatggtacaaggtaggtatggtttaggaattccaccattttatcaattctgtttgattgtaaaattaaggtagagaaaacttttaagttgagaccaaaaggagagatggagaaaactagggaattgtatataaacatatgtatatatatttctacacacacaatgcagagcagggaagcatgtctcaaggaaacatgtctcaatgctcgtgttcaatcttctagattctttggcatgtttgatgtatatatctcaaatggtgaaaaggttgaagacagttttgaacttgattatctggcactggagacttgcagaatgtagcttatctcattacatatagactcatctacatgaaaacaccttggctaaaactctgactcctcaagtaagtttttaacagatctgagatgaaaatatagatcagagctttgagattactttgcttggctcaaaagctctctctctaacacttcatgacctctcacttgcaaggagttggtaatggtgatttaattactctcatcactacatttcttggggcttccataaaatgttctatcaatttgcaatggcagtttgaaaccatgtttgtactgtatcttgaagtatatgttgctgctaaacataatttcgttttccaagtggagtctgataagcattttgctgaaatgtcaaatgcctcaaacagggaagaagccatagtcag

SEQ ID NO: 13409 - DNA, 10049 bp, Vitis vinifera
  Intron number 3 from transcript GSVIVT01000549001 (locus G SVIVG01000549001) derived from phytozome v7.0 (chr-ID chr1 ; pos 7218223 to 7228271)
attgatagggaattggagcatcgaggtgttgacaggtccgtgttgcacaatttgaatatatttcattatcagttatgattttgtttctttatcattattttattacaattgtgttgtggcgaattattttgttaaagatcattgctatggcattttggcatgccatttttcttgctttatacatattgacggttggggatgcattttaatgcttattttattagctataattgctgcctcttgccttctaaatgctgccagtagtgattgattgatataaatttttccttttggatgtagaatatatatttttgaagagtgcttacacatgaatttaaattagaatcacaaaggctaagagagccttagggggctcatttggatggcttgagtatgcagattgcatgagagtttgtgtatccatgtgtgaatgggttttcaagttcagggccttgtggagagagatcgataggtgggactgccatttgtcagccagttagaagcagctgcaaatcaccctttgtagggaggtgaggagagttgcagttaaataccatgtttcctactcatgatacatcctccactatgaactaggaaatgagggttggtttatttagattgcgcgtttgtctttgtgtccctttgcagggggaggaagaggagagttgcaaccaaataccatttttaagttgtactctaccaccaattattgaatggaatcatttgtttttttatatcattttcttcttttagatatgaaattaggtttttaagtcctttttttaaaaattttaataataaatgttaaaattggattttgaccttgaatgcatgtgtggtattttgatataataggggtacaaataatgttttggcaagggtttgaggcacacactttaaggctttgccccaaggctaggcgttgggaggtggcatcaatgctatagcctcaacacacaagaattgaggctaagcctcaccttgttgaggcatgcaacatcaaggcctaggccttcaatatctactatgcattaacgggttttgggtttttggcacctaagtcttgagtctttagtcttgggaactacaaagtttgctgtgaagattttgtgcctcacttgttttgtagtaggatgtgagtgtaattggaattcattccgtttgatattcataatttaacaattagaactttgatattaataaaattattagttctctcacttagttacttaaactgttgaaccattaggtgcataccaagaaagaaagattgcttgaccacaacaagcctaattcattggtatgcaatatgtacaacaataaattgaaagatagacatttgaagctaaagtcatttggggaagataaggattagtttggttacttcttgatgaaacatcaaatgatgagtggctttttgagtgagattttgaatatcaagcgagtgaaaatatcaaggaagaatgaagatgattttgatgttgatgtttttgaggaagaaggaagagaaaatgtgtgttcagatgtgagtgttgggtacaagtatgtatttaggtgtttgatccttcacacctacaaattataggatacgtggatttggctaaagaagagcttaataatgggcatagacacttggatatggtataataaaataaactaacaaaaaaaaaaaaaaatattaggaatcaatcataagtaaaggtgttttttggtaagaactccccctcttttctttgttatccttatatttttccatccctaaacatttttgtaaagtttacttgcgagcaattttttttcccaatataattatctgctaaggaagttaaaaataaaaaaattaaacaatcatattctaagtacagtagtagtattcaacaaggaccccacattcacactcatgttgtgtttgtcccacacaagtacgctcagtgattttggagagtccaagtatcataccaaaaagagaatacaaaggaaataagagagaggggataattcacttagtttcattgcttactctaagtacatgattaataagtttaatttatacttatttgtcaagtaaccgagttatatacttgtatataatcatttatcttattattgatagatgaagaaaaacaactaccataattgatggataaataagaacaatgactagattttttttatattcaacactcacgagaaggatgattgaaaaattagatttaatgatgattccttggaagatcctagtaataatatttatggtagcatttatcgattagttggggtcggattgagggagggagtatttttgttttccctatcctttttgtcgctattaggaggccgttgtatacaccttgtgtactttggtgctccccttttggtgtctttatacaatttgcacttacctatcaatatatatatatatatatatatatatttatggtatggcattgaagactagctaatgaagccatgagagaaaattggtttgtgggagagacaaaggggaattaaattagaaactattaggaaagacataattaattttcttaccatgatgaggaaagtcaaaactattaattttgtctttgtttaatatttgaaggaagtcaaattggggctagagaaaattcaaaggaatctcctcaaagaggtggggcacttgtgaaaaagatgcatcttgtgaagtggttgacagtgtgcatggagaagagtaaaggagctttaggcattagatgcatttcttcacttaataaggtgcttttgtgcaagtagagttggtgataggcaacccaaagagggaagtcttttttttcaagattgcatgagaaatttgtgaagaggggagagaaagataaggtggtgtggatgggtcaaggaatggtgttttctcggttaaatcttagttttctatgttggagccatggtgctcaattcttttccttgaaggtattatttggaattcatggcccatgggttttgtttagagcaacttcagaatagaggttggtccttggcaaatagatgttacctctttaaaagcatgatgaaatctattgagttgggggtcaagagtctttctatcctctataaggctcttttatgcaaatggagttggagatttgctatggaaagagaggctttttggaaccaagtgattaggggaaaatatggggaggagcaagggggttggagttcaaaggaagcaaggggggagacacatggtgtgggactgtggaaaacccttaggaaagaatgggaagtcgtgaaaagtaggctggttttcgttgtggggaatgggaaaaggataaaattctggaaagacatttggtgtggggatgaacccctttgtgtttcttttccttctctatttgcattggctgtttccaaggatgcttgggttaaggatgtttggaggtgtaatgagggtgggggaagttggagccctttgttttctagaccgtttaatgattgggagttggaagaggtgtgcagtttttttgtggccttaaataggaagcaaattcagcaaggggtggatgatagggtgatttggagagagactaattgtgggaagttttcggttaagtctctctacaaatcattagtatcaggccatccaatctccttcccatcgtcggctatttggaaagttacggtgcagcctagagtgagtttttttgggtgggaagcaacgtggggaaaggctctcaccttggatcagcttcaaaggagaggttgggctctagcgaacagatgttacctttgtcaaagacatgaagaatcaattgatcacattcttcttcattgtgaaaaggttagaactctttgggtgctgctctactcaatgttcggggtgcagtgggtgctgcctgccacggttaaggagacgctttcggggtggaatgggtcttttgtggggaagaagaggaagggtgtttggaaagcaagtcctttgtccattttttggacggtttggaagacaaggaacaaagttgcttttgaggaagaggagttgtcaatccaaagactcaaggcttcttttgtttattttctttggtcggagacaaagaggtctataaaagatggtccctcgaccttagttgattttgtcgggtgggtggattcccgttaagggtgtggatagggtggctcttcgctccttggcaggctgctagggagcgtggggtgtttttctttctttttcttttctccttcttgtacttttagccactgcttcggtggtttttaatacaatatctttatttatctaaaaaaaaaaatcatttttcattatcctaaagttagggtgctatagtacttgccttttgctttatttggtattacttgtgttcttcctttgtcgattaaggagaccttgttaagttggcttggttccttgtaggaagaaagtgaaaaaaggttttgagagctctaccttattctgtattttataaactttgtggaaagagagaaactaaagaacctttgaaaatacaaaacaatcagttcattctttgaagagctgtttttttattaacttgttgtcttgggttaggatgcacattgtagaaaaaattttgtctttatttgagtttgtagattgggtggggtctatttgagggaggttttttgtattttccctttgttttggctaaccttttgttttccctcatatacaatccgtgcaccttggtttatagcccttttcattaagatattttttctcttgcttgcttatcaaaaaagaaaaaaaaaaagatgtgtaactgaaagaggagcattttggaaacaagtcgttagtgggaaatatgaggaggaagatggaggttggcaagtcttgagaaagtgaaatatgggaacggggttaggctgtggaaatctatcctttgtggtaggtaatgggaggagggtaaagttttggaaggatatatggtttggggatgaaccttaggtggatttatgggatcagacaagtgagggggtgatagagacaagtggcaaccacctttaaaagtttatcaaaggcgcaaaggagtgggctccaaggcccaagttttaacttggcactctctagatgataatgggcttagttgggatcttatataagtcaatatgggttcagcctagaaagtgctttaaaaaattaagttatgggcttagttaatggttaaagttaccattttcagtcattattgttgtcattttccaacagtctttaatgtggtcagtaatcagtccaagtttgtcattttcaagttgcattttgttgtgtctagttccaaggagttataagtccatagaaaagtctcatatagtcgttgattagtcttttggaggaaatcaatcaatgaatgaattttcagcagccagttttttctttgtgacatgcaaagagtacttgggtgtgaagcctaaggtttctaggagtgattcctaaggttctttcaattatactctccttgcattttattttctgtactgcatcaggggggttgttagaacctttgtttctttagccttctaaacgattggggaatggacatcgtagaggagttcttttcaaggttgcaaatggatagcttacttcataaatataatgaggtattttatcctgtttctagggcatgtcagcagatagtgaaggggaagacaagatagtgtggttaaacttaagaaacactaagttctcaattaagtctttatacgttgccttggaatcgagagaatcgatttcgtttccaacaagtctaatttgaaattcctgggtacctttttaagtaagttttttcacttgtgaggccagttgagggaagtttttaaccctagatcagtttcaaaaaaggtgttctttggtcactggttgttttctttgtaaagtcaagaaagaacccatagatcacatccttcttcattgtgtaaagatacaagttctatggcagttgctttcactttgtttcacgttcattaagtgcaagttgctacagttaatgaactatactgaaagaaaggaatcaaagatctttgattatgaggagtaagcagattgagcctcgaaaagttctttctttgaaattcatttttggagagatgtaatttctgcagaccttgaaagggtcttttatagactcgagtaacaaagagcatggtttggtgagcggagcagtctggatttagattagggagaaggaggttcaacataggaaggagcatttgaatggctgtctagttgggagatggggagaagacccaaacctaactccaaatttggttgcattgaggagatgggtaggtcatagttggactttgaaagggagactgaggatttccttgctagggggtgcccttctcttgttcgattttaaggatatctttgatgtagagatggtgttgtcaagggatttaagaaggtataaggaaaagtttttgcatttggacaggtggaccctggtggtagggtgtttttgaaaaggtgagcatgctaaggaagtgtgggtgagagtgatggggcttcatctgcacttatggtgtcaagaagtgtttaaaaagctaggggatagttgtggtggttttattgcagtggatcaagagtcaactcatcttcaacacttgcaatgggtaagagttttgttgagatcagatgggagaaggatgcctgggtttgaaggtggtggtgggcttgtcttgcttcatcattcaattgtggtgggaagtaccaccatggatttttctcaagaggtttcaaagcagtgcgttttttggtttagagattaggggtaaggttatgggaggggcatgagctgacgagagtgtgagggtgtagattccattgctgcagttggtggtagatgttgtgtcgcccagtgatgggggagagaggggaaaggttggtaagggctgatggttctgaaaaggctatggtagactgtagaaagctgtggagtgtgatggtgatgggaggaaagttgcttgcattgggggctgcatgggggtggtgtcttttaagggagccctaagtggggttgcttgggggctgaaagaagtgggctttgagggcttgaaagaggcccaagtctttaaaggattctcaagtgaagtggcccatctatctaatgcccattggaagagtcaaaagttctaatttctgaggaggtgtgtggggtgggtcatcattgtaaggaggcctatagccttcttgtttttttctatggcccaaggtggaggtgagggctctgttaacctggattgcggaactaattctaagaatagcccaatggaggagttctctttttggggcttctttcacttcttaagggcacaatttctggaattctgagttctccttgttagcggtttttcacacaagcacagacatggcccttatggtgaaagtggttggaccgccttggtactatctctgtctctgtttcttccttggggacatgggcaacttctccttttcttttttgggaatggtcttggtctagagggatgtgagttagatttgcagttgatttactgggagggagaggagttatcctctaaggatgattttggtggacgacaccttggtagagtttgaagaggctagggtaaggatgatcgaaggataaggaagactgggcatgccttggttttggtttcaaggggcagaggtgcctctgcagaattggtccttaagcaacctggcagctttcaacaactggttgggcatgctgaaagtgggatttgaggctaagaccttggctcttttcagaaaaatgaaagttaggaaagaggtaaggggctgggagggtgggaagaggaggaagaactcttcatcttcaaagtttgaaagagaaatgaagaagttggagagttttatgaattataagggatcagaaagtggacgatcaggatgtggaaatgagcagtaaatcacagcagtgggtagatgatgcttttttcatttttttggaatgttggaggggcttcggacagcgtcatgaggaagttcatctaggccatgtttggactgcagcaaccagttttggtatgcctgcgagagggttgtctaggggcaacttggttttttaggtcttttaggctttaggtttagtttggggggcaggttcttgttaccctttcctttcgcttgctgtaaggtgctatttttatgcaccatatgtactttgatgtgctttttcaagcgcttttaatataatcactcattttacgtataaaaaataaataaattatttttttgattttcttccatttctcttctctctctctctctcttgtttaagtggaggcttatgccttgcctcatttgtgcaaaatgtcttaagattgtcttttaaaacattgagtatgataaattatcttattgtcattttatttaaaaacaaatgtgtgaacctttgtttgtaagactacctccccttagggaagagaaatctctattcccttatcagctgatacaatctgctagcattatgcctaaactttcatgaaatgcctaatttactccctggaagaaataaataatggaaaaagaccggttaaaccctgaagttaattagtatgaaattcaagtgataagcctatgtaatgcaaataatatgaattttattctcaatttttttacatttcctcaaagttgaaattccattaagaaaagttccaccccaccccactccctttctgaaataatatacttctgctattaatccatttatgaaaaaaaattcccctttattttttcctcaaatttcagttataggaaagctaaattatctttttaaactttgtttgaatggaatttcttgataaatatattttggaaaaatataaatttatgtttattttcttgaacaccatattgattaggcctatggtttaattggtcttttaaatttgtttcccacaaaggtctaaataggtatttaagaaaaaaatttgggttaatgtcagtatttcactaatgttactttgctgtagtgatagaaaagaaaaagcaaaaaaataaaaataaaaatccagttgtgagggtaaggctcctatatatttttatgaaatcctaaggaaggtcaatgtattcttcccattttggtcaagttacagctttgggactgctcaaaatttttgaagatgaacttatgaggttgtttgaaacccctaattggaagcaatgtgaagggaggttttcaccccattttcaatgtgaaggggcggtccttgtaatttatgaagcctcaggaggtcaatgtaattttccttcattttttctttccagatgactgcattgggatccatcaaaatttcttgaagatgaaacttttatgtttttcttactatatttactatgaccattctaatttttgaaacccttgaagagcatgatatgtgttctcatcttctatttgttgcaatttttgctgcatttttgccccctctccattgccttgaaatatagtattttacttgtcaaaagaatctttattctgttaatttaaataactaatctatgtccttcccatgtgcttccttttaggatattacccaccagttcttccatcttctaccttgttgctgatgcctttccccttctagtatcattatttttcaaaagaatgtattggctttgtttgtgttaggatttaagccaacctagttgtctatctgttgacatcattatgtaagcagggattttctttgagttcttgacatcttttcagtggtaattccactggtttgttcaatttcttggtatataagcattgcatttcctccaagctttgtatttactccaagcttggtattgatatgtcctggcacaatttgtatttcctccatgcttgctttacatatcctgtgtatgtttatctcacaggaggcctaatgcaaatacatgcgtataggtctcaaatacatgtgtatttgctatatatcagcattgcattgtggatgaacttcgtgaattaaactagattgtcagtgtctttttaatctttcaagcaaatgaaattgtttcaggcctcagacagaggaagaaaagcttttaaaagaag

SEQ ID NO: 13410 - DNA, 26003 bp, Vitis vinifera
  Intron number 2 from transcript GSVIVT01010894001 (locus G SVIVG01010894001) derived from phytozome v7.0 (chr-ID chr1 1; pos 16161760 to 16187762 reverse strand)
tagtcaatttgatatcttcatattcaagaatcaacaaattcgattatgcattgttcacaaatttttggagcgttttttacatcttcaaatactccataatttccaatagcacgaatttcactttttatccatcttttttgggcttactagtttttaatgaaaagtgtagggttttgtaatctctccaattattgggttttataattattactagtcttctataataattataatgaagcaataaatagaagcatttatcaatgaccagctactatatcattacataatagtccccatgaattggtatcaataattcaattgggaattgttatcagccatttggatcacattgctattccttgatttgcaaatccacttttattctatgatttattgatatgtttgtatccttaaggataaatatcaaattctaattcaatggaattaccatgatcatgaattagtcttatcattaacattataagtgttactcaagaggggtattattgtctcaattatagacatatcatgatgtttttattgaagattattttcttacatgtcaattttatatgatcactttaggtctcactataaacttaaaaaaattagtaattctaagattatttcaataacttctcgatattaagaacatattaaacattgtagcttagagaaattatacatatttactttataacattaatgttatatatctcaataggtcctatttaatatataatgcatatagactagtacatctatcttagaagaatttgtttctaatcactaagataagtcaattcctttataaggaagatgatgtattacaacttctattgaattgtctgaattcataaatcatcataaacaacttatcaagtcacaaagatttaatggtttctgtcttctatatattttcatgtacacaatgtacaaaacaagttaacttattaggaaaacactcataacaacaatgcttaaaataagtaaacaatatccaaacaatagtgtgtaaagaaaaatcatactttattaatgacaacaaatgttttagaataactttgagttctagggctaatctatcgaaaagagatgttccatgacacctttggttcatttctggtttttattttttttcattgtgacatgtatgatagcttgtagttctttgaaggtttttaattttcacattgttttgtttttctatttacatccttcctagctttgcctcaaaatgtgcaagagctagctactaattatataattgtttcctttggcaaattgttaataaagtttaaggcatggagttgttatctttgttgatgtactagattagttttgcaattttgtttggttagtacattgaatccaaaacatattatgttctaagggtcatactagttgtagtcaacttcaagataccctgagagtcgaattcatttgaggttaatatgtgttgaaattattagggtatggttaattgctatggtaagtaaatgaaacgtaaattcatagatttttttttttaaaaatgaaggaaattttgaaaaatatgggtagacattcaaatgtcttttggatcaatgctcaaataccctctagataaatgcttaatgtccatattcaaatgccccccaaggatgtttgaatgctgactctgccaaattatgttttgaacacaatttttaggttttgaaatacttttttgtaaattaacttagtaaaaaccttctttgaatatctaaattggtttttgatatataaactaaggttttgtactattatcttatatatatgcgtaaggaatcttggatctttccattacctatgtcaggctcaggataagtgcctgaaatctagctagggcatctagatcctatgcaatggaagtgaaaataaaaataaaaatacaatttttaacattaaaaggatctcgataagtgctataaaattccaaatcaaattcatttcaagaagattaaattcaaagtggttgaaggtctcctaaacctatgatattctgagcacattctttgataaagattattacattattagtcactctgctgcggtttcaaatctatggaaattattgctgcaaaacggtaaacgggtcaacttagactaccggcattctacacagataaacatcgagtctatgtacttatcagacaaaatatttataaacgaaatgcaaaataagaaggaaaaaggaaaaaaccatatattccatgctctatgttatcaaaagtaaccaaagggagaacaataatacaatttggtgatgattttcccaatatgttgtctcatcgttggaattagatttctggtagaatggataggtctacagaggttcgcatgagaggaagaggggccaaatgagccaagaataactagccgtgcatgcccagttaaagcttcaatgcttgatgcaaaggacggcaagtcatccttggctcaattccaccctctctacctcttcatgcaaaacccttagacacaaaattttcttttaatctatggattttccctcccataaaaacaagtacaagagctgcaggcttctattttttgtctagtttctcttgtccatgtttctctgcagcattgttggcatttatataggcacacaaatatgaaggacgggagtgctaatatcctcgttattctcaatctgggttgacctaccacctatccgataagggtaggttctctaatgccttctcaatctgagaatcatccttattctcatacacccaaagtctttttctgatgtttgtgtgaactttggctcaaacacaaaattatatgcaccctttggtgtcacgtaaaggcacaagatcaactggtttgctgaaatggtagactcggaatatgggaatagaatcttgtgcgttcctaagagagtgttgaagcttggaatcctttctgtatgtcaatgtggattacttctctaagatttagaaatcaatttaagccctatttttaggcataaattaatgatgggaagaagtgagccttgggttatttccgcatctgtctttagcattccatctgtgcacattctctatgccaactaggtccatttatttaatatttttttttaaaaattgactctaattttcactggaaaccctagatacagtttcatagataagacagaagaattccaaagagaaacgaaagtgggaaagggctcttcattgatgaagcatcgtggggacaacattatctttgtgatttgcaggagtcctggccctttgagaaaacgaatattattcatcaaaggaataaatgtgattcataaatagcttgttggatgaagaggtctttgaccctttttgtcatatacgaatggaccacacataaattatatgccagcatgtaaccatgttgacaaatgggtttaaacttttcaaagtcagaagatgtgctggaaagtagatgtcacctcattgggtatatctaggattacttcaccttgttttaattaatagaagttgggtgaaaaatcctcgccaatcctttgcaaagtgtcacggtttaaaatcatggtatcggtcattgattcggagggttttgaggcacattggtatcggtgtcttggttcggtattgggcgatacgcaaaataacttacgtaataagttcaaaaaattataaaaattataaaaagtatttttaatataattaaataaattaagaaagtaataaacttaataataaactattgacataataataaattagataattttttaaattattaacaataaattaacatataaaataatacaccttatataataccattaccatgtaaaataatatattacctaaattaaagtcattcataccatatttaatatataaaatactaatttttaaatttccaattccaaatgtatataaagtaaaatgatgcaaatacatgaacatttgaaataataaatcatttttatataaaacaatacattaaaccattttctttaattctcaatcccaaacatcatttattcacaccacgggatacctggtttgtagaagcaaaagcctctttgcagtagatagccaaacaacagccaaagaacactacagggattgagcaaggagagacaacaccaacatgcaaagatcatcatcgatgaaagaatgtgatgtttctcaccaatcggtcaccacaactacattaccaactcgaagctttctttcttcttcttcttatacttcacggttatgggccttgaatttttttttttaagagaatctctcatatttattagagatttctcagttttggttgccttttgttgtgatttgaaagagacttttttttttttttttggtttaatccgagaatatttagatcttaaacaattgaactcgtaatttcgaccaagcccactcagaatctcaactgaggcgaccatgtttaaccgattcttagttgggtttgtgttgaagatggtatcgggtatcggactcagtgcggaaaggtttgaggcaaatatgactcggcctagtagtaccagactcgaccaatattttgaaccatgcaaagcattactaattgaaatacttcattttcttacctctttctattaaaattgaatacaaacttttgtcaataataaaaaataaaaaaaaacttaaaaatatagttaaaactaaaaaaaacagaatttaaaactaatattgtacatatcctataattctacaaaataagaagatcttaagcatttcaagaaaaccaacaaaaaaaaattaaaagttgagctaaaaaaaaataataagagaaagaattaagccttcaaaattattgaatgagttaaaattaagataataaattcataaaaaaataaaaataaagtcttaaaatttttttggagaagtaaaattaagaaaatgcgatatgtatgagaaaggaagaaagataattataaagaaacgatatatttaaaatcaacactacatttttttacatatttcttgttttttgttttttatttttaattttttaattttttataagtaaatcaaggactttcgctgtgaaagttgttgactccattctcctcttttctttgctctataatcccttgcttgtgcaaggtacacatgtaatttaattgaaaccctcttgctagtgatgctcacatgcactttttattcgtggatttttggcaaaaatactactatttttaaaaaatatttattaaaatatgaaaatttaaaaaccatgttcagatctattgtacttttaagatatcaatttaaaggtgaaaagacaatttcaagatacaatttttttaaaagaaaactttaaaattaaattaagatcgacttttcaaaagataattttaaattgaattcctttccattaacatagattttgcaaatattttttaaatcatcatattttaaaaaatattgtctaaaattactatattttcttttaaataccctctatgtacttcatttatctttccgatcgcatgtttgtttgcatgaacttaatttattttcaagtaaaagttgttgattgtgaagtttgaattagttttgttatactttgtttggaatgttaggggtcgagttctttgttaagctcatgatgatcaagttgcttgatcaacttataggagttgaagcgggtaatatcccttgattttttttttaatgtaatgaataacgagtttgcctttactatatatttaacccttctatattttaggattttatttttaaaaagtgtaatcacaattgagagatttttgttttgtttgtttgtttgtttttttagagttttatcattgtactatttttttctttgataaatggattgttgagtattgatacatttcatggacgtagagatcgattattaaaccacgttaaaatatcatgttttttaaaaattttactctgtatgtttgcatggttctagttaatagaagtttccaatacaacatttgtgacaaaagtacaacatttagagtaaaactaaaacatgagcgaaactcactatcatttttaagagacttgtgagtgattagctaggttggcaattctgaacaaaatttctaagtgtaccctaactcggttttccaattccctttcagactacttaacctttgaagattaagactttgctatgaggctaaggtatatagttgagtgtgtgttgaatgaattgaatcaacattgttttgcaacatgttggttgccttaaattattttaaaaaatgttagggaagttgagagaaatattttttgataaaagtagtaagttcccctatttttggatcgatccatgtgcaagggtagattgatccaactaacttgtttttaagatcaaatttcagccatatattaagggtttttttttccctttgaaataaaaatttctcccatttctaggaggagaaaccgcaacaactgtgagagagagctcctcattccttaccattttaaggttgtgtgcatactaagaaaatcccatccaagttttccaagaaaattttaaatagattttctgaaaagaaaaatgagttgattccttaaacattcatttctcattcttttgggtttgtgtaaaaacccattttcttcttatgttgattcaagaagaggtcgagattgagcttggtgtggactccaagtgtgctccacaagaagaaggtgagggctgaaagtgaaaaatactagtcaagtggttcgggaaggattggttggcttgggctaagtaaaaccttgtatttagtttttattctttatattggatgttttcaatcggttgtaggcctgtggttttttatctcttcgaaggttttccaagttaaaatctgatgtcaattgtctctttttttcactcgactctttgatttattttcagtttttgatatcgttggttacttggaaatatatgttgaatggaagatatatgagtcaaaataagtgtgattatccatggaatatcttcaagaatttttctcttcattttggttaatgatatcttgtagtaaattgaaatgagttaaaaagctaattattcttttgaattaattttgagtgttgaagcatttgcaaatgaattgcatttataaattgttgggagagtgttggtgcatacatacttgcttatggattttatgctgtgttgaaaagttgttggaagagaagtttattgacattgagaaattctaaggttaggtaatatttattgggaaattatttttttatagtttaacaacatctattcaccccactctaggtgtagtccattattgaaattcacctttcaagactaatggaagagaaagagaaacctgtgaaagaaaaaaacatttctatcatgacaatagtcgtttttttttcactctctcatatgacataaaaccttatatattttatatggaattatatatatgtatgtatgtatgtatatgtataaatatatgtatatatacatatatctatacatatatatacatagtgtctactgcattttgtattatcgccaagtggaaggagaaaaaaaagaaaaaaattagtagtactaaaaatattaccttttttagaaaaccccaactaacttaatcatcggaggaggtgatctccaagtaaaaccaggcaagccttgtgtggcaggtataaggaaacgtgtggcgataagagaactattgcttaagaaattctcagctccaatatgcacgacagacggatggagtactagtataaaaatgcaatcaaagacatggactgcaattcccacatctcatagcataacgtgaagtaaatccaaaaccttagaaatgatgagctttctatgcaaatgatgcatttattttacgtataaacaaacccatctataaggagaaatgagcagaaatccaccaaaaattcaacacacctatatatatatatatatatatatatatatatatatatataacaaaatcaataagtggtgaacaacatagggcattctttggcaagacaacgactagaacataatagagtgctaaaagaagttgcattcatatacctttcagctaccgataggtgtggagatcgcgggagcactttttggtcacttcaagcggttattacctcaagtgttaactgtctccactattcctcgtgaattgttctcccacgttctatttcccactttacctgttggttatttgagttaactgtgtcattaggctagttaagcttttaatcttggcccaaactggcttgactcaacagatagttttttagctagactcggtatccccatttacgggggtgcccacaattgcccacaattttttattgacctttggctaaggttaaacggaaaattattttttattttaaacggtaacatattttccttgattttatggactttccaatttttgtattggatgcacataccgatgtaccccccggccgcctttgggggtttctcttgccccctagtggcgacacacataccatggtttttcaaattccaaaacttaagatatctttcattttggagtctcaacaacaccattaccacaccgcgacattcttgttttttcctcttccatttgcatcaagctgtcaatcctgggtttattgatgttcaggtgaggaaaacccatatctttcatcatatttatatactagttcaagttttgattctatttgcttcattcatattcctgttttcctagataaagagttctcttattcgtttggtcccttgaactctgcacgaaagtgcacttagaaacctctttctagggtttccttctttcttccttttcctgctagcagtgcgaacccttatagaatgtcaaaacaatatgaaggttctgtaaaaagaaaaaaaccctagaagggttcgtcctcaaacaacacaaccgcgtttcagttcctattatggaggattcagttcctattatggaggattttgccactaatgaatttagaagagattttaatattctagacaatgttgatatccaactattgcacaacaccacaccctttccaactgatacacataggaaattcttcatattcttcactagggaacagtgtcatgtcgggttgcgcttacctttgccttcattagtgagggagtttttgcactatatccaaattctgcctttatttgtccattcgaactcaatctgcattgctctgttttaaatcagttattcaatctcgagttgtccttgcttgagattcttttcatttacactattaagctgaacaaatgggggaaattccttatttctatttgcagaaggtagttgcaactaatcacgaacctgctgaattttgggaaagactgggccatcaaacacgtgattgtttatggagaataagaattttcaattctagatcctcatgatccttaccccctaaatcatacccttaaactacctagtaagtgccctaataccattttattattattattattattatttatttttaattttttttaatatctgtctaatctggcttccagatagctaaaaactatcgtggatgcctagtagagtgggtggaaaaaccttcccaggaatggtttacgaagttgttaacattgatttcaagcaaagaagcttttctcttttacttaccaagaccaatcttcaaactgtactctcaaactcggaccctttcaccctttaattttttccaaggattgcttctagcgacctaatcctcttggtgcattttgttctaaaagactttaaagtacacaaatcttctagctcttttgacactagcatggaagatattgggaagggcgaacaacctctcccaccaacaactgctcggcaaactactcggcctggtctctttgtcataattccactttctttgcttgagcacactcctactcagggctcgccttctactgccccaacaaacttgccactattggtactagacagtgattctattgagtagaacaagccgactcctttgattgcagacggcatggacaacatagaaggtgaggccgttgacatctttagccaagttagagagagagagaaaagactagagatcaacccatttaagaccacccaaccaaattttggcacgtttcaaaaggcaccaactacacaaagtgctttaccggatactacttcacaaacgactcctcatggcaagattattgttcccagcctgcgcctaaggaagaatctacactctcacaagactggtcccatttcaaccgaggaggtaggagaaatcctaaacttgtactcttcttttatcattgttgatcctcctttatcaaatatgggtgttcttttccctactactaagcagatcaccatagaggttcttgaccagccatacttgaactttattgaaaatgttcccattagggctcctgtttaggttgtttagacggtagctgctatctaaggatcgaatgaagatcggattatcgaaatggcactatggtaaatcgagcacacttttgatactcttccttaaaattcttcaatacatttaacactatcatatttatttaccaaggggttgctagtgttagagacttgaaacgctggcttcaatctgccaataagaagttggaggctaccaatagacttaggcagtatgctgctgaatccatggccaagcagaggaaccttgagatggagttggtttcagctaagtcacacacgacagaacttgggaactctaataaagtctttcaggcctcaatctaaacttttcaaattgagtgcagggacttgaaagaggatcaaagaaggaaggtagaggagatataatggttccatcttcaaattaaccagtcacaatccacactaaaatctcaacatgcaaagttaattgctgagtacaccaagcaagtggagaaaatgtatcagtatgtgtactagcgttacaagaaaaaacatgctatcttgaagactttgataccaacgaggactttatcaccgaagatgaatgttctatccctaaaacctcaccactgggtgttggtaggactaacaagagagtgaggttgactactatagacgaggatgaagctgaccttgctagggtgttagcctcgttggatgcttctttgtgaaaagatatcaccctttgcttgtatgaggtttctcctctatgtcacatcaacgatgcgcctttccttgttgaactgataggtgatctggatgaccaagggaacgttctagagaggactgaagaattagaacccctaccatccgacttgaatcccattacactcattgatgacctagaagaatgaactgaagtcatagttttttttttttttggtaaaaacttaacaattacactagttctttgacctttgacgagttttactgcttttttcttcttcttttttgtcatttttaaaaaatgtttgtaggatctttcctcgacaataggtttttgtgctttgcttcttttgtccctactttgttcagggattctttgaagctttttgctttcatcaattactttttgcccctactttgtttggggttttttttattttataatattgcatctatcctttagtgcattttgctagcatgcttgcactctttacttaatcattggatttttattcaaggaaaataccttttcttgtgtgaaatattccaaggacgaagtaaacatttcctgattattttttctaagtagtaggctcctctatgtcctatttttattacactgtagggaccttcccaattggcttgcaatttgccaagctcgagatctgccatattctcaaacattttccttaagactaagtccacgacttgtagttgccgcggttttgaccgcttgttgtaataccccatatcttgatggtgataagcatccatttagatcagagctatctcattcaattcattagcccaatctagactagcttcgatatattggtttcctactagttcctaggttatttgaaacgttggcattcctactttagttgggatgacaacttccatgccataagctagggagaaaggagtcttcctagttgagtgttgtcgcatggtttgatgtgcccacaatactctagacaactcttccaccaagtacccgtcgactccttgaagtcttttcttcaacgcatcaagtagagacttatttgttgtttccacttgcccgttagcctatgggtagtgtggtgaggaatacaggttcttgattcccaactcagcatagaattttttgtaattagagctatcaaactgtggcccattatttgagattatcactcgtggtatcccaaaacaataaatgatgctcttccataaaaacctggttacgtcattatcttttattgttgtgaaagcctctaccttgacccattttgtaaagtagtcaattgccaccagcaaaaatttcttttgggcaagggctattgggaaaggacccattatatctattacccattgtgcaaaaggccaagtactaaccaaaggagtaagggactctgatggtagctgggggatgtgtgcataccattaataactgtcacacgtccacactaactcatgggagtccttatgcatggtaggctagtagcacccttgtgtgtgggctcgatgggttgcccgagtccacacactccttcgtgcaattttgaaaggatatacttcgttttttctaggtttaaacaccttaaatatggtccattataagaccttctatataattgacccccgatcatgctatattgtgcagacttaatcttgatttgatgtgcctgaagttcatcatctggtagctcccctccgtccaaatacttgaaaatcaattccatccaatttccatggatatcataaacttgatttacttgttttctaggattgatgggtcgtcttggtaataaattgatagaattcttatttgcgtgacacaaataaggaaactgctaatccaactaacgcatctacttggatattcttttccctagtgatttgagtcaccttccactcactaaatttatgaagctggtttttcactttttggaggtactttaccattctttcattctttgtttcatactcttcttgcacctggttcaccactagttgtgagtcatttcgtatatcaaggtggttagcttagactaacaatgcgaggcttacctcaacatgtagagcttcatacttggcctcatcgtttaaagcatggaagcttaaccagactacctgcctcaaacattctcctatggggaattgaaggacgagtcctatccctgtacctacgccgtaggacgctccatcaacatgaagaatccacttttccactgtcttccagtcaaagcaatctacaggattaggccacttagcgataaaatccacaaggacttatcctttcaatgatagacgaggtaaatactatagaccaaattcacttaactccacaacccattttatcaaccgcctagataactcaagcctaggcaatatagcccgaagaggaacattggttaagacattgacttggtatgcctgaaaataagggtgcaacttcttggatgccatttgcagtgctaatgacatattttctagcatggtgtagttctggttagctggcaacattgccttaccaacatagtaaactggtaactgactcccattaaggcctagcttaagcaaaactgcattaactgctaactttgacactgcattgtacatgcataatagatttcctaattgaagactttttaaaattgagggtgagaccaaatagttttttatggctaagaacgtttcctcgcactcaacggtccactcaaaggctttggcttttttttttatcacattaaagaaaggcttcagatggtcagtgtgctggtaaataaaataggccattgcaaccatctttcttgttaaatgctgcacatcatttttgctttgaggagatggtagttcttgtattgcctttgtttgagcaggatctatttcaattcctcgctctgtgaccagaaaacccaaaaacacaattagtaggattcaatttcatcccaaagtgttgtagcaagtcaaaagcttgctgcaagtttgcacagtgatcctcctgtttcttgttttttacatgtcatctatatagacctctaccattttgcctagcattggataaaatatttttttcatcagtctctaataagtggtctttgcatttttaaggctaaaaggcattacattataatcaaaagtccataatgaggttatgaatgttgtcttttcagaattaagagggtacataggaatatggttataacaaaaaaaaacatccataaacaatatcatcttatgccttaaagtggcatcaacaatttgattaatgcatggcaagggaaaaatatcctttgggcatgcctcattcaagttagtaaagtctatgcaaaccctccatttaccttcatttttcaacacaactaccacattggctagccggtctaggtagtaaacctcatgaatgaatctcacatcgagcaatcgggatacttcaagctgaattatctgtcacctctctgaataagtcttcttactttttattggataagcttcaatcttgggcgaatcccgagtttatgactcatcactttgggggatattcccgacatgtcaaaaagttcccaagcaaagactctagtgttcaaattcagttggtttaccaattgttgccttttctgctctatcaacatagtattgacataggcaaccttctccagtctccatttttatatttctacacaaaccagcgagtcaacgactagggacactcggtcatcttcgtccttcaataattgttatttctattgggactcgtcaatgcgggcattttcaatttcctctctcacaagcaagacatttacttgatagcattgcctagtagctagttggctcccaaataagtccacttggcccgttttagtaagggagctgactttttagtgataacttaagggggtagccttcattttgtgaatctatgcttgtcccaatatggaattttatggggaagggtttgacatgactgaaaaacaaacgtttagggccaacttcaatcgacaaaattatctgtccccaagtccgggttgttgatccattaaaacctattagtactcggcccaggtttcctaaagtggagattgggatacccatatgcttataagcggagatgtgaggcaaattaactgaacttcttgggtcaaaaagtactcgacagacttggaacccgacaatttttagtgacaaaacaagagcatcttcattcgagattgttattcgtgagagatcctaggtgttaaatgtgtcagccctatctacaggctccattgtccttggtacaaagaagtagtggtctataacaatcttctccacgttactcgcttcttgaatcattacttgatgacgacgctttgattcccaacgttgatcaataagtcctttttgaatgacatgaatgactggcagtgctcctcatggcaggatcaagttggccacgacttactcaatactcccagtagacggtcgttcactctttttgacatactgagagagcaaatcgactcttactatgtcttccactagataaagaaggtgttgacactcatcagcggtgtgtccatgctctttatggtattcacaataccaagtttggttccgttgcgccgggtcacccttaagagtgaaggaccacctaaagccgggtagactagtcataattggaagtaattgcccataggtcagattgagcggggtccatcatcggggtagtctttggccctcttcacccctgtgtggcttcttgccttgtgaggggttccccgagcattagtgtttattccctgtatctttttttgcctgtgccgcttgcattgatactgagatgagacttgttgtagcatacaagtcctcttccaacgtaacatacttgttggcctttctaaactattcatcaatcgtctctagtggtttcttagagactaaaaaaatggggtccttggcctaatgctacacttgaaggcttgtagtagagcatccatattgtatgtttctacttggagcattactgggccaaacttgtgcatgaactggcataaagcctcactttctgtatttttcagattctgaaggttgctgatattgaacttctgctttactgagaacaaataatgagctacaaagacttctaacatctccttaaatgagtgaatggaattagggagaagttgattgaaccaggctagagtagtgccttggagactagtcgagaagactttgcatagaaactcatcattgtcaatatcaagtgtcatcatttgccaataatgcattaaatgatcaaacgggtcatacgttccatcatacatgacaaacttaggaatggtataccctctcgggggttcatacatcaaaatatgctgggtgaatggtgttgtcatcatatcattcaagcgatgagttgtggctcctagaagcaacttgttcgatcgcccatgtgggagctagatcgccgaagatagaggccaagccaactctcctacggcctccacacaaggcaacctcattgttgtaagctgccgggatttgaatatactagggactagggtccccactgggaagtgttgtctgcctcatcaatgccttcaatgactggcattattggaatcctgagtttagatgggcggtgttccttgtgtgagattaaaatggtgtggggaacttgaccaaagagacctgcacaatctaaaggttccaccacgtcattattgtcctaatggtgcaagtgatcaagattacttgttgattgatgcaacacttgaatgtgagcacattgatttttgagctgtgtccgtaacaaggcattctcttaccttagcaactttgtctgagcaacgatggattcaattcttttctcccgctcctcttaacgccttttgaaatccataggaataatttttggtgcggtagccctctaaggagttgttgtactaattgaatcccatggttgactgactatctcctattgcgaagcttccaactccaaacaaaaatgggggtctattttcagctcaaagtaaaaaatgttactttaatgtagaacctttctatagacggtgtcacttgttggaactgagaatttcttgagcaatagtcctcttcttgttgtgcgcttccttatacttgccacacaaggcttacccaattttaccccgggatcacctcctctgatgattaagttaccaagggttttctagaaaatgtaatatttttagtgctactatttttttttctcttggacttgccagttgcattcatatacctttcaattaccaatagacgtggagatcgcgagaacacattttggtcactttaagcggttaccgcctcaagtgttaacttcctccactactcctcgtgggttgttctcccacgctatttcccactttacttgttaggctatttgagttagctgggccattaggcttgttggacttttaatcttgacccaaactggcctaaatcaatggatagttttttgggtaggttcgttatccccatttacgacgatgcccacaatgcatgctaagttttaatgagaatatcgactttggtcatatccttctgattttggtaatcagtatgagtatggtattgatgcctccatttgtgctgccaccttgctcaaatttagtgtaaaatatccaattaaatagagtcaatggcaccaaatgttcactttgatccaatcaaacaatttagttttctttattagttgttaaattgaactgtttagatacttaatttacatttcctgatcctcacattttcaaaggtcagcttacaatgccacagtttatacatacttgttatgattaatattaatcattcatcaacactttacattccttccatacgttactttacatgctcaccaccaactcatggaactcttaagattttcagtgggttgaaaattctaagctttccattatggaaaatctagttccagtaaggtaacatcaagatggataaatgagtgcattttaaaaaatttataagaattaataattcaattttaacctatgagatatcaaacataattattatgataaaataatcaagataatcacataaataagtaacaagacaaaaaattttcatgaaaaacccttacactaactatagagataaaaaaccacgaggtttaagacttctaatctaaatctactatatgagaacaagttccacaaatttacttgattgttttttactcttcaaaatctataacttgttccacgttcgcgacgcaacaaccttcaattgctctagtgaatgcacttcagccttgttaaagggagacatgtcttcaaacaaccctaaattcaacacttgaatctttctatgagagattgagaatggtgtgacaaggtaaaattgatctctctatcaatccctctaaccctgaaagggttataatgaagtatgtatagacataaaagccatagggaatcgatatttcaaagttttcaaactcgatttgtgtgaatatttcaaaaatattctaccatattttgcacgaatgctcgaacgcacttaccccacttgagtggttcctcaatttttaaatatttaataaaatatttttaattttagaaaaatgtatcaatcccatttatatcctttgatcacctaacttgccacaagtcaaaccttttagacatacctatgactttccagtttgatgaacaacaatcttgtatcttcaatggaaagtaagtcattatttataaagtttcttaagttagaaaataattggaacaaaattaccaacaaataaaaatgatttattgtcctcacacattcctctttagttctacatgaatttgaggtcaaggagagcttattacttttctgataaaactattctttgattgagagcatgcatttgttttgtgaagactttgatttttggaagtatgattgcaaaatgatggttctgcttaagaaggaacctgcattacacacttataagcatcaaaattaagtgtgaattgattcgactcatggtagcttagctttaaaggcgtatcaacaaaatttataccttaaatactattactaaagtagccaagctactatagcatagtggttctaggatcgttcactgggatgggttttcacttcacaaatgatattaattcaaagatgaattggtgccttttcatttcaaggttagctttaaaagaaaacataaagatgtaaatgttttagaaagatttaaactaatctaagctaacattaaagattaaaatgaaagggtgtaaaaacaagtttctcaaagataggatagctatgctctgactcttatgcaaattggaaatctcaggataggctcctcgcgttagggttgcaactatggtgatgcttgcttcccgaaccggtatggatttagcaaatcaagttttaatcctttaaaatggcaaaacagatggtagtgaatttcatcaatggttattcaccttagacttcctttgaatggctcgtaagagataactaatggtctaaaggcaaaagcttaccaaatattggcaacttaaagtcattccaggtgataaactcacctttcaatggtcattgaaattgattctaacagattaatgcaaaacttggaattgaaaacctcaccttccaatagctcgtaggagataactaatggataaaaatccaaaagcttatcaagtattggtcgttggaagttgtccaaaggaaataaaaaccaaactttgcattaatgaaccattaatgaaaaacgactaccttaccttccaggtgcgagaaatttccatgggattgcatccaagtcatcacataacatccatactttgagaaactaaaagttttagccaatcatcctctgaggaaaagccctcagaggctgtttggctactaagaaaatagaaatggggaagaacaggagaagagagaaaaaacagagcaaggctctgtatattctatatattgatctatctatattatagtggatcacatgattacatgattacatgattctcgagaacaagctcccgagagctatatataaagaaaattacaaaacaaaatatctgaggttattcaccccttttccaaacttgataactaaggaatcctataattggtgggttacaaggagaaaatggggatttagacatcaaaaaatctaaagaagaatatctcacaatgtcggtcgcaactatcgggaagcttcaggagaacacccgtgcactgtgcaaaatggctgcgaaatcatttcgcagccaaaggctgatttcgcagccctgcgaaattggccttcagcttggagtgatctgcttccaatggctctaactccttcgtttcaactccgaatcacgcaccgtttgaagcattaaattgttgacttcttgatcttcgaaacgacatatagaatgtataaattcgacttcaggaagtgctccaaaagtggctgaaatgactgtcatcaagaatgcttcatggcagatattctctttacttcccctccttgcattccggatttgcttatggcaaaggacttcaaagctttggttcttcatgtttttgagctttccattgctttgccatggattccaaataactctcctcaatctcatattgctttggtgatcaaaaagctatcaaaacaccaaaacttaacacaatttgattagaattgattgcaagggtccttaacatgccaattgagttaaaaggtaataactactactcaaaattgtttaaaagagttaattacaagctatcaaatagcactttttgagtagtaatcatgaatcaagcacagattttcttaagaaatgaaaagatgagagggaaaaaaagggaaaacatcttcattccaataagtaatgaacaacttcatcaatattgaatcaaaagagcaggcggaaaatatgggaataattcatttaaaccctatttttggggaatttccctagtatataggtctacagaggttcgcatgagaggaagaggagctaaataaggcaaagacaactcgtcgtgcatgaccagttaaaaccttaaataatgacaaaggatgacaagccatccttggttcaattccaccatctctaccttttcatgcaaaactcttagacacagaacaaaaaacatggaagccaacaattttctttcaacttaaggattttccaccactacaagatgtacaagagttgactgttgatggatctttgcagcattgatagcatttatataggcataccagtttgaggcaggggagggttgagattcccattatgttcaatctgggttaaccaagacatatgcaccccttggtatcgcctaaagacaactaactggttggatgagatgctagacttcaaaatatgggaatagaatctcatatgcttctaacagagaatagtgttgcttagaatcctttttatatatgccaatgcggataacttgtctaaaatgtataaatcaataataagaccttgtttaattttcatttagggtcaaagcataaattaataagaagtgaggctaatgttttttctgcctctgtccatggatggcattctctatgcctacattctccatgctaattaggtaaaaaaaaaaaaaaaactttgcaatctaacttcatttgaatcattcaatataattatgaagatatgggaaaggaaatcaacaaaaataaatgtttgagaaaaaactattttgctaatgaaaggatgttgcaaatgcattcatctataaagtggtttttgaccacataaacttgtatcatgtaaccatgttaaagcctaaaaggtgtgttgggtaatgggaaggtccctgcattgtagataatccatttatgttacttcattttcttttaatttgaagaaccttaggcttggttgagggtattgattttgagtgatcaaatacaatggacaaataaatttgtatgctacatatcaaggatttttcaattaaaaacatatctagacttgaatccacatatctttgctttagttgatgtaggattaattaatccaccacaattttgcctcaatcatcaagaattttttgtcttaatgctacccacttgtatgtcaattttagaagagaatggtagaaaggaatggaaaaaggtggtggcttctttatgtttggctatcaaaaagtgcctcgaatataaacataagggttctttctatggattttagggtgaggaaaaaaagaccacactgtgattattgatctagccttagcctcgactatcatgatgcactcaagaccacatggtacaccctaatcttctaattattcaataaaataattacataccttgattgaatagctcaagtagtgaacattatgacccatagaattttccaaaaattatatattcaatcttcactccactaaagaaaattaattgaactctagtcacctataataattataatgaagccaaaaataaaagctctagtcaatgacctattatatatatcattacataatattccatataaatacccataatccaattataaattgttaacaaccatttggattgcatagttattgcttgatttgcaaattgacttttattctttgatctattaatatggttctattcacaagggtaagtatctaattcaaaccttagtctttgttgatggaattcattatagaaagaatgaaagaagttgggtacatcaaagactaagaccccattaactaactggtctctgcaccaatcttacccacttagatctggaatcaaccattagcctactagaataataataataaaaaaaaaaaatctaaatccccccaatctagctttgcaagggaacccctatagggttcttcaattcaaaaggtagtgtccaccactttctttttctttatatgatgcccaaaaacaaaatactaaacttggtgttcacatgaaggtcggggagctaaaagaagattggattattgaatcacgaacaaaatgtttgtcattggttctaacaatttaggaaagaattttgttactcaaacgagagagaaacaaagagaattctagtctatgagacccatcactcaaaataaccttagattcacacttagaatccattgtctttgtccttaaagtagattatttggcatcttcttcttctcctttgctcctgaaaatgtcattgctattttttattttattttattaattcaattgctacagaaagaggtctttactttgatttgatgtggatatcttagcaatgttcattaccttcctttggactataaatatgtcacttgtttttactagcatcaaatattttgattttatcatgctaaagagccttatttatcccatgttaacaagaatagatgatttgtcttaaagagtcattattccaagatgagaagatagataaacctagtctctcgagatgtattgagatagaaccctaaaaaatattacatgatgtaacaaattttattcattaataagtttatttatttatgtttttagttcccttgtatcatctctttttacattatatatgactagggcgcattaagagttataaagaatatctaggtcaggggttccttacaaagtgataaatggtttacaattagttcatggatttgagcaatctagtagagactatagtggatcacttcctaattgaagggatgacttgttttggttatttggatgactttcccatggtgagtgtactaatatatatggttacacgttagacaagacttgtggtgaatcatgacaatattgatcaggtagtcataattcaccaagctactatattggatggactctcaatcatgagaggatcttgagcttgcgtttaaatcaataggagactttgacatatgggtgagaccctaaggtggttgtatattacctatggattaggtcactattgataaaggctagtgacaacaagtagtctcaataaaggcacatgatatctcatgagattaagataaggtgtcctcttgggagatcctaaggatatgtgatcagaaaaactatggttttggtaattcctttagtggaatttgacatagcctttttgtgagccagaatatgtcaattgatcacataataggaggatctgtaactcaaaattggagtggtgatcttgagaggttgataacattacctcattagattatggatactagttcatagggagtttgcatgtagtgtgttggcagatcagagggttggccacgtccatcaactcctcttgtgttcgccgtgggcgcttgggtgaatgcactataaggttagggtatgcgtcttttctaacagcaattgcttttaggagagttggtagcgcctgagatcttacatagtggatagtaggttatggacttaagctttgcctcatagtattatatgggatattagagtacaattgattttttttttattggaatgttgggtcaacttcaaaattacattctaagggagctggtatttttctatggatcatagtagtccctgctcaagttcttgtttaatggtggcatattgggtttgtagttcataagtgttcataaaagcgttttagtaaaaacataaggttacactagatcttatgaatgaatttttttagattggactaattaattaattgaagcccaatagaactcattaattaattaggcttaagtgggctagattaggtgacccaaacccaatttggccttaagtcacttaaacccataggaaagcctataaatactcccatagggttaggactttagacttttgccattgtctttcatagcgagagagaaagagagagcaaaccctaaccactctcaagaaagaggaaactatagatctagttctcttatgttgtgtcaaattctatgaagtgagagatcccatgaagattgttggataggtgagacctaagacaactataacctatttgatatcttcttcgaatcagattcgatttaggaaaatccaaatcacaagactcgtttttttaatctctagttctagtattgtttaatggttttgtttttcattgttttccgttgtggcagatctacagagccttaagcttagattgtatgcaccttacatgattcaaaacttaggagcagagtaattcggagttcccaaacaagatgtccttgttcttgccactaaacaagccaaattgaaacatatcgatggggaggagagagatttagggattgaggatgcctataagaatgctatttttctatagatagattaattgggtcaactagtcaacaaagagaaagaagagatcaagtacgacatgtaccaattgatattttttttaagcctttatccatcaaacataagagagatatttggttgcagtggaaggttacacttgaaaaccctattctagctatctcaaaatattgttttattaatgcaaattctctctttctatttgtctaatgccattgcctttcactcttaagcaattattatagttgtaacacccattgattttgcaccttgaaacatcttgagttgagaattcttctcatgctttcttaatatatttaaaattttatgaaattgtattatagaattataaagtatatgtcataccatatatgtaataatattataatataaagtaataaaaaaattccaaatgttcatgttcaatatatttttctaaatttatattaattatatttttttatatattcatattaattatatggatagctaagaaggaatggtttatagctaagataccaatagtgtactatatacatgtaatatttctagtgggcctagagtggtttatgtaaaagattgcagtataactagaaagatgtttcaaataccacacatgtattaccagtttgatgtgtagcccatttgatatctttgtatccgagaatcaacaaa

SEQ ID NO: 13411 - DNA, 3747 bp, Vitis vinifera
  Intron number 1 from transcript GSVIVT01024014001 (locus G SVIVG01024014001) derived from phytozome v7.0 (chr-ID chr3 ; pos 1742389 to 1746135 reverse strand)
tcttttagtaagtagattgattgagaattcatcctaaaaaagaagaagaaaaaagtctattttaaagaacagggatttatttagactctagtaattaaagggaaaaagatggtagaaagaaaatattaagggcttgtgtggtaataatttcttaaaaccatttttcgttctacatgtctggcaacgagaaaatagttttatagttttatgttcttaaaaatagaaaacatatgttttcaaacaaccatcttttagttatttttaattatttttttaggatggttttaaaaataattatatatataaaaaatcattaaaaataaaacattgcttataaaagttactcttaaaacatgtttaaaaacataaaagttactcttaaaacatgtttaaaaacatagaaaagatattaaaaatattttagagtctatttggtgaagtttttaaaaacatgtttttgtttttaaaacttcattaaaaataatagaaaaacacactattatttttcttctatagaatcattattttttttattaggcaaattaacttcaaattaaataaaacttaatatctttgatttgttaacaagtctattagttttaaaaagtgatttaaacataatataataaacttattaatactataaatttatgaacaaaaattggtttaaaacaactctattgtttctcttctatataaaattattatttattgattttttttttcacaagacaaatgaacttcaaattaaataagacttagagcccgtttggcagtgatttttaaaagtgtttctacccttaaaaacacttttaaatgtttttgggatgaaaataaagtgtttggaaaattttaaaaaacacttttgaaaatctggaaaaacacttgaagtgatttttagagaatcacttgacaggtgttttttttaaaaaaacacttcaatttttttgaaatattccaaaaatgccccccgtgataaatcaattagaaaaatcttttttttttttagaaattaataggtggtcatatattgttttacttttaaaattatcttttattcaatgttcttttttttttattattgatttagatgttttttgtaaatattttttaaaattttagtatagtgataaaaaaattattatttttaattagaaaagtctttttttttttagaaattaataggtaatcatatattattttaattttaaaattatcttttattcaatgttatttttttagtgatttagatgttttttcattaataaaaagtttttttttttatcataccatttttttaattaaaattgtatgtcctttttggtaatttattaatattaaaagtgtttttatatttatacaatatattatcaaaaacactttagaatcattttttctgattatcataaaagtgtttttcacagaaacactatagcagaaaacacttcaaataaaaacacttccactagaatcactaccaaacgggctcttaatgaattggatttattaacaagtctaataatctttaaaaataatttaaaactcaaataataaacttattaatcccgtaaatttatgaataaaaattagtttataatggtgttttttttttttttctgtacataattatacttttataaattttcctatcgaaaaaatgaatttcaaatcaagtaatactttttattgaatttattaatgagtttaacaatttttaaaaataatttggaactcaaaaataaatctaattattgaaaaaaaatataagggaggaaaaccgatccaattaattatagattaaatcaaaacattctagaatattatattcaaaattgaataataaatgtgtgcatatgtaataaaaaacctacttattcatatgttaagaaaataaaactttattcattattcattttaaataaaatattattgacaattagtattattcatttttaacccaaaaaaatatgaaaaatgttaatatcctttatgtttctaacatataactactaaaaatataatttatgattttattatgacattattatttatgttttactaaatattatttatttttaatttatttgtaattataaaattattttcattttcaataagacttcaattaaatttaattaattaatattatataaattaaatttaaaatgttttttcaaaaccaaaaaaaaaattaataaaaaaacaatttatccaaacaagtatttttatattttattttaaaaatccttttatgaaaacaatttgccaaatatccttatttttataaaacattagaaaaacttttttttttttttttttttgttctttaacttaaaaacaatttctaaaaacaactataagaaatcatggtcaaacaagaaattaaaaattgtttcatgattaaaaaaatatacttatctttaactcatacataatttttaataagacataagttgaatttgatttcatattattataaattaaatttataaaattttttaaaataaaaataagacattattttaaaaaaaatacaaattctttcattcaaacaaggtttttttttgttttaaaattttattttttgttcttctctagaaaatagtttttaaaaacaaatttaaaaacaccccctctcacaccccattgggtttctaaaaatataattgttccacacacattaaaaaacaattttaaaaaaattactaaatagggcttaagtgttcgatgattttttgcattttttgtttttaaaattagaaaatagtactaatttttatgtaaaatactataaaaaaaaaaatagatatcaagataactttactatcctaaattttaaattctttaaaattgattttaaatgatataaggtaaatttatatatatatatatatatatatatatatatatatatatatatatattatttaaaaggctatactttttatataaaacatattcttctacttttaaaaccaaaaaataaaaaatatatccaaacaaataccaatgaattaatttagtaaaaaaagtagcacacttattaagccacttgaacactaatctagaaagaaaaatatcatcaaaagcattagacacgaaatttatatatattttttaacctaatggcatgaatagttattgttatagcccctattacttatattaaatattgatatgaaattattttttggggtccattgaaagtaccaaatgtgcactaaattaatatgtaactcataagtatatatgtttatttttctatttggttgggtttaatatttttcttttttaaaatgggaaatcattggctacatttttatatttcaaaaacttaaatcgttagaaaaattgatccggttgggtttgattgacttgttggctggttgaaatcaagcaacaaaaacaaaccgtcacaattcgaaaacccgaaaccgaatccgaatcaaaatcaaactacccgccctacacatctataaatacaaaatacgggtcaacagtcaatttcattattttatatcaatttactcacaacgtccctaaataggggtcaatcgtcaatttcattattttattattttatgtcaatttactaacaacgtaggggtgaaccgatcaatttcattagtttatatcaatttactcttttgagagatctaggcttcgggtttcgaaccagatctcgaatcatggcttcttcaaagataatcactctcagaagctcagaaggtgaggacttcggcctcg

SEQ ID NO: 13412 - DNA, 26500 bp, Vitis vinifera
  Intron number 1 from transcript GSVIVT01018401001 (locus G SVIVG01018401001) derived from phytozome v7.0 (chr-ID chr1 5; pos 9714057 to 9740556)
ctatctcaaagccatcttgggtggtcagaactgaggtgcgtttcctaatttcccttctcttacatcctgtttggttgccgagaaaaccaagaaagccaacaaagaaaaaagcgaatgaaacaagtttaacagctgggatttgaagtaggttttgtctggtactactttggtattactataaagataaatggagcataggaggtgctttgctcgttgtgaatattaggcttgaattttgtttggtttctaggaaaatgaaggaaaataaaggacttcacaactttgaattttatattttatttttattttgtttatttaggaccattggaagcaggggaaaaaaaaaaggaaaaagactaacaataggttgagaataataagattatttggtgtagttgtttgatttttcttttcccttttccaacaaccaaactggggtttctccctgaacactttgggatctacaaagtactatcttgttaggaaactcaagtctgacatatttgttattttctaatcgttatttggttggtgcttgctttgtggccctattaggataacccacctcagctattggggaaaccccttgttgatttagcttcatctactatgttgtagaaaatctaatgcacaggtagtttggtactctattggtgttactttaaaattcatgggatcctgcacaacctatgatgaacttaaactgataaaggcagtgataccatatttacacatctgttgagcttttgttctcgcattttgtcggacttacagagtctgaatatcccaacttctaggcaactaggcagaatgtgcctcagatagactggcagagtacctcacacatgatgcatgaggtttttggcttggttgatggggtactagtttggtgattattagtgtgagtgacctaaaataatttttccttgacccagatttttacataactgaatttcaattcaattaaatagttttttattttttttattttatttttttattttttacatagagtgattgggaggtggaagatagagtgatttagacagcttcaagatgtgatacctttttggtcaagtctctttattctgtcttggagcccagagattctcctttgtttcctagtggtagtatttggagggcgagtgtgcctcctaaggtgattttctttgcttgggaggcttcttggaggaaagtcttaactttggaccaacttcaaagaaggggacactttttggctaataggtgttttctatgcctctctgaagtagagatggtggatcaccttcttcttcattgtgcaaagactcgggttctttggaatcttctcttctccctcgttggtgtggcttggattctttcttgttcagtgaaagaaactcttcttaggtggcatggggcttttgtgggtaaagttcgtaaaaaggcttgacaaatgacccctttatgtttattttggacggtatggaaggaaaggaatatgttagcgtttgctaatgaggagctttcactccaaagattgaaaaattcttttgtatataacctttggtcttgggttagggtgtttatagatttgagctcttctttgcttgtaagcttcattgattggttaggctttaagtaagggcaggtgatgtttttgtttctatctctccccctatggttgagccttttggcttcttttgtatactccttgtatactctgagggcattacttttggtgtctcctcttttctttatatacatttttttttctctataaaaaaaaatagttttttttttaaatgttttttgtttttccttaaaagacatgatatcttggtctcttgctgtacctagggtggcccaaagaaggatttttgtccaaccttttcaagcttgtggaggacatttgtattcttagtagtatagatagattgagggagggagtttttggtttgttgttgtgtgacaattaagattaggttattttaagtttcattatgaataaactaatttccctaaagattaattcctactcatgcaagatatttccctcagacattaatcaaaccaatacttggaaaattaaatcatagatgagattggagtttttgtatgggaaaccctaaatacacttgattgtgggggagaaccatggaatatcaaaaataaaaaacaatgcactaaatgggaaataggatacaggggtactgaactatgtccctcttgtctagtcctatttccacataattgtttttcccaagttcttgttcttcccttgtgcacatgtgaactttatttgtggtatttaacttgaatctttaattgataataaatgttcaataggaagaattgctcccctaagcatttggaatccccctagatcccatgagtcaaacactcctcatgagccacaacctaacaatgacgaaggataaaatttttaagggttttttgaattttaaaaatcaatgacaatgatatttcatgtagcactcaattttgagagaaaattcgctaagcaacttttctcaatttaatgaagtagacaatacttatgggtttgcgattcatagtcacatgatttcttcttggggttaaagctctttctagagagctataactcttcttccttgttgtgctattgcttatgatgaatgtttaggaggagatcattttttcactaaaactccattgaatgaaagcttcctgcttgagaccatacgtggcatctttatgtgacaacatgagggtctcatgattggaaagagttaggattcatgaaaaacaatagttatgaacctgggcttgaaagtgaaggacattatttggtattattgtgctcctgtttcacattagtggatggttttcatgcaacaatactcctatggttttccctttgaatgtgtatttgaggtttccatgtaaaataacctgtgttgtttctaatttacttttccaaatactaatttggttcaattgttcaatgggaaactcttatatgagtaggatttaatctttggaaaactggtttgatcaacattttaatgtaagcatatagttgtaattgatactcaactccgtctctaggcccatccccactactagggatatgattggagataaaaatagagtaattaagctggatttattgtttgtcttatgggtggaagactttgggacagatccaatgctaagctaaccactagaaatgaagcaagatgggaacaatgataaagttgtccactgcatccaacataagttcaggacactcgatcttcatgaattcttacaccatgctattaatccatgtgaccctcaagttctcctagtttggttctagtaaatctaatgagtagcctagaagtttacccaatccattgacttctggtgtgtcgcatctaatttgatgagaccaggtaaaggtatgaaagttttggtattttcaaagatcagataataaatgattcaaaaaaggattgatatttagaaaaaggttctccaaaggtttttgaaactttggcattagataaaagttacctgagttgtttctttaaatccttaagatataaatgcagaagacttttgaagtaaatttctctgattttagttggaattgaaataaaccactttattaatatgcttgatttgcactcctgacttgttgagtgtgccccttgatggattgtagtgcaaattttcaccttgattggtcaagttgctaattggcaggattttgtgccatggaaattttaatgctagctatttcattcaaatagagttgtaaagtgtgtactacttcatcaatagcttgaagagcttgtggttgaagaaagaagattgatacaaatttgtattcgagcacatgccttaaggatggtgaatgacctagagactatgcttttgatttatgaaaatcaaaatttatttttgcatttttttagaattgtttaacattttactttttcgcccttttcagcaaaacagggctaatggatgagtagcttggctattgatcaatccaaggagtggtttgattcatcaaggtggtaatttgcattttgatcaattaagagtgcaaatttggccatattagtgaaggggcttattttgtttcaaactttgtttggagatgaattagcctggagatcaactttctatatgtgtaggactttttatctctttctctgcataaaaattccaaaaatattagagaatattttttcaaaggcaagtcattttcataaagtatttattctctcactttttaaaatattagatgcctcaaacctatactgttttcatcaattgagatttgtgaggagtcattatatcaggcagacttctagattgcctgctggatctattagaagtcaaactaggagaatttgtggtgctgcacagatgcgctgcatggaggaaggattcaagaagattgagatttgcaggtctaggttggatttaatagactacttgatcattatagtggattggtttcaatcagtatttttcttgtggttttcccccaaatagcttgttatatgtggtttccatgtcaacacatgtttggtctaatctttagttgctcagttgcttgtgttttggaattattgcatgaataggacttcaataaatggagattgatttagattttgaattaaaagtacagaaccttagaatattcaactctgtctaatatttaggaggttggttgttgaagtaattagatatttgaataggttgccacatgtagaaaaacaacttgcacagtggtacacttggtggttgaaagatatcatttttgcttcattttattaggtgacattaaatagaataataataggcaggaaggaaagtcagcctaatgtggatgattacactcatttaaaatggatctatggatctatacaggctactaaaggacattgtcatcttaccatgggacgaaatacacaactgatttcactagcctttgttccagttgtcgagccttgattctcaaatcatcccacctttagttgtgatgatgttacatcaccttaattgagaaaaccataccaagttctagatggcttggggtttcctgaatgcccccttgttaagaattcatttctgatttatcttaatgtcacacaatattttccatcttcccatctgtcacttagccattgccacattttgttttgaagcaacaaattatcatgtgatatatcattctattattggcctatcagcacaaaacactcatatgtgtgtgacagatactgttttggaacatctatctttccttaggaaagcttgcaacaaaattcttaggagcatgatattgctgtttatgccacctttttagggtcatattagtcatgtcaatgaagtaggttcagaattaatgcctcattttagaccctgccatggcataaatgaatctcctctccaaacctatttgtactgtgtggcgtcagacaacttaattttcatagggtgaggcaaaggctcatcacgctgtatttgaaaattttgaattttattacttcacaaatggaaaacaaagcatgtgtcttaaatctaatattcaatcttactcaggttgtaaaagttgttagagaacacaaaaagcgttcttggcgaaggttcctcatcttctatatgagtttttgatgtgagagtgctacttgttggtgttggtttcattttacaattgatgtcatttaccattccagtaaaccaaaaacaaagcatttaacagaatctaggacttctgatccacaatgcaaatttgttgaaattgagtgcattttatcatgttgtgttgttgtgagatggtcaagggttgcaaaagggtctgcctacaatgttatttcctaagaaccccgagctatgggtctaagccctaaatttataattagatttagagttacttttttcagggcaggatgggtcaccaaaacccaattctgtacccaaactcttgtgtgtgcgtaagattgactataattcctcccttaaataggattgactatcttcatctcaataaggctgggacttgattggtcatctgaaaaacctgtcccttgctatctctagttctaagtagttccatttgaggctgacaatgtcaaccaggaaagttacccataatgtattttttttttttttggaaaactaaactcttttaagttaaggattgatattacactgttaaaagttttatctggttgaaaatgtggtaggcttaggcttaacagggctagagataatatgctcttgtggttcaccaacttatttgacaatattatggcattagataagtggaaaaaatatacttttgtaattgttaaagagcatgatatacattgtgaacctaaattttgcaagtttaagcttttaggaaaattgattgtctaacatgatatcaaaacatcgtttgacgaggttatgggtttgggcctcgccgcatatttatttcctcgatttattgagcttaaaagaggccaattgtggttatttgtctacgggcctgtgtctttccatctataggtatggagttgcaagtaagagagagtgttaaatagcttgctatacattgtagatgacccaaatcctacaagtttaagcttttaggaaaattggttgtttaacggtaactacatataagaacaatgaagttatctaaagttgcacgaagtaccaagaaatcatatttatttatttttttgataattaaaaccaaatgcattaaaaagtaaaaacgccacaaggacgatccaaagtatacagaatgtatacaaaaagcgcctaatagcacaaaaagaaaagaaccccaacaacaaccccctcccttaaccagaaatcatatttagaagtcatacattgggattttaggagaaagaaactgagcaaatgctaagacatggaacaagtttatcagaaaactagttcagttttgagcatgaggtaaattgactgttgaagctatttacataggtgatggaaaaggttcaatgaaaaggtgggacatttcatatttgttgatcatttcttagccttcagaaaaaagggtatccattagatacattgatatgatcaacctgtatggttgagccgtaactagtatgagagcagttggtggagaaacaagtcaattcccatcatcgcagctatgttgcatgaacacaaacatgagaaaacaatttttgaaaatagttctttgatgttttgtaaaataaaagtccatttgggaattttttttttgatagataaagagaataatattaaacgaaaagaagaaacaccaaaaagtgccctctaagtatacaaggagtatacaaaagcagcccaaagaatcgaaactaaaggaggaggatataaacaacaacccccttacttagagcctaaccacttaaaaaagctaataagagaagaatggctcaaaactataaacgccctaacccaagaccaaagattacatacaaaagaatattttagcctttgaagcgaaagctcctcattcccaaaagttagcaaatttatttccttccagactaaccaaaatatacataagggggccatttgcccgagcttttttacgggtcttccctaaaaatgcaccatcccacccaaggagagtttccttaattgaactcgagagaacccaagccataccaaaaagggagaaaatgagattccacaaggcccgcgtctttacacaatgaagtaaaaggtgatccactgtttctacttcagaaaggcataaaaaacacctatttgccaaagagtacctcctcctctggagttgctccaaagttaaaattttaccccaggaagcctcccaagcaaagaaagctaccttaggaggcatgcttgccctccaaatactaccataagggaacaaagaagaaactccgggctccagaatagaataaagcgacttgactgagaaaactccactcttagatgctgtccacaccactttatcctcgtcctccctctgcaccttaaaggcttggattttaagcattaaactctacaccatcccaatctctcaatcattaaacgcccttgaaaaaagaggggtccaaccatcccctacactgtctgggttccaaacatttgatgcctaagcgtctttagccaaggagatggcaaataatgaagggaaagactcacaatgaggcacatctccacaccacttgtccttccagaaattcactctcctaccacaacccacgccgtaggctaaactgctattcatacacaaccactcctttctaattgttttccaaagcccgacaccatacctcccgcttacggcccgagtacaccatcccccctcctctacaccatatttttgactgataacttgcgtccacaaagcctcactttgcaaagcgccaattccacttactcgagagctttattcatcaaggctaaaattctcacacccagaccacctttctttcgttccaaacaaaccaagttccacctaacaagatgtggcttctgcaccagagctcctccaccccacagaaaatccctctgaaacttctccaacctcaaccttacttttctgggcaaataaaagagagacatgaagtaaataggcatgctagagagtgtgctccgaattagggtgagtcttcctccttttgatatatactgtctcttccatattgcaagcctttttcgaaacttctcttcaactccatcccaaaccacctctgatttgaagggtgcccccaaaggcagaccacccactttacaacccaactccaaggtcaaatcctctatatcatgcaccctccccactgggataagctcgctcttttccaaattaactcttaaccctgagcaagcctcaaaccacatgagaagccaacttagatacgtcaattgatcatgagactcctcacaaaacaccaaagtgtcatccgcaaataacaagtgtgagattagaatcccctcacctcccctgcctctcaccctccaccttgataaaaagcccccactaataacccttctcaataagcaactaagcacctccatagttatcacaaacagataaggggagagagggtctccttgtctcaaacccctcgaattttggaaaaaaccggagggagagccatttataagaacagagaatcgcacagtagagatgcaccactcaatccacttaatccgtctctccccaaagcccatttttttaaccactaccaacaagaacttccagctgacatgatcatatgccttctccatatccaacttgcacaacacacccccttgattgcttttcaacctagaatccacaacctcatttgcaatcaaagctgcatctagaatttgcaatgtttttaacctgttttctatgtttttaaatatgttttaagaataacttttatctatagtacttattttttaatcattctctgtggaattctagcttaaagttagtgaggaattctaaggatttgttaaggccattttaggtattttgttattagttcctagtttaatgcctttccttgtttagtgaagattttgttctctaattagttaagattgagtccggtctttatggtggctaattgcaccattctcttgtatatataccatgttgtattctatagaaaatacatgagaatcaataaaaattcacttctcagaaatcttcatggtatcaaagctttccctctaaaaccgtaatttcctacatcataaaattcatcatggctactgagagacaaatctcaacatctgaagtgacctccaatgcataaatgatgccaacgatgaacaaccatgcagtagccgagaacccatctttgctcatcacaggccacaaactcaacgggcataattttctccaatggtcttagttagtgatgatgtatgtctgtggaaagggcaaggatgaatatctcactggtgaagcaactatccctgagaagaccaatcccaaattcagagtgtggaagaccgagaatcacatggtgatgtcttggttgattaattcgatgaataccaacataggagagaattttctcctttatggaactaccaaagaaatatgggacgcagcaagggagacatactcaaattctgaaaacacttcagaaatatttgagattgaagccaccttacacgaccttcggcagggagatctctctgttacccaatacttcaacattctttctcgtcattggcagcacctagacatgtttgaaattcacacctggaagtgccctgaagacactacactgtaccggaaaatcgtggagtagaagcgaacattcaagtttctccttggcctcaacaagaatttggatgaggttagggggagagtgatggggaccaaacctcttccaagtattagagaggcattctcagaagtttaccgtgaggaaagcagaaaaaaggttatgatgggatctcagaattctgccctatcaatcgaaggatctgcccttgcagcacgagaacctccagcaaacaccaatagcgaaaatcgacagaaaaaggggagaccttggtgtgaccactgtcgaaaactaggacattccagagaaaattggtggaagattcatggcaaaccagctgattggaagccatccaaaccattcaatgacagagaaggcagtgcccatagtattgttgtctcagaagacaagccaacctcaaccaagaccagtcctttcaccaaagagcaacttgatatgcttcaacaactcatgagtcaaaactccctatctcagtccagtaactcagcctctgctacaggcatgttggcacaaaaaggtaatttttcaaatgcctttatagtaaataaaaaacacttgaatccatggattattgactctggagcatcagatcacatgatgggagatggaaccatatttcatgagtacaacctatacagttcgaattgctgatggatctctatccaaagttgttggaataggttcaatcagggttacaaacgacctgaatctaaactttgttctccatgtccctaatttggactgtaatttgctctcaatcagcaaattaactcatgatcttcattgtgaagctagatttttctcaaacttgtctaaatttcaggaattggatttggggaggatgattggcagtgctgagatgtgctctggactctatgttctcaagggcgatactcctcttagaagacaaactcaatgcaagttgtgtgttgtttaagagtcagtcaattttagattcttgtgtcaataaagataataaggtcatgttatggcattatcgtcttggtcatccaaattttatgtatcttgaaaaattgtttccatttttattcatcaataaaagtccaaaatttttcagttgtgaaatctgccaacttgcaaaacatactcgtagtggttaccccagtctttcatatacaccatctcacccatttgccatgattcatagtgatgtgtggggtccctcaagaaaaaacaatataacaggagcacgatagtttgtctcgtttgttgatgatcacactagattgacctgggtattccttatgaaagaaaaatctgaagttggccaaaattttacaaatttcaattccatgatccaaactcaattccagaccaaaatccaagttctaaaaactgataatgccaaagagtacttcaagtctgttttgggtagttacctcatgagtcaaggaatagtccacctaagttcttgtgttgacacccctcaacaaaacgggattgcagaaagaaaaaaccgacatttgttaaaggtagctaggtccctcatgttttccactcacattcctaaacatttttggggagaggcagtacttacagccacgtatctcatcaatagaatgccatccatagttcttaaatttaaaaccccttgtcaatcccttctccagatctttccacatacaaaaatcatctcttcattagatctaaaaatattcgagtgttcagcatttgtccatatacatcagcaacaccgtagaaaaatagaccctaaatccatcaaatgtatctttatagcgtactcttcacaccaaaagggttataagtgctattctcccatcaccaaaagggtatacaactctatggatgtgacattttttgaacatcaagcttactaccacaaaactgacatgcaaggggagaacatgaaagcattttagttttgggagacacttgatcttggggacaccgtgccattacctcctcttacttctcaaccaattgtcagccaacaaccagaggtcattaatcaaattccagttcaaatttcagtgcttgaacaacctaaacctgagagtcatcttccaactacctgacctcaaattccggtccataattactttaaatctccacaaactacaaataatgagtttcaaatctacattaggaggaaaatgcctaagagaacaatagagcaaccaactcttctcacatatgaccaagaatctcaactgattccaagtcctactcaaattcactcaggtaagggaactactgatcttaagaagctagtaccatttgtagatgattcaaacattccgattgctttgagaaagggtgttagaacttgcacagaccatcctatctgcaaatttatttcatatgatggaatcgtctccctcttaccaagattttgttttgattcttgatagtgtgcaaattcctaattctattcaagaggctcttaagaatccagagtgcagaaaggcagtcaatgaagaaatcagagctttggagaagaatggcacatgggtagtctctgacattcctcatggaaagaaaccagtcgggtgtaagtggatttttaccattaagcataaggctaatggaagtattgagacattgaaagctcgccttgttgccaaaggctttacttagtcttatggaatagactatcgagaaacatttgctccagtggccaaactcaacactattcgagttcttttttctcttgtagcgaatcaagattggccattacatcaactggatgtcaaaaatgcttttttgaatggtaacttagaggaaaaagtgtatatggagataccaccggggctggaaacttctttcaacaacaacaaggtgtgcaagcttaagaaatccctatatggactcaaacaatcacctcgagcatggtttggcaggtttgcaaagtcggttacaaagcaaggatatactcaatgtcaagcaaatcataaaatatttgtgaagttctcttcagaaaataaaataatagtcctgatagtgtatgttgatgatatcatcttaacaggtgattatgaagaggaaccatcgggaatgaagaagcacttagccaaagaatttgaaataaaaaaccttgactatctcagatgctttctcgacatggaggtggcaagatctaagaaaggcatatttttctcccaacgtaagtatgttctagacttactaaaggagacaagtatggttggatgtaaacctgcagacactccaatggactcaatgaagaagataggaactgagaaggacagtgcaccagttgacagggggagatactagagacttgtaggacgtctcatctacctttcacatactcgacctgacattggattctctgttagtgttgtgagtcaatttatgaacaacacaacaaaagaacacatggaaattgtgaatagaattttgaggtatctgaagatgaccctaggaagaggactgttgtacaaaaagaatgataccggagatgttgaagttttcttagatgcagactgggtaggtgatgtgttagacaggcgatcgacatctggatattgttcctatgtatggggaaaactcgtgacttggagaagcaagaaacaatccgtagtctcaagaagtagtatagaagctgaatttagatctttggctcttggtatctgcgaaggaatttggatacagagactactgaatgagttgggaatatctactgagaagcctattaagatgttctatgacaaccaagctgccataagcattgcaaagaatcttgtgcatcatgataggacgaaacacatcgagatagattccttcgctaaagctcactacaagatcttacaagatctatactcttacaagatcccaaacgacagacatactcactaaagctctttcaagaactaactttgaagaactgagtcacaagctgtgcatgtacaatatttatgccctagcttgagggggagtgtggaattctagcttaaagttagtgaggaattctaaggatttgttaaggccattttaggtattttgttattagttcctagtttaatgcctttccttgtttagtggagattttgttctctaattagttaagattgagtctggtccttatggtggctgattgcaccattctcttgtatatataccatgttgtattctatagaaaatacatgagaatcaataaaaattcacttctcaaaaatcttcattctccatatttatataattattttttaaaacagtccttgtaaaacaagtgaaatttaattaaaagatgttatttgaaaacgcatgttttttgttttttgattgtcaaatatattttcctcttttttttttttttgttttggagaataaaaaattgttttaaaaaacaattgcctaacagggcttaagatcctagaaacctcccccaaaaaaatcagaaatagaaaaaatagaaattatccaaaaagaaacaatctaaattgaatgtatattctcaatgctgtataaaataaatctttttgtagtaggactgcatcagtctctttgagactaaaaggaatttacttttgaatttgattgttgatataacttttttcctacaatactgtatcaagctcttggaagtccataaatatacatgtctcctaattatattttgcttttgatctatgataagctttttagcaaattgtaagaggcatgagttgatgcaaacgggagtcaaaaggatcataatattggtgataaatgaaacaaggaaagagtactttgattttcttctccttatgtaggaaattggtgaagaaaaccttttcttcaataatgaatggtcttctataaaaagtaggtggtttactcttactaactaatagttgtaaaataataaatctgaatgtaaatctacctttaagcataatttccttattctaaagtgcaaatttagggtctaattttgtcattaagtctcaactactaacagtgcaacttgctaggtagcatttcagtttctggtgttttttttttgattggtaaaggaatgtatattaaaattagaaaaagaagccaagtacatcaatgcatacaagacatatacaaggaggagcacctaaagtaagccctccaaaacgagcacaaaaaacacttaagccctcaacaagaccccacccactcttcaaaatcaagcaagggcattgagtcttccattatgtacatgctaacccaagaagaaagattataaagaaacgaaagttttaaccattggtcattttgttccttattttcaaaagttctttgatttcgttccttccaaattgtccaaatatgcaaagaggagcagcattccacacctttttccttttcttcccaacaaaggagtcttgccaacttaagagcaacaccctcattgacgaaaggatcacccaagctggtctaaataaggaaaacaataggtgccatagaagccttgctttggagcaatgaagaaataaatgatcaatagtgaagaaactgagaatcgtatattcaatcatatgtgttttacctaatcgggtccctatttaatatatacacagggtgcaagatatggaaaaaaataaaatcatacaaatcaccacaatatctgccacaattggggcctcaatcttcctacaaatcacccctcaaatcatacgggatttccacactccccctcaagttggatcatagatattaatcatgtccaacttgcaaataaaatcttcaaagcatgatttctgtaaccccttggtgaatatatttgccaattgttcccttatagggatataagtcatgcaaatagtccccttctcaattttctcctttataaagtgtcatccacttctatatgtttgatcctgttgtgctgaacaggattatgagaaatactaatggtggctttgttgtcgcaatagagtttgatggggagctctactgtaatgtgtagttcttccaatagtttctgtaaccataatccttcacacatatcttgtgcaactgctctgaattcaaccttagcattacttctggctactacactctgcttcttacttctccatgttactagattcccccagacataggtacagtagtcggtagtagaccttctgtcttctactaatccctccaatctgcatctgtatagatttctacctttttactgtcacccttcttaaagaaaagtcctttccctggagaaccctttagatatctgaggatcttatacactgcttccaggtgactttcctttggtgaatgcatgtactggctaaccacgcttacgataaaagcaatgtttggtttagtatgagaaaggtagatcagtctacctactagtcgttgatatctctctctatccacgagttttccgtcgttttccttcctttttcttgccttgataggggtatcgcttggcttgcaaccaagcatgccagtctcacccaacaagtcaagtacatactttctctgggagatactaattcccttccttaatttggcgacctccattcctatgaaataccgcatttaacccaaatcttttacctcaaactttgtggctaagaccttcttcaacctctccacttctcctgtcttatctccagtgagaatgatgtcatcgacatacacgattaggatggtcatccttccattgttggactgtttgaagaacatagtatgatccgattgtccctgttggtatccttggtttttaatcacctttgcaaatctatcaaaccatactctcggagattgcttgagaccatatagagatttcttcaatttgcataccctggtttcttctttttccttacaaaaccctggtggtagtgtcataaacacttcttcttttagctcaccatgtagaaagacattcttgatatcaaactgatggagtgaccagtctaggtttgctgccaaggataagagaactcgtatagtgttcagctttgccactggtgcaaatgtctcggtatagtcaatgccgtaggtctgagtgaacccccttgcaaccaggtgggctttgtatcgttctactgtgccatccgccttatatttcactgtgaatacccatttacagctcatcggtttcttccctcttggcaaagtcatcacttcccaagtcccattttttttcaatgcccttatttcttctgttgaatataatgtatttatagtgtacaatctttctttcctttcttaatataggtcacatatatggtagttagttcaacctagccttttatatatatttctctattgtaagaagttaatcatatgaatgagaattaaggttttctctctctctttcaacatggtatcagagccaagggagaaaactttattctttctggtttacctgtgtaattaattccgggaattcgtccagtgaccgtgtttcattccggtcaccttttccatctcccaaagctttctggtcagccatgtcatggtcagaaaaccctcatcatcgtcaaaatttttccgacgatattttccggagacttttcctacgacttttttttccagcgatattttccaacaccgaccacatcatcaggagcgcaaaaaggaaatttgcaacttttctcaaagcaccggagccaaaaatcgatccatgtgccgtttttctccggcggtctaaatcctacgcgccggtgtgtgagggcgcgtggcccactttctggtgccaagcttctaccaacaggctcgtcctacgccgtcttgcacttttaagcctccgtcagtcctctccgaaccctgcttctccatttttttttggcatttcagcctccgcgggtcttctttcagcctctgacgacctctgacggcagctcccttccttggtcgagacctgtgtgtgccttgggaaggcctcttcttcatctccagtcacttctcttttgggtcccgacataccaggttcttcttccacagctgtgatccgacctccctttagggctctcttcgatccaaacatgattcaatctcaggtgaagtggatatggcgactaaaaatcctattttacatccgtcatctctggatctcctactattacatcggaaaaattgattggtagtgagaattatctctcctggtcagcgtccgtggaactctagtttatgggacaaggttatgaggatcatcttgttacacctgaggatgctatacctgatgttgacaaagtgcaatggaagaaaatcgatgcacaattatgcagcgtactatggcaatctgttgatcctaaaattttacatcatcttcgtgcctacaaaacctgctttaaattttggactcaggctacaggattatttccctcatcatctttgatgcacaaatccctcattccctcctttttcctacccaacctctttatttccttcctcctcgtgtctttggctgtacttgttttgttcatactctcacacttggacaggacaagctctccgccaagctacgaaatgcatcttcttaggatactcccgacttctgaagggctattgttgttattcccctgacactcatcgttattttctctccgctgatgtcactttctttgaggactctccattcttctcatcctctgaatctcttcccatttctgaagtattgccacttccctatatatccccccctttagatgcgctctctcgtcctcttcaggtttatcatcgtcgacatcgtgctgttgctcctcctctctcttcagctgaggtacctgatgactcacctcctgtcccaccgatttctcctaccctggccctatcatctactgaccatttgtctattgttcttcggaaaggtaatcgatctactcgtaatcctcatcctatttataattttttgagctaccatcgattatcttcatcctattttacctttgtctctactttatcctatgtttcttttcctaagatcactaatgaggcactttctcatcctgggtggcaataggcaatggttgatgaaatgactgctctgcactccaatggcacatgggatcttgtttctttacctcctggtaaatctacaactggatgtcgttgggtttacattgttaaagttggtcctgatagtcaggttgatcgccttaaggcctgcttggttgctaaaggttatactcagatttatggttgtgactatggtgacaccttctctcctgttgccaaaattggttctgttcgcttatttctctccatggtagctatgtgtcattggcctctttatcagttggatattaagaatgctttccttcatggtgaacttctcgaggaagtgtatatggagcaaccacctggttttgttgctcagggggagtctggcttagtgtgcaagttacgccgctctctatatggcttgaaacagtctcctcgggcatggtttaggcgttttaattcagttgttcaagagtttggaatgcttcggagtgaagcagttcattcagttttctatcatcataactcttcgagccagtgcatctatttggtagtttatgtggatgacattgtcattacaggcagtgatcaggagggtatccaaaaactaaagcaacaccttttcaaccactttcaaaccaaagacttgggcaaactcaagtacttactgggacttgaaatagctcaatccagttcaagtgtggttatgtcacaaaggaagtatgccttatacatcttggaagaaacaggtatgttagaatgtaaacctgttgacattcctatggatccaaatgtcaaacttttaccaggacaaggggagcctctaagagatcctgggagatatcgacgacttgtaggcaaactgaactacctcaccatcacttggctagacatctcttttcctgtgagtgtggttagtcaatttctacagtcaccatgtgacaaccattgggatgctatgatccgcattcttcgatatattaaaggaacattagactaaggtatgttatatgaagacaggggccatacccaaattgttgattacacaaatgtagactgggctggttcaccctcagataggcattccacctcagggtattgtgtttttattggaggtaatttaatatcctggaagagtaagaaacaagatgtagtggccagatcaagcaccaaagctgagtatcgagctataactttggcaacatgtgaactcatatggttgaggcaactccttcaggaattgagacttggaaaagatgaatagataaagctagtctgtgataatcaagctgcattacatattgcattcaatccagtctttcatgaaaggaccaagcatattgaagttgactgtcacttcattagagagaagatcgcattagggtgtgttgatacaagttttgttaattcaaatgatcaactagcatacatcttcactaaatctttcagaggtcgtaggattaaatacatttgtaacaagcttggtgcatatgacatatatgctccggcttgagggggagtgttgaatataatgtatttatagtgtacaatctttctttcctttcttaatataggtcacatatatggtagttagttcaatctaaccttgtatatatatttctctattgtaagaagttaatcatatgaatgagaattaaggttttctctctctctctttcaacatcttccatcactgcctctttccattctagaatctctaaggcttcttcaatgtttttaggaatctgtattctatcaaggttagtcgtaaaagcacgacactttgcagaaagagcattataagacacaaatttcgagataggatggaaagcacatgaacgaggttgcttcctaagagcaatgggtaagtcatctgttacctgattaggattgaagctagactcccaaggggttggaattatcaccggttctgactctttcagtgcttcggaggtgagtgtctcattggactttggttttggcctcctcgagtagatgagtgtttccctatttgtctgtatttccgtatctccccctgagttgaagtgtccttctatattaggcaaaggggtagatataaggcacggagtggattcgaacacaacaacatcaaggtagtctaaggttaagggtggtctagcttcactcacggactcccttgaagcgagtagtagggagtatgctcaaagaatgtgacatctaggctaacatataacttctgtgaaattgggtcatagcatttgtagcccttttgtgtggaagagtagccaagaaagacacatttaagtgctttgggatccaatttgttccgcttagatgtgtgagtgtggacaaacacagtggacccaaagacatgatgtggaagatgtgcaccgcatctagaatggggaaaaaactcttggaatttctggagaggtgtgacaaaagatagggcccgactaggcattcggttaataaggtatgtggttgtcaaaatggagtcaccccaaaattgtgagggcttgtgagaggtaaacaacaaggcacgagcaacttcaagaatatgtctatttttccgttttgcaaccccattttgttgaggggtgtcaatgcaagaactttgatagataataccattttcttgtagataagtgctcaaggagtgattgaaatactcagtaccattatcagtaggaaggatttgaattttggtgtgaaactaagtttttatcatagagtgaaagttcatgaagactgatcgaacctcagttttatcaatcaacaaatatatccaacacaagcgagtgtaatcatcaataaaagtaataaaccattttttatgggttctattaggggtacatgagggttcccatagatcactatgaattagagtaaatggtatggatggttatacttagatctaggaaaagatgcacgatggtgtttggcaagttcacacacttcacactaaaaatcccatgaagctttatttgaacatagtgaaggaaataaatgttgtaagtactgaaaattaggatgacccatccttttgtgccataacaaaagttcactttccctaggactagatgcaaaattacaaacagtaggaggacactatccacgcacattagcttcgttgaagtaatataacccctcacgttccttagtgctgccaattgttttctccgatgataggtcctaaaaaacacaatgagaggataggaatttagctgagcaattaggctgtttggttaactggctaatagacagcaaattgcaagataaattaggaacatgtagaatagggttgaagtaatagactcagaaatatgaaccttttgccagcaattggggataaagtaccatctgcaatttttacttttaaattaccggcacaagaagagtatgtagaaaataaatgatgagcattagtcatatgatcaaatgcaccagagtcaataatccagggagtaatatgagacgcggtgctaagtgctgtcagaaacgtacctttgtgggctaaagaactagaggacaaagtagtagaagactgaccagaggcttggaaattagaaaaaaactcatataatttcgcaagctagtcggaattaaaccccacactagaagctgattgatgattttctgtgagtgttttgtttgcccgagttttagtggaggcctgatgactatgggctttattaggctgtttgggcttccaatccgcgggcttgccatgtaaagtccaacaagtgtctttagtgtggcccattttcttacaatgctcacaataaatcctcttaaactgtcgtgggccaaatccagcgtgaggccaacgggttacaagtgctgaagcctccggcccagaaatgagatgttcccgcaacatcactttccttctactctcctcacgtcgcaccttagagaagacctcttggatggggggcagcggccgacgactgagaactctgctcctaacgtcgtcaagctcgcggttcaaccccattagaaactcgaagactctctcgttctccatttttttcttgaggcgcacattgtcacccgtgcactcctattcttcttcgcagctgagatcgagatcttgccacaaacccagtatctcggagtagtattccgtaacttcccgatctccttgcttcatctgtcagagccgtgtcttgagttcgaagatttgggaagcactctcggcattggagtatgtttcccgtatcgcatcccacacatcctttgctgtcgggaggaacatatacgttttgccaattgctactttcatggagttgatcaagcatgaggtgatgaaggaattttcggatcgccatttctaggatgctactgcatcggtcagaggtggtcgccgagtctcgctggtaagaaaccctagttttccctttccgtcaataacaggcttgattgcctgtgcccactctctgtaattcttatcgttcaatttttcaacggtaagatggagtggggagttgtcgaatgcatcagtcgagcccatggaggagtttatctccgactctctttcctgggttgccgattgattggactcatggctatctcctttttgggcagccatggattgattagggttttagagcaatccgagctttgataccatgaagaaactaagaattgtatattcaatcatatgtgttttaacatatacacaaagagcaaaatatggaaaaaaataaaatatggaaaaaaattaaaatcatacaaatcaccacaatatctgccacaattagggcctcaatcttcctacaaatcacccctcaaatcatacaggatttccacaaatagactccccctcctgcttgcacatataacatctattcgccaagggttgccctctcttctagagattatctaaagttagcactcttccccaactagcttcccaactagcctcctcttctggacatttcagtttctggtgctaattgtgctatgtcagtatgattgtaaatcatgtgattagtagacttcaaaccactcataccccttcttggtgtgattattccttgtttttatttggccaatgtccttgtatgtggttttactgattgtgttccttctaattttcagtttgcatcactcggtatcagaaatgttgttcagttatagagacttgtttaagtcatgtctaagacttgcaatgtgtcgagaaggtggaatcaatattatgtggttgattcctcttctttgctaagttgtgagttatatacatgtctataatcaatatctggaattgaactgtacaaagttcttatagcaaaattgaagcaaaccaggatcttgagaagggacaaaatcaataagatcctatagtaagtctttgtggaataagctctagtgctagtaagaatcataacaagaaagagtgcaggtgggagggaggctcttaatgataggatgtacaattaagattacataacatgatttgtaaaataaattgaagctttgacaccgcaatgtgctgaattggaaattgttagtccacgatagaactggagcccacatttgcaatttgcaaaggagaaggataatcatggtgcaataccatatgaaaaatcctcattagtccacaacctttagttgatggagcacatcactgattttatatgaagcaccatttactattgaagcacatatttgcttcgctgtttgttacagaaagagaagtaaatccgagtatggtttggttccactgttaattatgattataacaattctttgtattccacttccttctactcattaaaattttgatcataaattagtttgtaaagtcttgttggattgattggatggatattaaaattaagtcagggaattttagtgttaatcaacaataacatacaaatatcttacttggtagagaagcaaaatggaatggagacatgtgcccttgcggaaaggaattaggaaacattgattaaacaatgtaagcaaggaagatgatcaaatcaaatttgagaatgaactctttttatgttataaaaggattaacacattcctattgagtgaaaattaatcttttttgcattggaaatcctggcccattttaggccattacttgttggatattcctaatttttgaagtgtttatttcttaggtttttatcttttattttttctattttttttcatgttaatatttagacaactatgtcgataatgactgctgttaaattttctattatttgtgttattagagagtttatgaatacttgattatagctgaggtttgaatatgattgttatttgtgagattaaagagtttatgaatattatatccgggatttgaagattgttattattagtagcatagtagtagtacttattatttttcatactcctttgaattaaccaaatttttataaaattagcaagcctttttttttttttctatatttatttatttatctatttagaaaagccctttattaacgatatgtcaaggaagatggtgtttttctttcttatgacctattgtttttggtactcctctgattaaaaatgttttcaatgcttaattcttggtgttttctttaagaaaattggggagctgtaaggtggtccattctcctgttactcaaatgtgttccaacatgcactttgcattgcggaggttttaattgtaggcaatccatgtgtggaatgtgtaaaatatgaaccattcagaatttgccacatgtctgaaccattttaatttattgacaaatcacaaacgccatgtgttataattggtaaattgtggccaaataaaaaattactatttttcttgtaagttatgggtggcaaattagagatggccttgccttataaattttgcataaatcaagtttttcttcaaccaaatataacactgtgagtttggtatttatctttgtgaattaaggggcaattatttagataattaggaaattcttatctccatgatttgtcatgggatgggtattgtgtctgatataggcatggttgtgctttagaagtgtcaataggacatagttgataggtttacatgacaggttgagttggtttacattgagccattaaattcagtttggttatacatatggacggagctaatgtttccttgagacggatgtagggaaactttgaatttttggggaagaaaaataggtagtttatccgctaatttagacttgtattctgcatgttaatttatgtgattctgttttcttgatcattttattttcttgaatccggattttaccgaatgaaggaaaagctggaaggggtttggattttgccattgatgtctcctagtaatctgttgaacatcacttgtttgttgcagtcaa

SEQ ID NO: 13413 - DNA, 9152 bp, Vitis vinifera
  Intron number 9 from transcript GSVIVT01032211001 (locus G SVIVG01032211001) derived from phytozome v7.0 (chr-ID chr1 3; pos 21491836 to 21500987)
gtgaagtggttcatcttaaggtacttcccttctttggcttcataacctgcaagttccaagctctagttgtacttctgttggcctagtgtgcatcattatctttctgaagattgatgaccttatgtatattttcctatgtttgatcgatcttctggattaagttattcctattatcttccaaaaaagtgcttcttttggtgctcgactagtgactcaatgcagctattacttgtttattgatgtttgaatctcatcttttttttgataaaccaagagaagaaatcatattagaacacgccaaaacagggggcgttccctaagtacaccggcagtatacaaagaaggcctcacccaaggcaacaaaggaggaaacaaaaacctagaaaagccaaataagaccaacaagtcaaccacccaacaaattcataaaagagaaatagtccacgtccataaattgttgagaccatttaagaagagcccgaaggaagagattcttcaaactcatatctgacttctcttcttcttgaaacattcttctattccgctctccccaaatacaccaaaacaaacagataggcgccattttccaaactacactcttcttcttttctaggcccttaattttccattcaagaagcaaatttctcactgaattcgggaacacccacaccaccccaaaagaagagagcaccatagtccaaagctcccttgtcttaccacaatgaattagaatatgatccgccgattcctcattctctttacaaagaacgcatctgttgaccatagaccaacccctcctcattaacatatcaacggtagaaattttaccccacaccgcttcccaagcaaaaaaacgagttcttaaaggggcatgcgaaccccatacctcctttgctggaaataaggggctgttctccaccttcaaggaccgataataagatttaacactgaactttcctttcctctcaatcttccaaattaaagagtcctccccttcttggacctttattgcagagatgtgaattagaaaacgactcacctcccccaattcccaatcatgaaagggtcttctaaagtgcacctcccatcccccgccaccatctccttatctcccccaaagatcagccactagagctgaattatgggaagcaattctgaagagcaaaggaaagagctctttcagcttagactctccaatccaatagtcccaccaaaatctggtacatctaccatttccaatacaaatactagttctgaggaagaactcctctcaaccctttctaatgtctttccaaaggctcatcccataggactcccttacctctctagtggtctaacccctttccccctttccaaatttaccaacaatgactttcctccaaaaactctccctttctaaagaaaatctccaaagccattttccaagtaaagcataattgaattccttcaagtgccttaaccccaaacctccatacttcttatctttgcaaatagctgtccatcttaccaagtggatccttcttctcccctccacatctccccacaagaactccttttgaattttctccaatctaattctcactttccttgggattacaaaaagtcacataaaatagatggggagatttgagagggtgcttttgatgagggtaagatgacctcccttagacaggtattgttttttccatgtagccaattttctcttgaatctttcctctaccccatcccacactctacaagaattatgaggggctccaagaggtaagcctagataagtagtagggaaattccctactttacacccaaaaactgcaacggctctgtccacatcctccactcccccaactgggataatttcacttttcttcaaatttatttttaggcctgagaccacttcaaaacaaataacaacccacttctaaaaaaccaactggttcctattatcctcgcaaaaaagaagagtgtcgtcggcgaataagagatgggaaaccgaagccccttctccatttctccccattaccctgaatcctctaatgaaacctttctcctcagctttagagattaaactactaaaagcttccataattagcacaaatagataaggagagagtgggtctccttgccttaggcctctataagttgaaaaaaactctgtgggagtgccattcaccaaaactgccatcctcacagttgatatgcagaaaagtatccaactacgccacttgggcccaaacctcattttctccaagactgaaagaaggaacttccaattaacgtgatcataagccttttcaatgtccaacttgcacactaaacccgcatcggcgcttcgcttccttgagtctatcgcctcattagctaccaaaaccgcatctaatatctgccttccttccacaaaagcgttctgactgtatgaaactagttttcccataactcttttcgacctatttgccaggactttgacaataattttataaagactccccaataggctgatgagtctaaaatcctgcacatcactagctcctcctttcttcgggataagcactaaaaaagttgcattatggctgcgaaaaacattattctgcacatggaactcctcaaagacctgcatcacttcccctcccacgaacggccaacaaaacttccagaatgccaacgtaaaaccatccggccttggagccttatctccccccaactctgagatagctttgtaaacctcctcttccgaaaaatgcccctccaaagtctcattatccaaagcatcaagcgttttaaatagacttgactccacatctggtcttctcacccgaggttcctcaaacaaggatttaaaataagacccaatcccttctctaagctcctcctctttacttagccgaacacccctaacaatcaggctgctgataaaatttcccctcctccttgcattggccatacggtgaaaaaacttagtgttactatctccctcctttagccaaagagcccttgacttctgcctccaagatatttcttcaaggatgtcacagtggctgaattcatctctagctatccgttggctatatctatcttcctcaaaaataggaccacacctttctaaacggtcccatgagtttagatcctccaaggcagcatccttcctagctgtcacattgccaaaagcctctttattccacctcttcaaatcatatttcaaagcctgaagcttctttgcaagcacgaagctaggtttccccttaaaactataggactgccaccaatctttaacgttgtccatgaaaccttccacccttagccacatattttcaaacctaaacgggcttttacctgttctcatccctccacaatctaacaagatcggctagtggttagaaacgggtcttggaagaagaacttcctcccaatctcctgaaaatagaaagcggtctaaccgagcctttagggaccctccttcccctccactccaagtgaaagttccacctcccaggggaggatcaactaattcaaactcctctataaagcctgaaaaatccttcatcgtggttgacatctgtcttccattactctcttcaactggaaacctcattgcattgaaatcccctgctatacaccacggatcaccccacagccccttgacagcagctagctcctcccatagctccctcctctccttaccgttacacggtccatataaaccagagaagacccacacaaaaccctcctcgtagtttttaaaaatgcaagaaatagaaaaagagcccactttagcctccaatccttccaaaactttcttatcccacatcactagcaccccacctgccgagccccttgcatctaaggaaacccaccccaagtttctaccaatccccaagcttcttacaatcctatcaaacatctccttcatttttgtctcctgaaaacacaccaagtctggtttgtattttctcaccatcgacttaataaccattcttctatcagggtcatgcaaccctctaacgttccaagacattattttaagcttcataaggaaccaatgtaatttgccttccaactccccttcctctgcctctcttccagccaacccatcataattaatagtactgaccaacttcttcagctccctttcctttcttgacgctgacactgttcctctcttgctatcattagacttcctaataacaccccttttattctcaatctccttaaggattctcaaaatgtcttcttcaaagccttcaatcgagacccccaccttcttacaaaatcccagaaatttcttattcacccaaggggatttgatcttttccccttctcctgctgcgactatgtgaagaggtggtgtctgaagctctttaccccgagacttaggggtaaccccttctggcagggtgaaggaacgaccatccttgagtatcaccctcagcggcatcttagcctccaaaggctcgtcacacgtcacctcagactgccatgccactggatactccacagagttccccattcccgaagtagaaggagaagaaaagccaaaggactccccggacacccccccaaaggcattcgatctagggaacatacctggcgattgacttttcagagtcgattccctgttgccttggtctagcggggtcgccttcttctctgagctctccccaaccaagctaggcctctgacgcttcgtcttgaactcccccgacgtagaggcagggagccctaagattgcatcttggatagaaacagggtcttcaccgcctactatcctagccttttcctcgggaatccggagcccccattcagagactccatcacctacggctgcatcagagtctccttctccatagcacatccctttcacgcgcatcatcttgcgtggctcacaccccccttcctcttgttggaaggaggccctgttctttggttcaccttccctttgaatctttaacctattcgccacctgaaaagccgagaaccacaccgagtcctcccaccataacgggatagagaacgaagctaatcccgctattacctctaaacttccaggcacctcctttccattgttcttaacaaggattctagcccctttcctgtaactagattttttggtctcttcatccacatctacaaatcccccacaagcatcccccacccttttgaagaactccatactccaaaactgaagcggcaaccttgggattctcacccaagatacatccctctggagttccctcctagagcaccccacagttggagcccaccaatctaaagataattggacaccattaaggcaccgactcccctcctccaacactttttgagcatctcctactttagaaaattcaaaaagaagcaaggactcacttaaggaggctacactcacttgaccactgaaactccaatgggtgtttgcccaaatctccaccacccttaagtcgggaactgcctcattctcggcattccatcttcccaccaaacatcgtctgagatctttcaatttagaagtgtaagcctcgttccctacttcaacccaaactccttcacttctttctttagccttcctcttgaacgcatctacataacttaacccgggtcttacaagagaagtttcattccttccaccataggtaccatagtcctctgctccatgtttagagccatcaccaactctggctagctccttcagcttgcttctgaataagtcccaacccaagaggtcaaatccctctggtataataatgaaatatctcctgtcatcttctgaaaggaccgaaaacaagaggtaacgtccagcatcattttgcctcatttctattctaaacctcctaccacgatcattcacatctcccatgaatggttttttccctctccacttgcagcatgcttcaatcgacttcagaatccacaccaccactcctctacttgccttgatccatcttcggaagcctttacctttctccactatctgcacctcacccttactctttgaccagacaatcctcacctcaaaggatttggaatcaatgcggaagaaacaagagggatgcaaagctgagctctgagaactcaatggtggattcatctgaagggagcagcactctcatcttaaatgattccttttggtaactctgaacataggagttgaatagaaacttgcgagactgagatcttttattctttatcttcacttcaaattttgtttattttgtgttatctactgctactaatcaatatattattattatttatttatttatttatttttttcctataggtaaatttttgtccccattgggacttaaacctagaacctcctacagacccttcccatccctttgccacttaagtcaggcctcaaggccctcatcaataaaattgattgctactcaatcaattttctatagcctatatatgcacacacacacacacacacacacacacacacatatatataatgaaaatatctatagtcgcatatgtttaccaaactgttaatgctggattgcaattgaggattcaggtctgctaagttccttaaatcatatggatgtgtttctggctgagtggctaaggcatgtttgaccagaaccaatcttttccaagaactatgacaaccttgggcctggatttgaagctgagatccatcatgtccttgtgtggccggtttatagtactgaaatttccctgggtggggtgtaccgacctttttcttagtatgttgatgattatctaatatgttgataaatactttctgaagtcttagtatcaatgttgacaaagttattgttactactaggacttattgatggagatattgacatgtctgaagatcttaagaagcattacttacatgtacataactctatctattgtgtgtgtgtgagtatatgcacatgtgcttacgtacttatgcttgcatcaaaagttagagactgttaatccatcttgattcacagaagatatttttgcatgaaaaggctctctcggttccaaagaaagtgtgatgtaaatggggcatcttgtgaaggcatgcatggatacaacacctaagatatttatgcatcttagatacacctgcactatgctcgattacttatcttgccaaagaggtgggcatagaaattggaagattcttatatatcctctttttacttttaaagaagccaaagtttgggtttaattagtataataagtgagatgtgttctttgtttgtttcttttccatcattgggatgttaaaaagtaaaagatttggtttgttacgactttagttggtttaggtttatttagttttagtaattttgagtccaaaatggggggttctatccttgtagttatagcctagggttttaaatgatatcatttcaattttggtatcaaaagtcaagtttgaagatttgatttaagaatggtgtttggtcagtaggttttctgttgtggtgaaattttagaatcatactatagctgaaaggttgttagaatgtaattgatagtgacactaaaaatagaatgttggcagcagtagttgttatcagagagggcttcccaggttgcttagttgtgtaagcaaccaggcaaggtgagtgaatcttgatagctttttgaagatctgcagcccccagcaaggtgtcgagatagtgtggtaagcacctctctgaggttgaggtgatgaagttttcccccctggaaagcatactaaagtaggaccaaaaggtcaatggaaaacttgacttttatttatttatttagttaatataatcatgctcttaaagcatggtctgataggtgtgatcttatttatcccacctcattgggagatgttagcgaaagtaatggctggctaatgggaagaatggtgaagatccttccatatgaggaagatgatttgcctttcacgttaggctttctttagtataatgaaagcaattaggctatcacttatttgtgggcttctgccttgggcaaaatagggttctaccaccttcgctatgcctttttccttcgacaacactaggtagtcctgaatacaacaatggtaattaatgaaactagtaatatcatccattccattttattcgaacgacatcacctttaggtttcatatgctattacatatgtggtttccatcatattttcttgtgaaagttgttggtcataatggttactcaaccctataagtcgtgtttccctttggacatgatggaataaaaaataatattgtgggaagatcagagaataattttgtttctgatgagcaatcaagcgaggaggcctatattctgccagtaccaaaagatccaaagttgttgcatgaagaagtgactaagataagtcctcttttgttacagtttgcaacccaaattgcatgcttatgttagaatctctagttcaggctttgccaaagtttctaacaagaatgggaaaaggttgagaaatctatagtccattcaagttgctttatgattttattatatcaaagaatgaggtcagtcataaaagtgttttcatgttctatcgaccttgttgagaatagggatgatatttcttagccaggaccaaataatctaaatggtgaactctggctcatttggcaagaggttgggaatggagagggggatggggggaatccatctaccacagtgaataaacagaggaaaaaaataaaataaaattcctaatgatgtgttccaaggtgcagtagaattttgtacactaaagttataccaaagaaagcctttggccggtctatctgggattcatcagcattacacccaattgcttctcttgccaaatgaaatagatgtttaaaaggagacggaagatactattgaaagcagaagatactaatgttattgccaaaagcaatagtttattaatttttgaactctgttagcttgagtaaatcaagtaagagtgtgaatttgatgtctacatctgggaagatttttttttttggtaagtctacatctgagaagatgcaagatatttgttagatctcttaagagtcattctactaaataaggtgcatatacctactacattgttgatcccaatttcctttttcctggttaaactggctttttgtttccaaaagttaaaaatttatatgtatttgttaatattaaactccactaattcttgatagtgattgcttcagg

SEQ ID NO: 13414 - DNA, 7723 bp, Vitis vinifera
  Intron number 3 from transcript GSVIVT01009782001 (locus G SVIVG01009782001) derived from phytozome v7.0 (chr-ID chr1 8; pos 11219769 to 11227491 reverse strand)
acaccaattgggaatctggaagacatcacttttcggtacttgtgaaatttgacaaattatttccatcttttttggattctgttcacaatgcttaaaattccacttgcccatgtgttgctatttgttatttatttcattctttcatggtggagtcaagaaccaaacattttttttaattttttttatttcattgtttcatgtttagatggaaaacaaaagaaatagataatttaatatataaaattctggattaactaagccttttgatgattgatcatgttcttttggtttcctttttctgatcatgttcgtttgagttcctttttctatcatacttttttcattgcacacaaactattttggagtgtgtagtggaaaatttgcttcgaataaatttaactctatttcaaacctttttttccatggttttcatggccttattaagagaactttgcttcttactaattcaatagtgtgaaaaggtgtgttttggcaaaagtaggattgcaaggcatttggccattttataatgaatggttgggttaacaacctaggatattctagaacatcttgaatatatatcagtgctctaccaactttaaaatagttgtttgatgggtgagattgtaactagtccatgaaatcaattatgaagctctgaaattagaaaagattaataacatgtcatctatatttcataatagaaacaatttgtaagttagaatacagaggaatgtcatataatgttttcttttctttttgtctttggcaaaactaagatgtttcgattgagaagccatttagcgaaaatgtttggagaaccaagtgttaacacagacttcatgcccaaaatatgtggattaaatttgcttaattaaattaataaggattcaaatttctatcaataggtgtggattgaggatttaaaagaagttcaatcttgtagtaaaaaacttttgaagatgtttggttttacaaacttgatcttaagttattattctcttgtaacaagtggtgtagattgtaattcttttcaatataataattttttgttgactaatttgattgaagataccaagaaatgaacttcctattttccaagattttattaaaatattaaggaattaattcttttatttctagaattcatgatggtataattctcttatttccaaaattgtatagttatatatatttccctttttttttcttgatttgtaaggtagaggatttctaggaattagtcaactttcttggtgtaatttagctttcctactttgttggattatacactacatataggctttaaggacatcatggcataatcatcgagccaatgtcaagatctaaaaagatcaaataaaacgatacatagacaagtaaatcccttatgaattctaaggtattcctttaatttttaatttaagtttatgaggattcatcattcgaagggaagtagactactcaataatatttcatttatgttgtaattgagtaaagaatttagaaaatctaaataataaggaagaatggatcaatgaaatgttgcttggtcttcactaggtaaggagtagttgttttgaggattctttagaatttgaaagaatactattgtaatccctccattttgtccttgtagcacatgctttgattacactttgtacctcttgttttgtgccgttgcatagtatgtgtgtaggcgcccccttttgtatggttgtttttgtactccttcattattcatttgctactcaattttcacattggtttttgagccacttttggagaccttttagaggaggttttggatccacactttgacttcagtggcaccctaggagcccccaaagttttggcacatttagagctcggacagggtttcattagcacaaattgtgcccttttggccttaatcggtctaggtaattggttcagctgatttcaacgtgtctaggaaaccagttgagtaggtcgagctacttgaaaaacccatgttttgatccttttttatgcccttttctttgttagacttttttaacctttttggtagtttcttaggttggttttagagagtttttgtgggccttaacccggggttttgggtctttatagttgagttttgatttaagagagtttggaagagaatttgaacttgggtgaagatgatgacatgtgtcaaaatctctaccctcccttggcttataaatatgagccttgcaactcattttcaaagggctctttgatttctaaggggtaactctacccatttctagagacagaagaaagagaagagaagacttgaagtttgaaggtgagtttggcttagggaataagatttttgcatactaaaaggctaagtatcatacttagggagaagtttctttggtaagtctttcttaattctgagcagtgttttaaaaggttattgaggcttacaccttgaggcttgtctctagaaattagccttgaggcttaagcctcaccctatcaaggcttatagctttgacgctatagcctcaaggttgttgaggcttaagcttcaaatatccaaagagtttttgacctttatgggctttcggtatatattttataagtgacttaagtcttaatattcaatgagttttaatgagttctatcatctatgcttttgtggacttttgatattggttaaaccttttacaaaataaggcttagttgacttccaattaactttttaaatagaagggaaaaagagagattgagaggaataagagaagtggtaactatcttagtgattgatttcatataaaatctaattattgatagataaataaaaaaagataccactacaattggtggacaaaagaatgatggatggatggatattaacaccaatgtgccacactcaactccaaatgaccctccccttgagcctatatatggggcaagaagcttttggaacctcttgaagacattcactagtggagaagtgtggaaggttttagagaagcctaagagatctaaagacatcatgtaaatacttgtacataagcttgtacatagtctttatctagaatattttagggaattcttgatttgtaaggaaccctccaaggttccagagagttcctaaggtgcctataaaccaagacatcaaacaagcgagctttcaaagtattgtaaaacatcatttgagcgataaagctttctttccttaaagcttaacttagcttggctagctaagtacgatgggaaggttgacttagcaatgccaagagtcttgagttgtctaagtgctgcacgtgagcttaggagaaagcctaagtccgtgataattggtatcagaacatgactatgaagcaggcattacgggctccaacattgaggagattagtgagcaaacccgtgggagggagcccaagcctattgcacgtggtaggggaaagaaggataagtcttgtgatgcctttgccaacatggaggcatggctagccaaggtggagttagccatgacagacacctgaaaggggatggacttgatttagcaaggcatggataaggggttagaagatctaagggtgcaaatccaagaccttcgtgagagggtgctagtctcacaagttcaacttgtgtcacacgaggagttcatgtccttccaagacaatgtcataagcatgcttgctagcatggagtcaaggatggaggccttggttattcacatggagacctcggactaggaagttagacaagagctggccatctacaagactgctatgttagcacgggtcatggccactcacgagacaccaagggtggaggtgccaaagccacatgtctttagtggcaagagagatgctaaggatctagataactttttgtggcacatggagcgttacttcgaggctattgcattgactgatgaagccactaaggtgcacactgtgaccctatacctcaccaataatgctactctatggtgacataagaggtttgccaatatagaaaaagacatgtgcaccatagatacttgggatgcccttcaagagggaaatcaaaaggcaattctatcctgaggacattgcttacttggctaggaagaacatgaagtgccacaagcacataggctcaatttgtgaatacatcaaagaattctctacatctatgcttgagatacctaacatgaccaaggatgagttactgttcaacttcatggacaacctacaaaactaggttgagcaagagtttaaggtgacatggtgtccaagacctagccacaaccatggcggtagcggagtccttagtggagtaaaagaggagagactcctctaaacccaagccaccatccaagggtaatcatgctaaaagtgggagagacaaggggtcgaaaggctataccacacccaaggaagggttaagcaagggccctagtggcaaggacaacaaaggcaaggacaagaaaaaggagttcatgcctagcactaactacttcctatgcgacagtccacactgggcacatgattgccctaagaggaagacccaaaatgctatgatcaaggaaaaagaaaagaagggtgatgctcatgtcgggtcgatgcaactcctaaacaccatcaaggctaagtcggtgcctgaggcacctcaaagcaaagggtcgatgtacctagaggcccttgtaaatgggaagcccaccaaggccttagtgggcatttggtggcactcataactttgtctctgaggatgaggcaaaaagacttgagctctaagcatccaaggaaggtgaatggctcgaggcagtcaactttgccactaagctgctacacactatagcacatggggtggctatatgcataagtatgtaggaaggcacgtgggaaggcaagatcgacttcatggtggcacccgtggatgatttcaagattgtattggggatggacttcttacggaaggtcaaggtcatgccattgccctttctacgctcaatggctagcctagaggaagaaacgccatgcgtagtctctatagtcacggaaggttcaccttagatccccttgctatcagccatgcaagtgaagaaggggttgaaaaataagcaagtgacttacatggccaccctcaaggaggagaaggaagatggttcgggagaacccatgcctaaggtcatcaagggagtccttgacgagttcaatgacatgatgctgccaaaactgcctaagagactcccacctagaaggaaggaaaatcataagattgaattggagccaggagctaaaccccctgccatggggctatataggatggcattgcccaaactgaaggaactaaagaggcaacttaaaaagttgctagatgcagggttcatccaaccatccaaggctccatatggtgcactagtcttgttttagaagaagcatgatggatcccttaggatgtgcatagactatcgggcactcaacacggtgacggtaaagaacaagtaccccatctcactcattgttgacttgtttgatcaacttggtagagcaaagtacttcacaaagctaaacttaggctactaccaagtaacgatagcggagagggatgagccaaagactacgtgtgtgacctgatatgactcatacaagttcttagtgatgccctttagtctcaccaatgcactagtgatgttttgcatgctgatgaacaagatctctcatccatatctagataagtttgtggtggttaggaacataggtcatagttcaactgcaaagctcctacaccttcttaaccctaaaatgaatagggaattaagttcacaaaaagcacggaatgcctaattacactcggatttaggaaaataagttgaaatgcacataacaacattcataaagggacattactctcatgtgaattcaaagtatgtgtgccaagccaagtggcaaccattaataaccataaagtagccatggattcaatcctttatgatcatggaatgatattcacaggagctgaaaaatgactccaaaaaatcagttttgaaaatctttgctaaatgaccaagaaaaaaaaaaaaacaactagttatgttttcaagcaaaatggctaggctaaaagcccataaatatggacctaacctttggccacgagattggtcatcaaagtgagtttgaaattcaatcaaaaatatgttgaaatcaggagttagaatattagaaaaaacacctgtaggtcttaatcttctttttcaaaattagttaaaaacatttccaaaaattagtaagatgagaaaattgaaatccataggagataaacaaaaaaaaaaacaagtaggtcacaagtcaagacaaagtctatcatgctcctaaactcaatgggatccaaaaaggaaaatcagtccaagaatcggataaaacaaagtcaagaaatgtttaaacaacatctaagcactaattagacatatatactaacatctaataagcatccaaaccaaaaagaaaaaagaaaatcaaatttagatccgaagatgaagagaaacaacataaagccaaccaaatgatcttccaatatccatggttatgtatggattaccaaaaatgaccgaaaacaaattgaatctcggaatcatgaatgacttatcgaagaaactccttcctatgtacaatacttggcttctagtatgcaaaagcgccctctcccaagctaagcttgcttccgaatcttcaagtcttcttttcttctttttatctctctcaaaatgggtaaagtttccctttagaaattagagagagctcctcaaaatgagccccaaggctcatatttacaagctaagggagggtggggattttgtcatatgtcatcatctccacctaagctcaaatctctcttcaaaactctctcaaattaaaatctaatcaaagagaccctaaagctcctaggttaacacccacaaatgctcccaagaactccttagaaaaggggaaaaaggtcaagagaggaagaggggaaccaaaaaggggcaaaaaacgtcatttttgagcaatcaattgcctagaccacctgaactggttttctacatcccctgaaccgagtacctagactgattgaggccaaaaaaggcccatttcacacaaatgaaaccaaagtcacgttgtagatccaaaactccctctaaaaggtcttcaagagtggctaaaaaattagtatcgaagccaagtagtagatggatcaccaacgagtgtaagaacaatcatgcaaatgggggatcctacacgcgtactacacaagggtgcaaagtgagaggaactaagtatgtgatcaaacatgtgctaggaagacaaaataaagggtctacaactatatcattttgtcaaaaatgtaataaataaaatcattctttttcataattatattcatttctacttacatattttatgcacaaaaatatgtgttgccatatttctgacatgtatgatggggcatgtggcattatgttcatttaaggaggctcatgaaatgtggtagtttcgaattggccaattggctataatttaactagttatttatggacattttttattttattttaaccatatttgactttatggcaaaccacaaaaggttgaatttcccctcttaaacctagcattattattttcaaaaatgagaagaatatcagtaatttaacaagagaaagcaatgccttattttttactattaatttcttatttccaatccatcagcgctcttcgtgttttaagatcagcca

SEQ ID NO: 13415 - DNA, 10229 bp, Vitis vinifera
  Intron number 5 from transcript GSVIVT01023010001 (locus G SVIVG01023010001) derived from phytozome v7.0 (chr-ID chr1 2; pos 16939189 to 16949417 reverse strand)
ttgcaaatttgaggccagcatctgtactaccacaggtaatgtttgttataatgcagtagaatacaatctctgatgtttcgcttcatgtgtaaatgatatgtattttactgtaaattgtttgtaaaaatgcataacattaattcgaggtttttattatacattgatgccaagttgtaaggcttatggtatgaactgagaatatcaatacttaatatggttgtgggattggatccagtcaactccaaatgggtttggaggacttggggcgtactcttttaatttcttaaaaatcaatcttaggtaagctgcatatggaaaataccatgatcaatagcaatgattagagaattaagactgtaggagctttaaagccttgagtattaaccagtagccaattacaattgaaagatgccctttccatttgatacttctatgtataaactagtacacaagatgacctcttatatccatgagttagcattaaacataattagactgtaatttgattcaatctaagattagattaaaatattgtatgagaggaaacatcatactatcaatcatagtgatgatgagatggagggctatcaatctagtcttgatgaaagtgatgacaattttaatttcaatgatgactatgtttatgatgcctaaagcttctctaggatgtttatctttttttattttgatttttagatgtttggaaaattagaatatgtatttagaaaagatgaatttctctaaacaatataatgtttcttatgatatcaccttttgctttagactaaaaggagtcctattgccttttgcttttgccaacacttacatattattattattgttgttgttgttgttgttgttgtgcatatttcaacctttccttgaaatataccccctctaaccaaaatatttgtctccaccctgaaatatgcccccttattgtgcttatttcaaccatgccctgaaatatgccccctctaaccaaaatatttgtcttgcatatttgaaccttgccttgaaacatgccctctctaatgaaaatatttatctctgccctgaaatatgcccctctaaccgaaatatttgtctctgccactgctatctatataacttcatgcaggattacactataaggtcaaaagtgatatctacgcccaaaattttgaccatcaaagttgttgggccaactatcacaagaaaaatcgcttcccctcttgccatcactgactccccattaaaatctacaagcaaactattgctagatttcaactgctccactgtaattcccatcctttgatatgtcgacataaacaaaatattaattgaacttcaggcattaattaggatttttttgaactttgcagttggccattggcaatgtgaccaccaatgtattgttgtgtggaaagttgacattgcaaagggtgcttcctaaaaaatcaatttgttagaacatggttgatggattcccacaagacaaactttcatgcgaacttaattaacttgtttgatcttggtaactttgcttcttgggtcatcgccatgtgtaattgcaattaccctcctctgctccttgtcgacaaattggttaggagacttttgaggccggtgggattcttgaagtcaaccttgacctttgaatcaaaactgctgaagctgcctcctttcttaatagatttcaaccatgtgcttgagacttgtgcagtcctctataccatgcccatgagtccagtgatatgtgcaatatttacttatatgtccatttacttagatgcaagagccaatacatttccaaaggaggtaagatcacgttgattcggaggacgttggcgagtatgcccatttactatatgtctatggtctttatgcccagaaaagtcagattgaggttagagcagatttagagggattttttgtggggaggtggggcccttgaaaagaagcctcatcttgttcggtggagcttggtttgccttgataagagtaatgggggttgggggtaaagtgcctttctatcctcaataaggctctcttgtgtaagtggagttggagatttgctattgagagagaggctttttggaatcaagtgattaggggaaagtatggggaggaacaagggggatggtgttctaaggaagcaaggggggtgttgtggaaatctcttaggaaggattgggatgttgtaagaagtagactattttttgttgtggggaatgggcaaagggtaaaattttggaaagatttttggtgtgggaacaaacctctttgtgtttcttttccctccttatttgctttggctgttttcaagtatgcttgggttaaagatgtgtggtgtagcaatgagggtggggggagttggtaccgtttaatgactgggagttggatgaggtttgtagattttttctggccttataccggaagagagttcaacaagcagtggatgatagggtgatttggagagagactaaatgtgggaagttttcagttaagtctctttacaaatcattagtattaggccctctagcctctttcccttcgtcagccattcccttcgtcagccatttggaaagtctatttgcagcctagagtgagttttttttgggtgggaagcaacttgggggaaggctcttatcttggatcaacttcaaaagagaggatgggctttagcgaacaaatgttacctatgtcaaaggcacgaagaatcaataaatcacattcttctccactgtgtaaagacaatgactctttgggcgttgcttttctctatgtttggggtgcaatgggtgctgccagccactgttaaggagatgcttttggggtggaatgggtcttttgtgggaaaaaagaggaagggtgtttggagagcaagtcctttgtgtcttttttggatggtttggaaggcaaggaacaaaattgccttcgaggaagaagcgctgtccattcaaaggcttaagtattcgtttgtaaattttctttggtcagagacgaaattgtctataaaagatggtccctcgaccttagctgattttgttggttgggtgggaacccgttaaggttgtgtgttgaccttggctttcagctagagagtggggtgtgtgttctttcttgtttttctttttccattgctttggtggtttttatacaatacttttacttttaaaaaaaaaataaaatttacttgtatgtcttttttacaaatttccttatggttgaggtggccaatggaaatctgtaagtttgcctaactcttgaaagacatgtgcatttatcctatacattttacttctgcttgttgactcatctgatttcattgagtgctgctttttattcgtggtgttagtggtaaccagtaccttttagttgagatgctgcaatgtcctcctccagactggcatgtaggctcttgaaaaagtgtagtagctagaagtcctagcttgaaagctatcgaagtagttttattgtcatacacttccatctgaaccaggctttcactttctagtatcctaacattaaaaagagaacttgtatctcttctcttgcatgatgagcacatattggaaaataaaagctgtacatatctctgataagagggctgaatgacaactataagaggaaggtaattaaagctttaattagggcttagaaggcagaccttgtttgtcttcaggagactaagatccaggagatgtccattggagtggtgtgaagtcttggagtggcaaggtttttggagtggcgtgcagttaatgcaaggggaacaatcgaaggggtggtggctttttgggataatagagtgttagggttgactggcatggaggtgggctagttctcgatttcttgttgttctagaaactacgaggatggctttgtgtgggtctttacgggggtttatggtcccattttgaagagatgcagagaacttttctgggaggagctgggggctatctgggctatgggatgacccttggtgcattggaggggactttaatgtgacaaggttccctagcgagcatagtagaggtgggaggttggctgctgcaatgagaagatttttggaggtggatgatgaattgactttgagagaccttccattgcatgggggtccgtttacttggaatggtgggctaaatgggcaaactatgtcaagattggatcgtttcttagtgtctgaggattgggaaagtcggttcagtggggtggtgcaaagcactctttctagatcggtgtctaatcactaccctattctattagatgggggaggggcgaggagaggtcctatgcctttttattttgagatatgtggttgaaggaggaagggtttaaggacttgttaaaagactggagacaagggttcaacttcaggggttctagcagtttcatttcgacagcaaagttgaaggctctcaagggtattttgaaaatttggaataaggaggtgtttgggaaggtggaggttaacaagagtttggcattacaacaggtcaatttctgggatattcaggagaggtctagagccttatcggtggaggaggtggagccctgaaaggaggcaagggaggaatataagaaatgggtcctcatggaggaaatctcttggaggcaaaaatctagagaagtgtggctgaagaaaggtgacaggaatacgagtttttttcacaggatggtgaattgtcatacaaagagtaatttgactaagattaaaattaatggaacttggatagttgaggagagggagattcaggggggttttgttagtgctttccaacacctgttgttggatcctggtgattggtgtccaagttgggatggcctagtttttgatagattagcaggggaagaggcagctaggttagaggaaactttctttgttgaagaggtagtctctgctctttttgatctaagcggggacaaagctccgaggccagatggttattccttagctttctagtagtccaattgggatttggtgaaggaggagatgagttttttccgagaatttcacgagcatgggatgttttttagaagtctaaactctattttcttggtgttggtaccaaaaaaaggaggtgttgaagacttgagagatttcagatgtatcagtttggtgggagggctgtacaagttgttagcaaaggtgttagctaataggttgaagaaagtggtgggtaaggtggtatcctcgtctcaaaatgtctttgttgaggggagacaaattctggacgcagtgttaatagctaatgaggctatagattctctactgaaaagcaatgagtgcgaggtgatgtgtaaacttgatatagagaaggcatacgaccatttaaaatgggatttcctgctctaggtgttgcaaaaaatagggtttggagacaaatgggtaggatgggttaagtggtgtatttctacatctttctcagttttggttaatggcacatcgacaggattctttaacagctcccaagggttgagacaaggggaccccctttcaccttatctttttgtaacaggtatggaagccttaagttgtttgattaagagagcagttagtgggggctatttaacaggctgcagggtgaaagggaaggtggtgagggagttcaactcacccatctgctgtatgctaatgacacaccgattttctgtgaagcctttaaggaccaactaactcacctaagctgggtgttaatgtggtttgaagccatatctggtttaagaattaatttggacaaaagtgagatcctaccagtggggagggtggataatctagaggagttggcccttgagcttaggtgtaaggtagggatgctctcttcctcatatttagggcttcctttgggtgcacctcacaaatcagtggcggtttgggacggggggaggagaggttttggaggagactagctttgtggaagaggcaatatatatcaaaaggagggggactcactctcattcaaagcactttgtccaacatgcctatttactacatgtcaattttgcgtattcctagattagttatattggacttgagcaaatccaaagagatttcctttggggtggggggactttggagaggaagactcatcttgttaagtgggcggttgtatgctcagataaaagtaaggggggattgggcgtaaaatgcctctctacacttattagagctcttttgggtaaatggagttgacactttatggtagaaagggaagctctttggaaacaagtcattagtaggaagtatggagtggaataaggggggtggtatactcgggaaggtagagagggatttggcgtggggttgtggaagcagattaggaaggaaggttctcaattgagcaactacattgtgttttctgtgggtaatggtaaaagaataagattttggatggattcttggtgtgatgatgaggctttatgcaactctttcccctctttgtttgctttgacggtttcaaaagaggagtgggtggcggaggtttgggacccttcggttgagggggggagttggagtccttgtttgtctagggctttgaatgattgggaggtagttttggtggagcggttgctcatgacaattcaaggaaagagagttagtgcaaaagtggaggattagggtggtttggaaaaagacaaaaagtgggtttttcacagttaagtctctttacggtgttgtggagccgggaagtacaatccagtttccaaggaaaataatttggagtccttatgttcctcccaaagtgtttttttatttatttttgcttgggaagccttgtgggagaaagttttaatttaggatcaactcaaaagtaggggctggatccttgctaatagatgtttcttttgtctagccaaagaagagtctactaatcacttgtgggagtcattattcactttctttggggtgacttgggttctcccttgctcggtaagggagactctccttggttggtttgggtcctttgttagcaagaagtataaaaaagcttggaagttgactcctttatgccttttttgggtggtgtggaaggaaagaaataggataacattctgcaatgaagagttttcagtacataggttgaagaattcttttgtgtgtagtttatggtcttggacaaagttgtatttagatgctggtcctttatctttaattgacttttttaattggttgggctttaggtgagggcaggtgaggttttttgtattccctcctttttgctcttcttagccttatggcgtctactgtatacttcctgaatgccttggattgtcctcttggcttcttttttctaattaatatattatcttctgtgtttacccatcaaaaaaaaaaaaaaaaaaatctctgataatgaatggattgaggatttcgtcaagtcgtgaaatcatgctagttctgccccctgcagattggacagaaatgctttgcatatcagtgcatcattgccatgcactaaagtcaaaggttgatttgaataaatgccttatgtgatgtacttggtctcccatgccatcataaactcggaattttgggaagattaaccaatgtcagacttctatttctaaagtatgagagttaaatggattgatcagcccttgaaccactcaacttgctaattgctgggaagtctttccattatgggaatccacctatgcctttagctcttccaatctcatttcaagaaaccctgttttgtgaattaaatgttctgttcattgatttatcctcctcgatatagaaggaagactccccctgaagggatctcattaccattgagggtgtggttatgggggagagagaccaatgcaaatgcaattgaggacacaactcttcattatttggggccaatggcttgttgtgttgcatcaatgaacagttttttttgctcaaactagacctgtttttgatgcaagcagtcttctagatgccttaaagggtcttctcctccactagtttcttccactgtggctcctatcgcctgtgacatcttgcatcccatagacagagccaaagatgtaggagcttcaaagccttgagaattataaaggtgaccaattgcagtcaaaagatgccatgtctatttgattcttctgtatttatactagtacacaagatgtggttacatgaacgtgggtagtggttgcaaacattgtggatgccatttccatttgattcttctcttgtgattgggctctttttaacttgtggtgtgtaaatccaggtgttgagccttattctatcaagatggcaattgggctggatgtgatgttggtatcacgtggtgtacaacttttgcattcattgttcagcttaagcttggtggtgctggaagtttttctgcctagtttaaggggcacctataaagacttcacctatgaagcatttcaaacaacacaaaaccatctctcacctccacacacacatctatccagaatggaatttgatttggtgggtttccagaatttcttttattttttcaagaaacctggaatcatatccctaattccatttgtcttgaggcttgcatatacatttgtttctttgtttcatttttatacaaataaatgaataaaacttctgaatcgttagttgaaaaatttatttaaagaactgtccccaggattttttttcttccaaaaaacatatctactatcaaattgtattcaatgaatgaaagtctctgagtggctgtagagacttggtatccaagtttttgactgcatgttttcacatgattgtcattggggttgactgaatctgtaactaatatatagtaaaaggcaatctttgtgttgttttaaagtgctggcaccttatatactaatattctctttcagcccattcatcaaaatccacattgagcttgttgcacatgcttcgctagattgacttggcttctgtatccatcagtcaatattggcagaccatttcccaccaaggcctctctaataatgaatgaagttgtgccttgtgccttaaaatggcatgctaccaatttatcactagattcaccatatttgaactcaaaaaaattcagacactcaaaatttgatgtatatttgattacctatctcatctaaactaattggagggtgtgacctgaatgtttggacaatcaaataggttcagtttgtatactttttttatttgatattaggacttgcagcaatagaactttacccagctcactccatatattttcatattaagttttctgaaaagtttttgtaggtccaatatagaggatttctctgtatattgctatctgaaaatgtggggaaatcataggatacatgatattcattttttggagattgtagggatgctgcttttattatttttgcttatttagtatgaatttttatgttctagtgctattctttgtgaattgtttgatatttaggttcctcattggcaacccaatttttgtttatagtttttcaagttttagtttcactctttatagattgtatgatattggtgcctgattagagacctaatttttagtgagccattccttatatctgatacctggacctgataacatccatcaatttgggtttcactctgtggttgggggggagagagaggtgcctgattaggggacctcattttcagtgagccatatcttatatctgatacctagacctgataacatccatcaatttggggttcactatttggtgggggagaaagagagaggtgcctgattagggacctaattttcagtgagccatttcttatatctgatacctggatctgataacattcatcaatttgggatttgttatgtgcaggaaatagtaatagaattggagggagagagggagggagggagggagagagagagagagagagagagagaggaaatagtaatggaattggaaatgacaatcacatgatactctttttattgaagatttgacttcattctttacagtccacatttgctgaagttacacttctcatgtatgatcgatagaagagtaatgtgagaaaggtactaagttgtgggactgctagtcaacattgtaagactgtagaacaatttatggatggaacttgctacatgtgttgaggtgtaataggcttgtgatggggaaactcttggaactattttatatatctataaacagatgtattgttctttttagatttaaacgtctctatgaaaaatgagtaattctttgttttcacattttaagttagtggacgcttcaactttaaagaaagaggttgc

SEQ ID NO: 13416 - DNA, 5868 bp, Vitis vinifera
  Intron number 10 from transcript GSVIVT01001945001 (locus GSVIVG01001945001) derived from phytozome v7.0 (chr-ID chr 13; pos 15160848 to 15166715)
gaattaccaaagaggacatcatagatatacttcaggtaattttttgatattattaaccatctatttattattttgtttttttgaagtttattgcatatttatattttatagatgatggtcatgcttttgaagtttgatattgatgtaaactgggtagtcataaaagtggtgatatttcattcagtttggatctttggttaaattgtcaaaaacattcattatataaattttatggaaaacagtttttagtaataaaccaatttcagttatgtccttttggactcgttttaatttaatgtatagtttttacctataaaagagagtaataagcaaatttcttggaagaaattgttatgctgttatgcatatgacttctaaaagtcaaaaattgcaggatatgtctttggctatggacatgaaataattcaataagaacttcacacaatcaacataggctttaagtgctgagtttgaatgtaggtctttagaatctaattgttcaggacatatccaaatcaatttgattcagtaattctctctctccctccctcccttcctcccgcaccaattacttgaatcatccacatgttccctttttccatgccattttatttagagccacatgctgcataaaatcatttgctgtatgtcttttcctttgccccaagtttgataggcaggcagaagacatgatctgaatcttctatgaaacccataagggaaaggttagctctctaagagtcaaagccatttgaaaaaagggttttaggggagtctttcaacagttgatatgaattttccttcttggaaattctgttgtcgtgcttgtttcatatacaccaaaacaagaaaaaaagcaccaaattccacattttcctcagatttttttttaattacattttagttctggtccagcttagaggaagcaatctgagtggagtttggaaaaatccattgtagatgaaataaagctagaacaaggtctcaaagcttccaggctttggcactatgaactagaatatgactagctaactccttcacccaatacaaataacacatgttgaccaatgtccattctcttttcatcagctgatcaactgtcaaaatcttctcccaaatggcttcccatatgaataagcaaccttggagaagattttggtattctagaattccagattgggaccagaattccagatctgtgtagctggaaacttcttaaaagatttcagaacttggagaaaaataaagaaatagaggcaggtgtcatacttgggatcctagaagctttggctatgagagcctcattcgtgatagacacctgggtaatcaatgcctccatgacaagaaggtgattggggccccaagcctccaccgagatgtagaggacattttgggtttggtgtctcttcacaaagaagaaaaagctctagattccaccatggacctccaaccctctcttcaaattaagggttatgggttcccctgctctttggcacataccaactaaggatgaaaatatcaatttttacaaatatattggtagttgagtttaatgaatatattgggaaatatcggtgaaaatttgataaaaaagggggatgaaaattaatcaaaactcatagatgttgggaaaactccaaaaaaataaaaaaataaaaataatgataggagataaacaataatacatgtattgaagttattttaatgaagaaattgatatatgtatgataaatttgtaacattaggcaataatatattaaatttgaaaacatattagtattaaaatgataatatatttagtttaaatgtattaaagaatagaaaacaaacgatgatatatatatatatatatatatatttagaatattgaaaattttatttataaatttacatttgacttatatttaattattagacaaaagacataataagataattaaaattaacttatttaaaataattttatttttaattaatgtataatataacatataaaagatactcataatatgtgtattgataatttcatgtgcaaatgcaatactaaagaatatttcgtccaacagcatgggccttttatcgcaaacacaaggacctgggttcaaaccttggtcatgttatgctttaaagtgttttctttcctgttcaagttaatgctttaaattgtttttatctcgttctagtaaaagcaatcccacatcagaaacagggaagaaaataattgcctatttaatgaggtggtgtcccttgcattgtcaaatatgacttgtgggctgtggggctgaggcccatcacttggcccagtacccattaatttagaattttggtattaaatggaaatgtggtgctgatgttgcactgaaaaaatcggccatattactgaaaaatcggtaaaatatctatatattgccaataagtcggcgaaaaatgggaaaaaaattccaaaatttcggaagaaagagatattggccccacttatcgtgtcagggctgtctgatacccaataaatcaatgaaatattgctgattcatccagatgttttcatccttgatcccaacaacatggggctatcctctggactgtgtggctgcccctctaaaatagttgggcccagcctacaagagactctccctctttttaaggcttgcaaggccctgactaagagagcccattgtgactttggccctctacagaaaggtggggctggccctggccctcatctgcacctattgaggacttttatggctcagtttgctttatcagactgcttctccacacttgagcctacttcattgtaagatgccttctcatcctccacaacttcactttgggtgaagcccatcttcctgtcaggcctgcagtcacccccaggcagattttccctccatctatagcaagccttaggggaccgctgtatgttcagcattatgttgcagaggggattaatttgtggtgcccagcattacgtcttaaaaaattgctggtgtcatagcctgttttacagcatcttccttttaacttgttggatactgtatgttcaaatgataccctacatgcaccttcccacttgttccattcggattaagttatggatgacatcctatataaacatgcaacatgttgcatgggttcagatgtaggtgttgggcttgtgtctaggtgtttgatccttcacacaaattttttattcggagattctgctaaaagggatcttaataacaattatggacacttggaaacaatataaaagtgcaaataaaaaaaataaaaaaaatcaactagatattaataaaagacaaagatatctgtgataagaactctccatcttttatcttttatccgtatctttatcttttttatccctaaatattttttatgcatcttccagtgtattttttcaatgtaattgtttgtatagaagttgaaaagaaaaaacctataaaagacaaacagcctgatctggagagtattagtacccacacccatacacttgtgatgtgttggaaaatctgaaactagcttgggttatctagaaacttaaaaaattttcaaaacagtttattatttagccaataaaaacatgttttaattacagaattttggtttaagttctgaagagtgctttctttctccattttcccgatgtaaatgatatgtaaaaaatctcattcttcttcctgcaggaactgatattcctaaatgcattagattttaagtacaatactgatagacttcactagtattttgattatactgtgcaacttttgctactctctctagtttgggcttcccacacatttctgacctttaaacatccttctcatgataagcaacatagtgctttcacagctcatctctccccttaattttaaagaagcaactcctccaccttaaaagggtgcgccaaagtatatgtgatgtatacaagaagttccatcaggcgtgcaaaaaggagagagagcaaaaaataacctgcctctatctacttcgaggtcaaccaactataaagcttattatggacatggaatagtcatatatgcacacaaaaagttacacataatcccaaaaggtacacataaaagaagatttgatttcttgatctgactgctcagtgtctttgaatgaactcctatttcttttcatcctcacatccagaaaatacacaaaggagtggccttccaagctttcttcctcttctccacaaaagaatcatggcaactgagaagctttcttcttactgaagagtacattgctttggtcactccaaaaaactagttgtcacaaaattcttgctttgcagtagtcttggagcatatgatcagttgactcctcttcccctttacacatggcatccgttcagtatactccattcccttgttttgagttggcctagcattaagatcatttcgcatacagattcctaagcaaagaggctcgccttcataggaaacccaagggttccacattgtgcttgttgggaaagcctcacttcttcactatgataatgaatagtagttagatttaaaaaagaatttgccacacatagtttccttccaaaaaaaataaaataaaattgatgctgattatagttttctaaaaaaggtctccactccctccaattcccaatcatgcaactatctgtgaaaccggggattcccctgtccctcttctccaacttgctcccacatctttgctacttgagtgtcttatcagcggctatagagaatagcaccggaaaggattcttccaaagaactttcctcacaccaactagctttccaaaattttatcctccttccattaccacaaaatgtgtcttattttttgtatcacctctctttgcaactccccctttatacatcatctccaagatctagtggtcttcctggattatattacgtagcatcttcagtagtgagtgaagactcacttttgcacgtatcgcacttggatcaaaatatgctacttctaagcatttttggcttaatatatcttataacattcttttcacttaatagcaattgaagtgtatgaagacatgcctaccttagcatcaggagcacaattctacctagaattatgtgatgctttgtgtccttgagatatgagatgcaatttttattgaaggttaaagatatacctggagtgatgtacaaggaacctttttattttgttttatttttttattttaatgactccaagagggtaatgttccacctagcttggtagttagatttgctggctgtcactttgtcctcaaaagtcattttccctcaccaaaatagctttatgctgttcttgctggtttcttatcacttgattatcatcatgggaagtttgaaagaaatgatgattggaaaaaaataatgaggtaaaagggtaggaaagaaaaaaaaaaatgaaaacaaaataagttgagataaaaaatattctcctatttgctccaatttttaccccttctatcaggcgaagtgaagaattttgaaatgtaaaagtttctacataataccattttatggtgaaccaaatagggccttgagatttttttccccatattttccattttatgttacaattatcctctggatagtcacttcagaggtgactcattcatttatttttttggccttgattggttctaaacatcacttgtgtggcattatggaacttctatgataaagaagttattttgtttgaattctgatgcttcaaaaattaaaactaaactcatttgaaacaaaaacctgaattatagtcctttatttatgagtgatgaatgacatgttcttctgtgatggtcagtgattggaatgtgtatcaggtaacactgatgaatatgtgtgcatgtgttgtgaattataggaatatc

SEQ ID NO: 13417 - DNA, 28264 bp, Vitis vinifera
  Intron number 8 from transcript GSVIVT01010141001 (locus G SVIVG01010141001) derived from phytozome v7.0 (chr-ID chr1 ; pos 16214486 to 16242749 reverse strand)
gagtgtgtctttgcgggcattggatgtatgtgttgttttgcaatgattcttgtttattatattatctggtgattcaatgatttttcctttagtttactcatagattaacctgtattaaatcggattatgttggtggtctggtgctatggttcaaccagtaggttatgatcatgttcctttttatagtacatatataattagaaggtaggacaatgttaataatcccaaggatatgcccagatgagtttcaaatgtggaagatcaattggttgatcaagtgaccagcataacaaaacatacatttatttccaaaccatcacatttcctagagttttctttacagatgggtggatctgtttttattaatcagagatcacttgtatactgcagcataagcaaaatcagaaaacataagttgtgagtctgaaagtaatgtgtcctgtaaacctcataaagtctaacacaaaccgctcaacattatcaccttggaaacctcataaacttgttaatatgaaaaactagatgctcaaatgaaactagatagatgctaagttccagaagttccctgtatgacaatttagggaattcttttagacatgaattccttgtgatgtagttttaaaggaagctagacaataaaacactgaagaatataattgtcacatcccggtttttttttcaaactgaacaattgatactcaaacacaatataagtgctctaaaaaaatatggggatacaaaaatttaaatgccgagttcctgcttgattttgtgcataaagagaatatgaaaaaactattataaaaaggtatgtatcctgtaataaactttgtaactattaattaacaaaatatgattcgtttcacaaaaagaacttgtactacgttaatttacatataccaaaaccccatggttcattacgggtagctcatactacaagtgtacataacaaatatacattacatcatttctccaaaaagatttagtctttaatacaaaggcaaagcctcaaaacactttcaatgcgagcaaacaacatccaatcaatagaaaagcaatgctcaagcgttatttccagcataggtcttctgacctgcatctaaaggtggaagggatagggtgagttcacaactcagtaggaaagtttataaccatcgtaagcatacccttagaaaccttgaattaaacgtataataacatgcatgataaagattttataacctttaacaaatatgtaatcatgtcaaacatgtatgcatgtatttgctggtttcatctttacttttcctcatccatcctttcacaactgataaactgcttacccccaccaatctacacatcagatatcaatgctccacaagatactcaatcaatataataatgactattttgggacatcacccaaaggtaagtcatacctcgtgtcttctgggactcatacccaagggtaggaccaactccgtgtctttagggactaaaacccaggggcaggaccaaccccatacacccacatcggagtgtcttcctcgagggctttagggcctttcacctaaggacccacggtcccacgtaaacaatatatcaaaggataatgcctgtagcatcacataaacacttcccaccaatcacttctctgaatatcatctgtgattattccatatccttcttgcaatgcaaccacaccatgaaccatttccacaacacaaaaccatgaatctttataccaatatacgttgtaacatttcaatacaataaaccgagatgcgatgacacattaaaacattttatgaaatcatagaaatgacatgaaattccaataaatgtttcaaggaaagaaatcagatacaccatggaacaacataaaattccctacgttacactgactttccatttgtgattcttctttttttttaccagaaacgaagaagattatattaataaaagaacaaatacaggagagaaaaaagagacaatagaaagagaaaaaaaccaagggaaggatgagaggtccttcctacacaaataccaaggaaaaactcccaacaatagaactctaaaaacaaagagaaaccccatcaatcttcaaactcttgaaacgcaaaccccaatccaattgagttgtagaatgcttagaggaactcctctaaaagcttcagtacaagaagcccatagagaagaataaaaccggatcaaatcccaaaccatctcttccgttctccctttatcctcaaagatcctattgtttctttcttgccacaccatccaaatcaaagtaaggcaagtaatttgccaaagtgtcttgcctcttaatgagttccccaagcctttaaaagaaataaccaacatgtcctcaaggctccttggagggacccaaatcaaacctactagattgaacaacctgtgccaaagtccaatggtaacgggacaatgaagaaaaaggtggtcaatcgactctccatttcctttgcaaagaatgcaccattgaggacagagggctttgtagggtcttctcaattgcaacttgtcattagtgtttaccttcccatgtgctactaaccaagcgagggccttaacctttgaagggacttttgagctccataaaaacttggccggaaggaacattaaaggatttgaaacttttgacaaggcacagaaaaaagatttcactgaaaatgagcctgacgaagacaaagaccacgcttttgagtctgatgaagaaggggaaaaaagcacagaattaagggaggacattaatctctgaaggagatcaatttctgaatccgttagattgcggcgaaagttaaaatttcaagacagtggtaaggaattgctaaggacatttgagacagtgaggtttttcacagaaataactctgtaaagatcagcaaattgagagcacaaagtttggtttccccaccaaagatcttctcaaaaccgaattctctccccattgcccaccactaggcggacaaaaggggagaactggaaaacttgagcaatagccttccaaggacatctgtgagaccatctaaccaccgtgttggcgtcccatccattaggatgtgtcccatatatactcgcaataaccttatgccaaagaccgctcctttctctagggaacctccagagccatttccctaagagggcaatatttctcatagaagtcttcccaaagcccaaacctcccatctcctttggtctactaacaacctcccatctgattaggtgatctttcttcccttccccggccctagaccaaagaaaatccctttgcatcttctcaatctttgaagctatagatactgggattttaaagagggagaggaagtagctagggatgtgagacagacaagactgaattaaagtaatcctccatcccaaagacaaataggcctttttccatccatccatccagcctcttcgaaattctctcaaccactggatcccaaaagcctattgtctttgggttccctcccaaaggaaggcctaaataagacaaaggccactctgacattctgcaatccaaaaccaaagccaaactagacaacagctcctgcctagtgttaatacctgaaatggtgtttttttctaaattgatttttaaaccagatacttgcccaaaaaccaaaaagataatcttgaggttttgaagaaggtccaaagaggctttagagaaaaatatggtatcatcagcaaactgtaacaaggacactctagtcctatccctccccacaaggaaatcctcagttatcctagtttcctcagctctaatcatcaacctacttagaacatctgctactagagtaaaaaggaaaggagaaagagggtctccttgtctcaaacctctagaggccttaacccaaccctttgcattcccattaactaggattgcaaaactagatgaagacaaacaacccctcatccaagatctccatttctggctgaaccccttcctttgaagcacatgatctaaaaagccccaatccacatgatcataggccttctcaaaatcaattttgaagactaccccttcctcccctgaccttcttttctcatccaccacttcattggctatcaatacagcatccaaaatttgtctcccttccacaaaggctccttgagagccaaagattgtttcatgtagaactttgcgtaaacgccctgataagaccttagcaattatcttatataaacttgtaaccaaattaataggtctataatctaagattttaaaagtttggcttttcttaggcaccatagcaatgaatgtcgcatttgtactttgatttattacccccttagtgtggaactcaaaaaacaccctcataagatcctcttttatcacatcccaacactcttgataaactgctatagtaaagccatcagggccaggggccttttccttattcaattggaaaactgccattcgaacctccttttcagaaaacggtctatccaaccaaattgcactctctctagaaataggggcccaatcaatcccttcaatcttccaagagtcaccttcgggtttggaatagagattcccaaagaaatttacaatctcctcaaaaataatctcaatgttatttaaagtctcccccctctcagaaatcagagacttaatgaacttcctacttcttcttccagtggccactctgtgaaaaaacttagagttgcaatccccttctttaatccacttaaccctagatttttgtctccattgcacctcttccttcaataacaaatcctctagctccttcctttttaaggttctttccgaaaccagatcaagatttaaattcccttcttgttcaattcgatcaattctgcctaagtccgtaagaatgtgcttttttctctctcttaaatctccaaaggctactatattccactctttcaactttgatttaataaactttagtttcctcataaacttgtgaccttcccaaccttcaactgtacactcttgccaccaatctctaaacttctctttaaactcaggatggagcaactacatattctcaaacctaaaaggagccagtccccattttaaaggattagtttccaaacaaattgggctatgatcagaggtccatctaggaagggcctcttgaatactttgagagaaaaaagaatcccactcagaagagaacaaaaacctatccaaccttttgcaaataggatcgacttgcatgtttgaccatgtaaaagccgcattcctaagagggggatccaacaaaccactttcccttataaactcgtcaaaacacctcatgttgactgttaaactagagtcacccatcttctcagatatcctcctgatcacattaaaatcccctcctatgcaccaccttgggaaagtcagaccatgcaggtcttgaagctccaaccaaaagtccttcctccacacaggcttattcgggccatacactgaggttaaccaaaaaaacccttcctcatcagagttcaattttacagttacagagaaagatcctaacaccttctctgaacacttgaacttaattgaatcccacaagatcacaatcccccctgacgccccacaagcaggaagaacaacccattccagacttttacctttccaaacactactcacagacctcttatcccaaatttctcactttgtcctgaagcatcaccacatctgggttttgagtacttaaaaaccttctcacagtcctccttttcttcctagatcctaaacctcttgtattccaacttaagatcttcatgaaaacaaaaacaacccaacacaaccaacacccagtactaatcctctcctcgagttctagagtcatttttcctctttcttctggaataaaccttgtccgcagagagagcactcttgttctctccttccacaccttttccattatccctgacaattctaatcctcaaactctccagaaccgattgaaccttgaccatcttcctaggcgtaagtccctcaacctgaaaaccttccaacgggagggtggaaggttctagcactgggaacgaagcctcacctgagacaccacacaccttagggttactaaggctttccctaaggagaggccggtctttaaattttcaattagaggtttctaggggaaccaccacaccttccaaacaggacgcaccaccacgatggctgatattcaccacaggagagataaaaaaggaaccacgctgaacgacatagcttgactccaacggaatcgaagaaaaagactaacaacgagaagggtgaaccaaagaaacagaggtttcgggaataaaatttggctcaaaagccccatacaaaggaagatcccgctcggatacagctgagaaaggagtacacaccttattgaccaatttgcattgcagaatcccctcttctccctctgtctcgccggtaaaagctttggatgtttcaaaaccagtggagagatcgctctttctggagtgagatttgcctcgaaaagtgtcttgatttgtctccggtgagccacctccttctaagtttcgcttcggggtagaagacgcctcctctaatctcaacggctaacttcttgctctgcgccttacggagactgaggatccttttggctttgacgacacttgaagatgacctttcgacattatattctttgcagtgaaccctggtcttaggagctttgaagacgaagatgcatctgggctgccattagaggatcctttataggctggacccgctaggggcccaaaatctttcgccccaaattgggcccaatcagaacgggcttcaacggtgtctggtgttagctcgatgttgcttcccgccgttgggcccaacatccaccttccctttcctttctcccccttagcctattttgaatctgaagaacgaaaatgggaacgatgacgaggcatccagctatggcactcattggtcctgtcaatagctcgtagcccctcagcgttctgtggcttctgaaagacgcaaccccccgctgacctcagctcgtccttgttgcgatttgactcaggcttgagagagtcttctccatcatcttctcagtcatcttctccggtgactgtaactgcaaccatgtatgtccaatctccatcttctacctctaatagcgctggaagcatgacatttggaagcatctccacccacaatgttaccttcgtcaaatcaacaagcttcaacgacttcctcgccaccttcgttaccctcccccactgctgcaaaatgtgtctcagttgcacctcatcccacaggtggaaagggagacctcttagttccaaccacccccgtctaaattttccattaacgactgagttctcttttggcgaccatctcctcagagcaataacctctcctcttgctgtgaagctcccttgatcttgaatccactgagctttccttgcagagtccacaaaaaaacaccctttgtaagcagaaatgggtgttacagacaccattcctttcattcccacccttctcgctatagcttttccaacctcacaccaatctcgtatttttcctttgctttcacaaactacagctcttgcccattttccaattggcatctctgcaccattcctaggtcctttctctgcaaccacatcagcataggaccactcacctctgtacattcctttgctctcttgaggctttttttgcttctccttcgaatctctttcagcttgaacagagaactcttggactgaaacaatcaccttcctaagattttcccacccacaaccattaacacctccaggaacaactaaaaccaaaggttttctctttgcaacgaattttgtgattttcatatatctccctctgctattaaaacatatctccatcagatgagtcctagtcttgcccctcatttttcgaatgaaacccctagaagccttcaaatccacagctttctcgaattgctccaataaccaacccttcttctcctctccaaaacctaaagaaaccacaaaacctcgacttctctctgttattgaaatccacgttcctccattgcaatcttcagactttacctggaaaacctttctctccactacaaatgactgatttcgattcatctttatcctttctctgtaacacttagagatgaagctcaagatccttcccatttgtgattcttctatgtaggcgatctttacctattacaaggaactgaaataaaacaacataatttaggtttcttaaccatgaaaatttattcaattaaaacttatgaaattttcctttcttactaattttcaaaaacttactattattaatttttaattctcatattctccaattaattaccaaacactaattgttttgatttttttcctaaagcctaacccattaataagtcccaagtgtccaaataacctaattaatcacatgtttactaatctatttttcaatcaaaccaaactaaacaaagatttatgctgatcttaccattaataaaatacttaagctaaaacactttaatccttaattaattgtgatttttaactaaaacatgtttattgctaattacactcaacttttgcacaaattttaccgttaatttgtttcaacataccattaggaaccaaaaaaaaccaaaattactaaattaaacaacttgcttacctcaaatcttcactttctctctctagatcctctctctaacccaagctgctataggtgaaatgttgcaaaacgagctgcaagcccttataaaggggtttccatgcagccaagtaggaggtgacaggccacatggctgccactaaccccaactttccaatttttcacttcagtcctccaaattaaccaatattaaacctataattgcccattagtcctttaggttttcataactctaatcagcctctaagaacctaataagcatgcttgagtcattaactaatctcacttaaccttaatcaaagtttaattcataattaaacaagattaacactaaactagttttaacatctaattaagcacgtttaaagttaagtactaagataatcattattgcctatttaattcattagtgctaggtattacaataatgatgaaggaggctaccacaacttttggtatccaaaaatagccaagagggagaaattgtgactaatgaggtggttcccttgttgagaggctgctagcagtggaggtgatgtaggacgatcaaataaggtgggctagggcttcaatcttttaggatttaaggaggtgaaaaagaatgaaattatagcaataggaaaaaaaagaaaaaaaagatagcaaaataaaagataaaaaaggaagattggaaaccttagagtctcactaaggcctctgacgtaagagaaaagcaatgaaatcttatcattgaaaattgcagtgtatgcaaaaaatcttaatattatcataatcaatcattcattaatcccatttacatcaattaactttatttataggctttaaaaaaccctaaaaattgaatacaattgtgaaaaaaaacctacgtagtaacttattaggaattttatttctttcttaaaactatttaatcttctaaaaaactttataagaaaacagaaattttctttttacaattagaaacttactttatagaaacttcttgtaataagagtttgtattaaagaagacttctatattctaaagatttaaataaaaacttttggaaaaaaagatattaatttagaaaatagaaagtttagaaacttcttttaaagagaattctaaaatttcacaaattgtcaatggaacttgattgccgaccactaactaactatgacactagaaaaactaaaaactgcataattacctaaatgcccttgatagagtaatttaagatttcattatttcattttttgagtagattttggagttcattcccattaggaagacatgatgatgccaaatgaaattatggcccatctgttggagaaggtggttttggaataaaactcacattcaatgtcataattttacaaagaataaataaatgttccaagtaaaaaaaaaaaaaaagcaaaataaactaaagttgacctattacttgaagcccccttgtcactgatggatccatctgagcctctataagcatggataataagaagaaatgcacccaaaacagtctccaaataagagtggttcttctcaaagtcctgcaaacaagctctgtttgggttctcattgtcatgtccattctggaagtttaacagtgagagcattgatcctgaaagagtggtcttcaaggaggcttgccaagcattcagatgatggtctcttggtgccggaaagcttagtggcatcaaggacgggttctctctcctttagcttcttgcccttgacaaaggcagactcaaacgggtgatttttggaggggagcatatgcagcttaaggggtgggctctcaaaggtggccatgctcccatgtgttccagtatttttggtgcaaaatctgatgatttgtcagctctagttgtcttgtatggctagattttcagctcccgaacatgaataccaagcatcagtgccgagtttggtgggtacgaaggttgggaggatggtgatctggttctaaggcttttggcatggagttgtttagcttgggatttggatttgatgaaggattttgaatggagaatcgaatggttgggagaaaggaatcggaaatgtcttcttctgggggtgttaggatttggacgagttgtgtggagactgccaggtattgaggatgccaaggccaggaacaagcaaaaactggccacatgtacactgaagtggccatgcatgcggattgcatgcacatgggaagaagcttgtaggaaatgagtggtggagtggtgggagaaacgggccccaatgcatcttgctcatcagtcattgtggtcaattgttgaagtcatgcatgccctcacagctaggaggcaggtttggaccagaattgccaactgggatttcttcgggtgaaccgaataaatggagcgggtgctcatgtagcaactgtaaggtggccatgcaagttggaatcacgtacatgtggagaggatgacttggcaggttttggaatgaaccccatctttccttctgttgttatctgctccatcacagtgtgaattttgagcttgctgaatggatgagttgagggcctggaaccacttctgtcctgcttctctggtgttcaagtggcagccagaatctccataaatcaatctctaaaaattcaccccatttccaaaattatatatgcgagttatacatcaattgaagggtgcagaagtgaattttcaccactagcaaatatatggatactggcaggaattctcttagattctggaacaaaagcgaccacatgggacccctgggtaccttagaaagctcaacatgtagcggtatctagaatcatggagaagaactatgagtgaggaaatcttgcttaaccaaacttcataaatgacatttctcaaaacccactctcctataaccatcccagttcagacagtcatttctgcttcctgtttctcatcttctgatgctccagctttaactaatccagtgcagtaggttattgacccagattaaaaaagattaggtagggcaagattcttggaacgagtaacaatctcaacaccaccctgaagaatttctgaactcctttattgattctattcggtacacaccatacacatatatatacaccaatgactgaataagaaaaaatcaatctagcttaattctctcctaaaattaggaaactgaatcataaggaaatatcctaaatgatctctccttttttattcctaaaatactttcctaaattaaaaaacctaactttggcattatttcaacactccccctcaagctggagaatatatatcatataatcccagcttgcaagttaagtattcgaagttaggcctaggtaaagctttggtgaggatgtccgcggtttggtgcttggtaggaacgtagttcaatttaaccgtctcactagtcaccttctctgtgatgaagtgtctgtcaatctcaacatgcttggtcctgtcatgatgcacggggttctttgctatgcttatagctgcctgattatcacacatcatcagaattggagatgaactcgtttgtcccagttcactaagaaccctttttatccaaatcccttcacagattcccagtgcaagggctctgtactcagcttctgcactacttctggctacaactgattgcttcttactcctccaggtaacaagatttccccagacaaaagaacaatatccagaagtggaccgcttgtcaatgatgtttcctgcccaatctgcatctgagtatacttcagtgtcacggttctctgtctttctgaagaatagacctttccctggtgtcatttttaaatatctaagaatcctgtagactgcttccatgtgttcctcagtggggctgtgcatgaattgacttacagcactcactgcaaagccaatatctggccgagtatgtgagagataaatcaagcgcccgacaagccgctgatatctcctcctgtctatcggtgtactttctttctcgataccaagtttcttctgactatccataggagtatcaattggtttgcatccaagcataccggtctccttaagaagatcgagtatgtattttctttgagagactacaattcccttccttgatctagccacttccataccaaggaaatatttcaaatttccaaggtctttaacttcaaactcttctgacaaatacttcttcaaattctgtaattcctccatatcattcccagatagaataatatcatcgacatagactatcaatatggccattttcccggtatgagacttcttgacaaatagagtatgatcagcctgaccttgtttgtagcccagcttcaggactgcttttgtgaatctatcaaaccaggctcggggagattgtttaaggccatacaaggatttttggagtttgcaaacctgattctttgccatactttcttcgaaaccaggtggtatttccatgtagacttcctcttctaggtcaccatttagaaacgcattttttatgtccagttgttgcaagcaccaatcttgattgacagccaatgagagaagaatcctgatagtgttcagttttgtaacaggagcaaaagtctcctgatagtctatcccataggattgtgtaaaccctctagctaccaaacgagccttgaatctctcgactgatccatctgctttgtattttatggtgaaaatccacttgcaccccacaggcctcttcccaaccggcaaatctgtgatagtccacgtcccattcttctcaagtgcatcaatctcatcttgtactgccttcttccattctgaaatttttaatgcctcttgtattgtgttgggaacctgagtatcatcaagagaagtagcaaatgctctataagatggtgatagcccttcatacgtaacataatttccaattggatgatctgtacatctcctaacacccttcctcaatgcaatcggcagagtagaatcatcaatgctgggaattaacacctctccagccctatcctcacctatgttctcttcaggaagacttgaattggagtcaatatattggccacatgctgactgtgatccgtgctctaattcctgtcttttcctcctcctgatgtaaacttgtaagttctcattagcaagttgtgaggctgtaggttgaataggcatgggagactggatggtcacgggagaaggaacatttgtgtgctgggctggctggactgatgacggcatgggtgtggacaactcagtgggcgcgaattgggaaggatttggtgactctgagtgaaaagaaggtgcaccctcaagacgagactcccaaacttgatgttcattcatgctctccccctgaacatgaaatttgggatagaagaagacatgttcaaagaaagagacgtccatggtggtgtaaaatcttttgttggttggagaatagcatttgtaccctttttgggttggagaataccctaggaaaatgcacttatttgctcgaggagcaaatttgctacgattttgaggatacacatgaacgaatgccgtgcaaccaaatactttgagtggtaaatcagaagaggcgacacgggtgtgaggaaattgttttaagaaaagttgacgtggggattgaaaggtaagcactctggatggcatacggttaatcaaataggtagctgtgagaatagcttccccccagaaatagtttggaacattagaggaaaacataaggcaccgggcaacctccaagagatgtctattcttgcgttcagccaccccattttgttgtggggtgtcaacgcaagaacttatgtggataatgccatgattttgaagataagtactgagactactagtaaagtattcctttgcattatctgacttgaggacttgaattttggaattgaattggttttgaaccataagattgaaggtttgaaaaatgtgcccgacctctgacttttctttcataaggaaaacccatgttacccgagtatgatcatcaacgaatgtcacaaaccatcgagtgccagaaatattttttatccgggagggaccccacacatcactatgaactagagagaaaacagtcgaaggtttgtatgggatttgaggatatactgttcgagtatgctttgcaaactgacaaatttcacagtgataagatgctggatttttattgataaataatttgggaaacaattttgcaaggtaaacaaagctaggatgaccaaggcgatagtgtaacattataatctcactatctttattgaccttagaatttgacacagaattgaaagactctaacatactctgagactgtacgcaacttgcttgagagacttggtttgagaattggccacatgagaggaggtagagcccggaacacagttcagcactgccaatcatcttccccgatttcaagtcctgaaaaacacacgagtttggatagaatttagtaacacattggagatcacgagccaatttgctaatggacaaaagattacaatccaagtttggaacatggaggacagaatcaagatataagtctttagtaagttttatagaacctgtcccggcaatttttgactttgaaccatcagcaatatggacggatgaatgaccattacttggcttgtaattttgaagaatggtagcatctcctgtcatgtgatcagaagcacctgtgtccactatccacggcttcattcctccttgactagcagtgagggctatcccggtagtactgccactgccaacttggctcaatagtttctgtagcatctccatctgctctttgttgaatggactcggctcgggaacagatgtgctctcagagttggcagccacgtgtgctctgccatctctgtcagaccgtggctttggtttccaatcagccggtttgccatgaagcttccagcaagcctccttataatggcctggtttcttacaataatcacaccaaggcctatctcgtttctgacgatctccaccactactattaaatgaccgagcagcaagggcagagccatccaatgttggggcaggttgctctttggatcccatcatcactttctttctactttcttcacgcctaatctctgaaaaagcctccctgagacttggaaggggtttaatgcccatgattcggcctctaacatcatccaattccctgtttagtcctaggaagaacttgaacagtctcttttgttccacaatttgcctgtatgttgctgcatcatccgaacatttccatgagtgagtctcgaataagtcaagttgctgccaataccttgtgagtgtgttgtaatactgagtaactgactgctctccttggcggaagtcatgtagggctgattccacctgaaaaagttctgaagtattttcagaacttgagtaagtttctttggctgcatcccatatgtcctttgcagtcccaaacagcaagaaattttctcctatgtcattgttcatggaattgataagccatgacatgatcatgctgttttcaatcttccacttcctgaaacccggttctgtagtttctggcatggctgcttctccagtgaggtactcatcctttcctttaccgcaaatgaacagcaacacagattgtgaccactgtaaatagttatggccatttaatttgtgtcctgtgatgagaataggagaggaatcattgccaccaaggtttggaatttcagatctgccccctgattctggtgacgtgacgctggatacttgtgatgatgccattccgtattttgtcatggaccggaaaggtagaagaacacttcccaaggcacgtgcagggattggagttgagaaaaaatagctggaggacgccggaaaaactgatcgaagtgcccacggaagcaaaagaaccccaaaagaggcacgtgcagggctcggatggcaaaaacaggtaagaagggtggctggttggcgtcaaacgagcttggaggaggaagcgcgtcgtcggaaagtggctcacgcgccctcacgctccgacgcgtgagatgcagtcgccggccggaaaaagcgcgcgtggacggcgcgtggatgggtttctggtttcggtgctttgggacaaattggagatctcctccaggcgctccttgcggtgtagaaaaaaccgtcgccggaaagttcgccggaaaagttgccggcggtgaatgttttctgatgatgattagaccgaccggaaagcgttttctcccttgactctgagaataaggactgatgactggaatgagagatggccagagagagagatggtcggaatgagagatggccagagagatttggccggaagggattagggtttcagaaaactggctctgataccatgaagaatttctgaactcctttattgattctattcggtacacaccatacacatatatatacaccaatgactgaataagaaaaaatcaatctagcttaattctctcctaaaattaggaaactgaatcataaggaaatatcctaaatgatctctccttttttattcctaaaatactttcctaaattaaaaaacctaactttggcattatttcaacacacccaaaagaacctcaatcaccctcaacatccatgagctgagatctgcttccagccattgtttccagaattgtgtcaaatacatgctcgggagtggcttgggaatccatgctccttctaggaacctgatgtgagaagctgagaagtagagagctacgtgagaattatgctccatttcttgatttcttcctttgatgagattacccatcatactatgcatcagtcaatcatcaccgaatcctccaggtgtgctgagtatttccttgcaaagtgcagacttagcacagctgggaagcacaaggttccaccctcttggatgcggcaaagaaccagttcagggcttatgaaccagtgaagagcagcagtggaagaagcgctgagaaatatcgcagaagatgccctcccaaatgccatagttactgatgaagaagtgcaactgcatgctttgactcatcttcagcacccagaataatattcacaaagtcgagaacttgaatgctgatatttttctgaaggaaatttgtaagtgccatatggtctggagtagggatatgcttcctcagtatcaaagccacccttgtccatgaggagaaaagtaaacatggttcacaagctgctgatgacctgagcaaaccacgaatttcctgcaggagagcataaacttcaagaatgctctcaatgagctcttcaggaaataagatgacaccatggtacttggtttattcagccaatgcaccttcctttaatgcctactgggatacatgtccatgtcttcaacttaataagggtcattccttaaaagctcttcaaatatctcttcttcttgtccaaaactgaggttcattctcttaaatcctcctaatttcttataccctagaatgagctcacaagcagtcatgctaaggaaacctttctccagaacacctttacgatcagaaactggaagcatgcaccaacccccaagtcgtcagtttgcaaacataatttccatcaaggaacaccttggtgggcttcagatttccacggacgattgaaggcttgttggagtgaaagaagataaaggcagaacatatctctgttttcactcttccccctcctctattttcataaaatgaaagcttccttgaagatcctgtgtcaaatcttctatgaatgctctctgatactgggacagagacagcactaaactttaacaccaaaatcaagagcagagtgaagatttgcttcatttatactactggctcggtcatgactccatccacatgtactacgagaacatctccacatttgcggaatgccttcctggtacacaagaatcacccaagttaaacccaacaacctcaaatttctgtatcaacaccctcaacttgtccaaatcattgcttccatcttctggttgatccaaatgatctgggattgcagggagcctcctggtagcagctgaatctgctcctttacattggcagaaggaaacttttgagaaagattaactcatccagaaatttgggcccattgatccatgacctgcaatagaacctggatgtaccaccgcttgaccagtgcacccaaacggaatctacaataccatttgaagtactctgatgagaagaccgcccattgtctctgttgagagagagaaaagaaaaccttaattctcattcatatgattaactacttacaattgagaagtatatatatatatacaagcctaggagaactaactaccatacatgtaacctatattaaaaaaggaaagactgtacactatatatacattatattcaacactccccctcaagctggagcatatatgtcatatgcaccaagcttgttacaaatgtatttaatcctaggacctctgagagatttagtgaagatgtctgctagttgatcatttgaattaacaaaacttgtagcaacacatcctgatgcgatcttctctctaatgaagtgacagtcaacttcaatatgcttagtcctttcatgaaagactggattggatgcaatatgtaatgcggcctagttatcacagatgagtttcatctgttcatcatttccaaatctcaactcttgaagaagatgtctcaaccatatcagttcacatgttgccagagccatagctcgatactcggctttagcgctagatctggccactacatcttgtttcttactcttccaagatattagattacctccaataaaaacacagtaccttgaagtggaatgtctatctgtgggtgagccagcccaatctgcatctgtgtaaccaacaacctgagtatgacctttgttctcgtacaacacaccttggcctggtgtgcttttgatatatcgaagaatgcggattacggcatcccaatggctatcacatggtgactgtaggaattgactaacaacactcacaggaaaagaaatgtctggacgactaatggtgaggtagttcaatttacctacgagtcgtcgatatctcccagggtctcctaaaggctccccctgtcctggtacaagtttgacattcggatccataggtgtgtctaccggtttacagtctaacataccggtttcttccaagatgtctaaagcatacttcctttgggaaaggaccacaccggaactggattgagctatctcaattcccaagaaatacttgagtttccccaagtctttagtctgaaagtgggtaaaaagatgttgctttagtttctgaataccatcctgatcactacctgtaatgacgatgttgtccacataaacaaccagataaatacactgccccaaggagttatgatgatagaaaactgaatggtctgctgtattgcgaagcatgccaaactcttgaacaacagagctaaaacggccaaaccatgctcgaggagattgtttcaagccatatagagaacggcgtaacatgcacactaaaccagactccccctgagcaacaaaaccaggagcttgctccatataaactttctcggcaagatcaccatgaaggaagacatttttaatatccaactgataaagaggctaagaacacatagcagccatggagagaagcagacggacagaagcaatcttggcaacaggggagaatgtgtcaccataatcagaaccataaacttgagtgtagcctttagcaactaagcgggccttaaggcgatcaacctgaccatcaggaccaaccttaactgcgtagacccaacgacagccaactgtagatttaccagagggtaaaacaacaagatcccaagtgccattagagtgcagagcaaccatttcatccaccattgcctatcgccagcctggatgggaaagagcttcatgggtgctctttggaagagaaacagaggatatagtagaaacaaaagcagaatagggtgaagataatcgatgataacttaaaaaattgtaaataggatgaggattacgagtagagcgagtacctttccgaatagcaatgggtaagtcattaggagaaggcagagccggggcaggtgaagctgaagggataggaagtgagtcagcaggtgcctcaacaaaagggagaggagcagcgacacgagggcgacgatgataaacctgaagtggtcgaggaggcacgacatcagctggggagacaatgggaaggggcaatacttcagaaacaggaagagactcagaagtggtggaaaagaatggtgagtcctcaaagaaggtgacatcagcggagataaagtatcgatgagtctcaagggaataacaacgataacccttctgaagtctggaatatcccaagaagaggcacttcatggctttggcagaaagcttgtcctatccaggagtgagaatatgaacaaagcaagtacaaccaaagacacgaggaggaaggaaataaagtggttggttagggaagagaaaggagtgaggaatctgatcatgtaagacagaggagggcatatgattaatcaaataacaagcggtaagaacagcgtccccccaaaaacgaaaaggaacattactatggaggaagatagtacgagctgtctcaacaagatgtcgattcttgcgttcaactaccccattttgttgaggagtatgagcacaagaagactgatgaagaatcccatgatgagacataaacgaagtaaatggggctgaaaaatattccctggcattgtcactgcgtaacacacgaatagaaatattgaagtaggtttgaatttcagcataaaatttctggaaaatagagaataactcagctcgatttttctttaaaaataaccaagtacatcgagaatagtcatcaatgaaagtgacaaaatactgaaatcctaaagtagacgcagtccgacaaggaccccaaacattagtgtggacaagctcaaaaggagactttgcccgattattcaaacgctttgggaacgagataagagtatgtttcccaagctgacatgactcacatggaagcgacgacaaagtggaaaaacgagggaccatcttctggaacttggagagactaggatgacccagacgattgtgaatgaggagaggaacatcagtggaaatgcaaactgcaggagatgaatccgaggtgaggtgatagaggccttgagactcacgtcctatgccaatcgtcttcctcgtactccggtcttgcaaggtcacaaatttatcagaaaaggtaatagagcaattaagagcacgagtgattttgttgatggaaataagattaaaaggacattcaggaatataaaggacagaagtgagaggtagagaaggcagaggaatggccaaaccaatacctttagccacagtttgagaaccattagctaagataacagtaggtaaagcagaggtagtagtgatagaggagaaaagatccttattaccagataggtgatcagaagctccagaatctagaattcagggtccaagagaagatgtgtgggtaaggcaggcagaggcattaccaggctgggcaacagaggcaatagaagcctgagatgtctgagatgcggaggagctcggaggctaaggcagcggagaatcagaggactgggccatatgggcagtgcgaggaggccgtccatgtaaccgatagcaacgatcgcgagtgtggccaagtttattgcaataggtgcaatgaggacgttgacctctaccttaggtaccactgcgtcctcctcgagaggtagtttgagaaactaacacagaagaatctgaagtgctatgagatgacaaagtctgagtggacgagatacggaggaggcgagcaaacacatcatccaaggacggaacagatgaactaccaagaatctgatcatggataggctcaagatccagacggaggctaataagagtaaggaccatgaagaacttgtcaagttgtatttgttgagccccaacatcaggagtaagaggcatcacagtcaagaactcctccttaagagagacaatctgaccaatataagtagatagatccaagtcctgttggctgatatggacaatagcagaagccaccttataaagacgctggatatcattcgtgtataatcctttggcctgagtccaaaatttaaaacaagttttataggtccgaagatgaagaagaatcctgggatcaactgattgccataatacactacataactatgcatctattttcctccactgtacacggtcaacctcagggatatctgcctcctgggtaaccaagtgatcctcatatccttgatccataaaccaaagttcaacagaggcagaccaggaaagaaaattttcactgccaaccaatttctccgaagtaatcataggagatccagatataacagaggaaaaaatggaagttttagtagccatatccacttatctggagaatgaagtatgtttggatcgaagagagccctaatacggcttcagattgcggtgtggcaccaccgaaaaagggagacagcctcagatcgcggcgtggtaccaccaggaaggtagaagaacacttcccaaggcacgtgtagggattggggtggagaaaaagtagccggagcttcgccggaaagactgtttggagggccgacggagacaaaaatccctaaaagaggtacgtgcagggctcggatgggagaaccagggatgtagggaggatggtcagcgtcaggcaaagttggaggaggaagtgcgtcgccggaaaaggcctcacgcgccctcacgcgccggcgcttgagattcagtcgccgaccgtaaaagtgcacgtggccggctcgtggactgttttctggctccggtgctttgggaaaagttggagatctcctccaggcgctcctcttggtgtggttggtgtcggaaaaaagttcgccgaaaaagtttgccggaaaatttgccggcagtgagtgttttctgacgactattcgactaaccggaaagttttgggagatggggaaggtgaccagaatgaaacacggtcaccggaaggtttcccggaattgatgacacggggaaactggaaagaattaggttttctcccttggctctgataccatgttgagagagagagaagaaaaccttaattctcattcatatgattaactacttacaattgagaagtatatatatatatacaaacctagaagaactaactaccatacatgtaacctatattaaaaaaggaaagactgtacactatatatacattatattcaacagtttctggctttggtatgtggagtttgcatctctcaagacaaaatatggaggaatctccctaggtgccgtaccaataccccacagaactgtctttacctgaatctgaggtaataatcagcttactcttacttcccccttatggtgcagtttgcaataatgaacccagagccaccaaaacattccattgccataccaaatccgacggtaggtttagagcattgcgagcactcatccagcaagaatagctgggttcctcttctctcctctgttcctcttctctgttgttttttttttttttttttaaatttctctcctcttcttgctctctcaaaaccaactctccagaaggagctttctcccacaatccttgcactcccaccaatctctccaactgataaatccatcaatccatttcctcagatcaagtgcatctaaaaaaacttaagagaaggaacagagaccagaacagaggagaaccagagaaaaccagaaaaagcaaacaaacaacatatgaaccaagaaaagccacatctcatgctctttcaatgggcttggagtggtgggaagagtattgagagattcatacaagaaaaagacaaccaatatctccaaataaggccaaatgaaacagagcttcactgagttcaaataatactaaaaagaacagtgaatgaaacaatgacaatgagcgtatgaacaagctggaaatcaacaaaactcatgtgtggcctctgttatccatcaccaaacaagcaaacaaagccccaaacagcaagagaagaagatgaagaacagtggtagtgaagatgaaacaagagatacacagtgaacttacctaagagctcctctaaagcaaagattgctcgacttctcaatgctcctcctccatggttcttgccccccctgagaatcctttctctctaaaaaaaaaacatcccccctcaaaatccatatcctccctgccgaatcctcttcgtcccctctaactcaccctctcactcagaatatcctctgtatactaaccaccacaccatgccaagcagtgtcctttgctacgtgtctcttgcagcccactcccctgcagagattgtccctcaatctccactctgctcccctacaaaaacgtgctccaaaaaggtggggaaaaaggcctcacaaaaggtcaaaaaagggctaaaaaaacagaggaaaggacagccaggatgaggacacatgtcttcatcccaaccaacctgcccaaaagagctctaaagctctgaaaacacaaactctaaaaaaatcaatcctaagaggcctccaataatcgtgcttggacccaaaataatcctctaatggtctccaaaatgtagctcaaaaatcaataatgagccgagtacgaacctcgaagggatgatgaaaaattgagtaaaaaggatcctaaacatgcgctaaaaaagagtggagtgagaggaaaaataataataaaaatgtgttagagacaaaataaagggtctacacattgacaagggttaaagacccccatcgataacctcaaccttttgctttcttgaaccaggattataaattaagaagaaattggactcatttatgatatggtttatggcccttgaatcaatgattttgagggttctgaaggagtttttgagagattgggagcaaaaagagagaagaaccatgtagtgtcttaacaccttgttcaagagctctagcccttccctggtgaagggaacttttctctaaggtttcatttgtggtagctgctttttctagggcctcaatagtattctggtggtactgtcacttgttccatcatatagtattttaaaagactatctaggtttacactttggggcttgcctcaaggtgaggctatgcaaattaaccttgatgctaatgccttggcattgggtaattgtggcttaagcatcaccaagttgaggtttatggcctagagttatagccttgacactcttgaggcttcactctagtcaaagggttttaattggttcaaattttttataagttttttatatatatcttttattacaggtttcagccttaatgtttgatgcttttaatgagttatgcttttgtggtggttttgttttagatttataaattttgtcttaggtccaagaccaaggttaaaccttgtacaaagtaagaacttagttgactaccaattgaccttattaagtggaaagggaaaaaagagaccaagaaaaagaaataaaggagttgttggccattgtaatggctgagatcatatataatcattattttactgttgatagataaaggaaaaagatcattacaattgatggatcaacaagaagaataggtgaacatttacactaatagggagaatataaatatttaaatatgattttgattccttagagtatcctactagtgatagtgatggtagtgctaaagattatttgatgaagttatgcgaggtttgatttttgaagggacaaaaggaactaaattagaaactattgagaatgacaaatattaatttgattattatgaattatatgattttcttattattcattttttttgtatgattttattattattattattattattttgagaatttgtttattctttttgttatttatttatgtttaggttgaggtttttgccttgttttgtctccatgtttgtgtctcacctcatttgggcaaaacaccttaattccacctttaacattttaaaacattgctaccatattgaagtatacaatgcaacttccaataaatgtctttggtgtgcctaagtttactgtaatagttgcaccaaagggtctccttttcttcctcctattggagtccaacctttgaattcagttaaattattatcttgagttatgtttaacgtcgagtgcacttgtgaaattggtcccaacattacaactcatttgctttcttcactacacacatgacaaaacttctcttgaagatgaagagtatttttaccaagtattagacaccttacctaatctaaatcagagttgagaccagctagaaattcaaaggtcttgttccatcatcttattcaattgggctatatctgctacagacttcatttcgaagtgttggtagcaatctaactcctaccacaagcctttcaacatattgaaataggttgtcaccaaggaatccctttgtttggtattgtggatccagttcttcaactcataaatctaagcaatgtttcccatatttgagtacgtttgagacactacatcccaaacatcttttgcaatagatgggtatagggaggtttgttgtttcttggctgcatatggagttcaacaaccaagttaatatcatggaattttctgcatccatgattcaaaccaagagttggtattgtactgagtaaatacccagttttctccttactttttgagaaataacttctctgactaggtttgcttaagaaaattaatcctattaagtttctcagttttaatatggagattaggattatcaaagtggaccatagtttttggttgacccaaagaaatctcagagaaacgattttgagaaaattttgacattaataaaaaattgaaggtttctttagaacaagaaattgataacaagcttgtcagggaaggctaagcagaggaaaaagaaaaaccttcctgcattgaatggccaagaaggagaaacagcttcagaattagagcaagactttcctaggccctgataccatgttggagaaggtgtttttggaattgaactctcttattcaggatcagaactttataaagaataaataaatgtttgagtacaaccaaaaacagaaacaaaaataaacctaagttgacctattcctaagccctgaatatatagtcaacaatctacacctaattacatggatacaaccctaattagttggtcatcctagacatcagcatttatgctattaattagcacagattctaacaccatcatgtaggttgattagaagtcgatcttaacaagaaatagacattttttttgataaacttgaatggataaatggtcatgtaatggagatgatcaacaatgatttagaaatgaaaagaaagaaactagagtatttccaatggagtcccatttagtatatagagtgtggtagaattaattaaagaatatgctttctgtagaatttaatgtcttcggttccttgtggttagaagtgtcaagattgcttcctggtacaaggaaaaatttctgagtttttttttctaatttcttccttcttattcttagatttcttttttttcttttcgtccttctttttcctctctctatctctctttggttcaagttgttggcttccaattctgtaagatattctcttcttttttcaagtcatggggtttcaagtctgtaagaaattttcttcctttatctgcatccgtttgttaatttcctttcccttttttgtaggttgcacaggagatatcatctttgatacattctga

SEQ ID NO: 13418 - DNA, 4591 bp, Vitis vinifera
  Intron number 1 from transcript GSVIVT01012789001 (locus G SVIVG01012789001) derived from phytozome v7.0 (chr-ID chr1 8; pos 23254000 to 23258590 reverse strand)
acaatacctccatagactggctctacaagtgcctggtaagctatttgaatacttttatagagagtgtggtttttactttttagaaaactacaagcatagacattttacctaatcttaataaacaagaaatattttgacaagtaaccaattcctatgcgatcagaaatagcaagagaggaaagggacttataattgtacctggtttttgtggtagttgtgttgggtttttgttttttgaagtcaaaatctttcatatggttcactatttggtacttgttattaaatggtggatgatattacaactgctttggaacctgaacataatttgcaattgtttatcaatactcaatttgtttactttaatatggctatattcctggaaagtaaaaccgtcgtctagctaagagataccctttttgttagtggtggagctaggaatgtactgggcataaatagaacaattattttaaggggggcaaaaaaaaaaaaggagagataatggtatataatgcagtggaaaacatactttccctttaaggtcaagggttcaaaacccctattatgattttattttttagggggcacatgtgcctctcctaggccttagctaactccgccagtgcttttagtgctagtttagcagtagtctaccaattcagataaattaaaccctaagcttcttagaaggaaaaggcaatattttaaagtcgaaaacataaggtagtgcttttagtgctagtttagcagtagttctatcaattcagatgaattaaaccctgagcttcttagaaggaaaaagtaggattttaaagtcgaacataaggcaaagcagtatttaaaagtcaaaacataatttttaagagtatttgtatataaccaaggttttaaaatccaatctttagattgatctaaatctagagattaaatttgaaaatggaatttagatctccaaaactttgttgatcaaacttcattatttttcttattaacactttaatgttagattcatcctcaagatttatatcaattttaatccaatcaaaacaagttatcaaattatcaagctatacataagcatcattggaactaagttaaacattaattatatctaaataaaggagcactgtataaagaatttcatcatctaaataagaaacaaaaaatagagaacttagttaaaattttaacacatctatactcttcctcaagtgaattctccatcttttttgttatcttctctagatcaaacaaaataaaccaatcatggtggaaaataagctctcaatcactatatttggttgtagagaaaatgacagacaattattatagcattaaagggagaaactttaaatttaaaagaaaatcaaatctatttctaatgtagaatctctacttcaatttctacctttcctctacatgtatctatttgttaggatagagcctttaagagtatgacatgagtaacaaatttagatttattattttataatatgatctcaattaagttccttttgtatccatctatttcatgcattatatcttatgagcgttttggtctgacattttttgtatcgtacatgacttacatgcattaagagttgcatgaaagatccaagtaatgaatcctttgcaagtagatgattttttcacaaccaatttatggatttagataatccatttaaggttgtagtgcactacctcctaattggagggacgattagtcttagtcatcatatgggttttcgatgatgagtgaactagtatgtaaggttacacattggataagatctacaatgagtcattgatttgagcaccttgtgtcttgttgtaatttacataagttactagagtgtaattgattctctgtggtaggatattgagtcaactttagaattggattttgagggacctagtattatcctatgaatcttagtggtcccctgttaagcttatatttcttaatgacacggtttatgatggtcatgagttcttagttcatttatgtgcataagggtattttggtaaatatgcaagattatatagaatcttatgaatggtctcgctacattagactacttcattatttagaacctaatgtgactaattaatcaattaaaacttttttaggttggattaagtgacccaagtttaaggtgaactcaagtcacttaagcccatgcaaagcttataaatatttccctttaagggttaaggctttacttcttctattgtcttttctctcatatgttccaaagagagagaaaaccctagcctccaccctcttgataactccaccttctttatgcctagatttaaggatgagtcatcatggtgggaaatcaatgggttcatgagatttgttgacttctacaattttaaagatttctacaccaatagaattgatctgggaacatccaaatctaagtaagcacatctaaagctttaaatctagatcttataaaatttttatggcttgttttgcttccattgctaggatctagaagtcctaagaaaattgcatacaccaaattgatctagggtctgggaacaaactaatccaggattccttacacctatatctagaagaatcctagctatcctatttatatgcatcaaaatagatatgtagtagccccttaacttgccttaacaaccatggaattaaggttatatgtggcaaaaataagttaaaaatcatgtacatggcatttatagttcaaaaagtgcctataacacattttgattttaatatcgattcctatagtaataggaatcaaaattttgtttatactaagcatgaaaatggccattggtctgtatttctattagtattttgatttctaaagaactaaaagtgaaattttggcttatagcaaaatcaatttcgactcctaagaaaaaccgcctctagcattgagaatcaaaatggaaatagaaatattcttctgaaatcaaaatggaaatcgaagtgctcttctaaaatctactttaaaatgaaatcagaattgaaatgtaattctctttaaacaaatgcctcaatcatcctaaaaattgttcaaattccctttatatgcgttgttccattcactcccatcagcttcctatcaacttttctcatttatatcatgctacctttctctcacaccttccttgcttttgcattgctttgtgtgatctttccatcatctatcttgcctttatttttcttatatcaacctcataagtagctttccttcaaaactttcctaaaaaagcttttattttcctctctcttgctgtattttatcacttaaatatgcaaagaatctctaaatagaacttgacacatatctaggggaaaaagactttattatcactcaaaagcatgataaaagtaatgcaatccggccagaaactttagcatactcaagtttaatacctcaactttagcatgcacaagatatctagtttacatcttaattatttcaaactctcttcatctaccaattcaatcaattctcaaagtatcaattttcctatccatcagctgtgactttcaaacgaacaccacccctcaacctactctaggctataccctttaacaagcgccaaggctctttcattagcatgcatgcatcctcctagaaatggttccctctctagaagaaatactcattggcctatatatatatacacacacacatatatggctttgtacaattagagtgattttcatgaaaaatagtttgttgtgattaattaatagtagcaaatttcttcaggtgtgcagatgacaatgaggtattcaaataaggcatatcttgaacaaaagtactcaaaggtgattcgactgtccacataaaaaaaaaaatgtcaataaaactgtgctctgatatgtactatattaagctatcaatttgacctaaaaagttgagttgttaggtatcgagataataatgaatatcatgcaagcttcaacttgtgataaagtcctaacacccagtctcacagcttaccttctttaggcatgcacataggcttaattacaagaaataagaattagggaaatagatataatctgttagatttgaattcatggtctctcttaaaatgaagtacatcccactaccaattcaagagacgaattcaagaaagacaaaaaggaaaatttatggacggataatagtttccatgacagttttttctgttttctttatctttctttataatgagaaaaaccttatctatccttgttacatgaagaagtagtaacagacagttatgcaaccactagaagaaggtatgttaacgaactaactgcaacttctttgccaagtgtcaaaatcagacaagtgacaagtgactgaaatctgaatcatgacggtacatgaatgcaatcctcttgcacatctttttacaaaagctttatcaaccaattccaatagagaatgtagcttgaggctgaggttggttatcactcagtgctatgataaatgcgttaggagtttctctctctctctgtataactcagagttctgaaggtagttttacaggaggcttatctctctctatcttagtttccacaggataatcctgaagtggacaactttca

SEQ ID NO: 13419 - DNA, 2039 bp, Vitis vinifera
  Intron number 1 from transcript GSVIVT01033326001 (locus G SVIVG01033326001) derived from phytozome v7.0 (chr-ID chr8 ; pos 21477031 to 21479069 reverse strand)
aggtaggcagaaaaaatggttgagcaaccaagaaattttctatccacgtttgatgtttccaatgtcactgcacaatttcatctttttcactttattgtcacaaatttaggtgtttattcgcatagttgagattaaattttgtaatatatttttaataaaatctatcaatgaaagtgtaaattggatacaattctttttttttttttaaataaaaattaatagtgggttcatatacaaaatatataaatgttttttatataaaagtttttccccttaaatttgaagattttaattttgtccaattatttgataccggaaattttttgaaatttttttttaatcgaatttcaccaatctttctaaggttctattttgatcgttgagtttgaaaattaaagaattgttttttagtttaataaaagtattcgtgtacaacttaaaactaaaaagaaaatgaaagaaaaaaatatatttatcttataaaccttattttataattctatatttaattaaacttttataatatttttattatttttaatatttatttcttttatttttaagatgtcacttagactagagttaaaaacaaatctttatcttaaataatgttgaagcagcttattagatcaaataaaataatttttttacaaaagtacatagttttaactttcttttaaatccttttaacaaaactaaagaatattatgcaatttaaaggtttggttgaaaattgtcatttcctaactaaaagggatatttgacaaaaaaatttaaaatgtttttgaaaaaaatagtttttcgataatttttttaaaaatatatattattttataacacggttttgaagtgatactttttatataaataaaaggtatgtaattttacaaggagtaataatacaaggaataagtggaaaaaattattcttcataaaattttagagtaaatgttggtagtgtgatttaatttttttttaatataaaaccgtttttaaaaatttataatattgtttgatcattgtttttgtgaaaacaatttttaaaaattaaatgaaatataaaacaattttcaaaaaacaaatatgagttgttttcaacggttttaaaaaacaaaataaaaacataaactcatgtatccatgttttttgaaacttgtttttaaaaactatttttaaattaaataataaaaaatattttttaaaaacaaaattaagaaaatatagcaaaataggtctttgtgattttttttctaaaactcattttaaaatataaaactctaaaattctccttaattttaaaaatttgagagaaaaaaaatgaaattttttccaatgaaagaaaaatataagaaaaaggtgaagaacatgtgaaatagagaataaaatgcgaagattgtgaagaatataaggtggtgaaacatataaatttaaaatatattttttgtatttgattttcttccactttcattcttcctcaaataaatttaggagtttgacaaaaaaaaaaaaaaaaaaggataataaataaataaataaatataagataatgcaattagtaatgtttttattcaacatgaagatgcttttatgagaattgttttataaaatattataagtgatttttttaattatatgagtgatttaaaaaaatttaaaagtatttttaaaattttgttaaatttaattttttatattaaaaatagttttaaaaaatattggcaaatgaagtataaataagccattgcatctctgcagtgctttttttaacaataaaaaaacggtttttaaaaaatattttaaaattaaattatatttaaaaacagtttccaaacatattatgattttttttctctctttctttctagtttagtctattatttatttattttaaaggaaaagataaaacaaaaggatgcgagattcaaataataataaaatattaagtttaaaggaaaaattactttatgattttatcaaatttcttctccctcttctctttttcagtacattggaagcctctgtcttaccctcgttctctc

SEQ ID NO: 13420 - DNA, 2439 bp, Vitis vinifera
  Intron number 9 from transcript GSVIVT01038127001 (locus G SVIVG01038127001) derived from phytozome v7.0 (chr-ID chr5 ; pos 23680335 to 23682773 reverse strand)
ttgaagactttgacttgaaaggtagttttctctccaatctacttctttcagaatgggactgccttccttggtgaaaaaagaggtttagttaataatgactatagactatactgtttggttgtgtttctcttcaatcctgagaacagagcaggaaacaacttctagttttgttcttttatttcatcatggtaaacacacctcctcactttctcttctatttaagtaaaattttcttttaggctataggatgtaacatggcataatttgaagaatctgtttaattaacgagtaaccaactaaaacattcttttttcccttgggttgggaaatgacttctattgaaaccagtgaagcctatcctttcgtccttctttgcgtggttgcttggtgctttgagaaggactaatacaagtaaatagttagtcttgtttggtagtgtggaaagtttcataagaatttggtatcgggttttgttccttacggaacaaagagaccttttatgtaaaacattgagataccaactgtccttttataaatgttagaagaataaacttaccctttaacgtatcctgcaaagagaactgggagctataagactattggtggggaaaactacttatcttggctggcatatatggtttcatcaaccaagatcactcatcgttgaaaatgttggatgtgatttactctttcacaatcaatcgtaagctgtaactcacgaacagaaaaatctatgatttattcactattggaaattcaagcttaggaattatgtgtttttcggtacttaaattttcattttcccccctcatatttaaagcaaaggttgatatcgaaattgaagtggattgaattagcactcatttctgtataaatgattataattgatcttggctcttcttgaaatccataagggaaggggttcgaatccccctccctttaaaactcaaaaggtattttaatttactggtttgtctggaaagaaagaaaggtggtttagggataagaaacttagcgttgatgaataaagctctcttgggtaagtggaattggcgttttgccattgaaagtgaggctttgtagaagcaagtgatcagtcacaaatatggtgtagaggaggggggttggtgtactcgggccgaaagagggagacatggtgtagggctttggaaagctattagaaaggagtggttgggtatgtatagcagtttagccttccgtgtgggcaatggtcggagagtgagattctagaaggataagtggtgtggagatgagcctctctacgagtccttcccttctctttttgccatttctcgggctaaagatgcctgggtatcggaagtgtggaacccagatggtgtaggggatggttggacccctcttttctcaagggcgcttaatgactgggaaattgagatgatggaacagtttatgctaaaaatacaagcttttagggtgcaaagggagaacgaggataagatggtttggacaacatctagaagtggtgttttcttagtcaagtcgctctactctactctggagcctggtggttctgctctgttcccttatgttggtatttggagagcgtgtgtgcctccaaaggtagcttttttcgcttgggaagcttcttggggcaaaatcttaactttggaccaactctagaggaggggttattctttggcaaataagtgttttctttgttttgctgaagcagaaacggtggatcatcttttactccattgtgttatgatgagggcattgtggaatcttcttttttctctctttggtgtggagtgggttctctctggtacagttaaggaaactctccttgggtggcatggagcgtttgtggggaaaatccgtaaaaaggcatggcaaatggctccctcatgtatattttcgtcagtttggaaggaaagaaatttgttggcttttgggaatgaggtgttgtcaatccaaaggttgaaacattcttttgtatgtaatctgtggtcatgggttagggtgttatagttttgagcccgcgatctcttgttagcttttttgagtggctaggctttagttataggtaggggtttcggcccgctaccttggtttagagtcgaggggctgcttttgtatactccctgtatacctagagggcactagtttggtgtctcctcattcattttaatatacttctctttacttatcaaaaaaaaaaaaaatgattataattgatcaatattgactagcatcaggttaacctttttgttcttattgatctatttttagtcatgtccatccctgtggcttttataatctgcagtatctacttaggttgagccctactgggattcagtctttcagggcttttgacgctccaaatgattaatatcttacatgtggtcagtgtttcctacttttgataaatatttgtatttgttgcagagacagagg

SEQ ID NO: 13421 - DNA, 9642 bp, Vitis vinifera
  Intron number 2 from transcript GSVIVT01017065001 (locus G SVIVG01017065001) derived from phytozome v7.0 (chr-ID chr9 ; pos 3904557 to 3914198)
tgtttaaaggatttgtatatattcccatagtaactgtgatatcctatattggttaggggagaagttcttaacactatatatatagtatgctctttttaattgggcaaatgcgttttaaagttgtaaaggccattggcctcaaagcagataatatctccttgatcctagtgtaggagtttgagtagactattataaatggtattaaaaccaagttcccaagcccaatgtgggagtttgaatgagtcttttgacctatgttgcatgagtttgagtatgaatgtcaaatgtgggtatgtgtctagatgtttgagccttcacaactcaaattttaggatgcatagacttggccaaaaaggatccaaaaaaggtacgcgggtattgagatatgacataataaaagaaaaaccaattaaaagtattggaaatgaagatttcctttttaaagccattagaaagatgtttgatcttcaaagaaactaacgtccatcaagaaaaacttccttctagtcggaggatgctagcacttgtataccttttgagtaggaaaaatcctaataaaatgtactttagagctttaggattaggataaagttttgtcttatctcaattgtggataagaacaaaaacaacacacctaaatactcttggtgaaaggcatccattttgtttttgatgggtaaagagagaattggtgaaagggatccaatgatatgtgaatgaggaaataatgttttaagatgttaataagggtttgggaattcaaaatattcataggcaattgatttataaggaattaagctgtaagaattgcattctcctaatagtgtctagggacatttttggaaaacatcaatgcgctagttacctttaaaaagtgcctattttttctttccattgtcccattttgttgggatgtatcatataaaaagtttgatgcatgatccaatttgcaaggaaatatgaacctaaggttttgctaagatatatatctaatcttaggacttgcattgaaattggttttcaactattttatggaaatgtttgaagttggtggcaacatcggattcaactgacctaggtgcaatcattaatgaagctaatgaatcacttgaaccatgaaagatattttactcttgaaggaccccaaacatcactatgcaccataaggactccaaacaccactatgcaccatgtagaaaggagtttcaaatctcttattactcttggagaaaatgatactcggtggttttttgacaactcacaaacctcatagttaaacatagatggatcttggtttgagaacattttcggctataatgtctttaatgacataaaattgggatgatcaaatctttgctaaagtaaccaaacctctccctcttgatccttgcaattccttgtttgataaacttgcacatggttattcacctctggctttaagttgtaaaatctctctctctctctctctctccttctagtcttgcaaatcatcttctcataacttggtcctgaaaaacataataattggaaagaatattactgagcaactctgagactttgataatttattgatggataacaagttacacgaaatattagatacatgaagaacaaaagaaaggattgaaaatggtgaagtagcaactgggcctttaccgctaatagggattagagaccattagcaaccttaaccttttcttttcctgaacaaagggtataagttgaggactcctttgtcatgtgattagtggcccctaaatcaataatcgagggacttgaagaagagaaaacattgaaggttgtatggtttttacgtgactgagcaaaggtataagaagaaaatgaaggaaactcaaattttcctatcaatttgtacaagagatctaactgtttgtggacctgtatttttcatatgctacttaatgatgaaattcgtttttattgtgaaaatttgatttttgaaaagttgaagtcgtcatttatttttgtttatttttaaagggaaaacaaaataagaaataaaatcttaaaagtgacttatttttgaaggaaaaacatatttatgaaaaatcgagtctaagttcgggggttaggttacttattgggaagttatcatagggtagcatccctctaagttgtaaagaggtctctactaaacaagtgaaagaaattatgacacttgactaataagccatggatactaaaaaaccaaaatggaataaactataaggcatggtgatacaaaacaagaaattgacgatgaatatgtagactatgtatactaaaaaatcacgagattaatgtcaaacaaataaagatcacttaagagcacaacatgcccttgaggcctagctcaagtggtaaagcgatggggagggtgtgtgggaggttccatgttcaagtccggggacaaaaatttgcctatttaaaaaaaaaaaaaaaaaactcacgagcacaaatgcttagcataagaaacaatcaatcaaagggagaagggagtatacctcaataatgcccaaaacaagggcacctagcttatataagaaagaatgaattggtttacaaataaaacaagtgatctaacaccaaagtagggatcaaacaaaatgtaaaagatatatacaactcaaatcaaaggttgaagatagctaaactaacattaagaagaattgatttacataaacgtgaaaagtggttaaaatagggtaatagatgtgcatttacaaaattgtagaaagtcgagaatatttgtattgataaggcacatggaaattaagggattttactgtgtaatgttttgagtttcccggaattaaggatttgggtaggatgttacctagattccttgttttcctaatttatttagtttcttattttagaggaatttgtttaggaagtttaattttttgcatcccataattagaggaaggtaattacgttttctcctctatttattccctagtggttcattattcaaataagagaagaattatgattctttcaattgcagtttcttgaaaaataaattcaattaaacgggcttaagggggggatcatgctataggggccagcttatttaacaagtatatttgtctattacacaaaccaaaagccgaggaaggctaaaagtgaaccaagtaggattaatttcaataaacatctctcaactcaaaaataggacaacacaacaagcatgcaaaagattgatttatttggtaaggttggagatgagattaaaatcaaggcaaaaataatctaacatttaaaagatatctagaacaattttaaaagcccaaggatcctaaacatacaccatatggtatagattttatgaaacatcacacaactcaaaaacaggacaacaaccaagcatgcaaaagattaatttgcttgacaaggttagatgtgagataaaaatcaggacaaaaaatatctatcaaatacaagatgtctaaaacacatttcaaaagccaaatgagcacaagcatacaccatatagtacaatttcaaaagcccaaggatcctaaacatataccatatggtacagattttatgaaacatcacacaactcaaaaacaggacaacaaccaagcatgcaaaagattaatttacttgacaaggttagatgtgagataaaaatcaagacaaaaaatatctatcaagtacaagatgtctaaaacacatttcaaaagccaaatgagcacaaacatacaccatatagtacaattttcatgaaacgtctcacaactcaaaaacagggcaatataacaagaatgcaaagattgatttattctacagacataacaaaggattttgctacaagactaaagcttccaattttatttaagatgcctagatgtaaaggctctgtttttgtcttaggccttgagaaggagaaggttagttggttgatagaacaactgacaaaggccattgagatgaagatttatatgggattcaacagaaaatttagaggaaaaaccagagtacatcttctggaggtttgtttcaatgttcatggcaggtttataagattatcagagttcgcctctaacaagaagtcaacctttctggtaatacctgagggagataatggcaggggatgggaacttttaaagtttgcgttgaactcaatgttggtggtcctctcctcgagttattttgaaaagggaaggcagagcagggaaggaaggattatgcacaaaaatgcgggtcccctgcaacggttctatgcgaaggttgtcagagacgaaggtccgaggaaaggcggcctcgttctagttgggagatgggcgagggctgtggtgtgcgaatgttaagatggtgctgttaattgggctgaggccggccgggccatggtgagaaggctagggcacaaaggcgtggtgacaatcgtcccattcgccggaggaaaaggattgttttttgtagaaaccttagaggaagctttatcactacacaattcaaggtccatcaggattaagggcggaattacagtcttgttgagaagatggtgccaaaggaaaattcagaagtagaggggagattcaaggaaggttggatagagttaaggggtttaccatttcatttatggtctgaggttcacttgaagaaaattatggagcagtgggggacggtgacagagatcgattggcgaacattgaaactttttgatctaagcaaagcaagggtgaaagtggtaatgaaagaacgattggttctctcggctttgattgaggtggtaaatgggggttgggacttcacagtttcagtcgtagtagccgtgaaggaagaaggttggcaggttagagagatgggtgagtcaactcggcaatcaactaagactcacaaggggacaggtggcagcaagagggaagaggaaggtagatcaacggctggtaaggggacctctgttggggcagttggcagaacgttggagtggagaggtgggcaaaaggctgagaacgctcctgggaggacacgtggaaagaacaagacgttagtgggatacagctagtcccaacctccattgcaatcggattcaaaaaggcagagagctggatctgctgggccaaagcaggctggaggggccaaagcccagtcaaccctccaggatgggttgagggcctccaaagttatgtcaagagcccatccttttagtaagcccagcctacggactgaaattgacgtgggctggaagaaggaaatccatgggaaaggcccgtttcagttgttgggccaagagaagggagaccatcaagatagacagttgaagggcccttttcacagtgcttacctctctgcaaaggggaaggcgaagtcgggccacgaggatcctgaaaatcaatagagggactccgcgatgaagcgcggttcaaggaagctgtggaatgctctgcttccatcaagctctgtatgtcgacaaggggatcgaagccgaagcgagccactcacgactgagagatcgacgctactcagtgatactcttctaatggaagacgacttcgaagcgggaacacagttggttcaagggtgttccgaggaaggaacgacaccgacaaaggaatacgcgaagcaaaggaatcttcttagggctccttgtctgtcaaaagggaaggagaagatgcgcaatactgctaaaggaggagacggagcaggttttaagggatttgtgggttgttctcatagtggatcttcagtcatggatcacctttctcatcccgtatccagagaaaaagggctcaactttgaggggtactgtggaatgacggaaatggaaattctcgaggtatcttctcaccatttttctcagccttatctgccttttcattttcctttctctggtgtggctcctccacacctgagctcttctgccatcgatctctccattctagcctttcaatcccagtttcctacgaaaaatcgagtgttacctgaagttttttcaaaaaatgatgacgttgggtttgttggcatccctaatcgtgatgatgcggtgccccagctgtctagattggatcttttgtttgaaagctgtaattatgtcaagaccaatcctagctcgcatcatggggcccctattctgggtacagctagctaggaagacactgagttctcccagatgggtgggttccaaattgaaggtctttcatctagaaaaatggctaaagtatgtgaggtcttaagctccttggatattaaggtgtattcaaggcgaaagaatagagtcgccatagacatttgagttctgttgatgttggttaggtggtatagggtcagtgaggtgtttttatgaagatcataagttggaatatcagggggttgggatctaggaaaaagagaagggtggttaaggattttttgcgccttcagaatccggatgtagtgatgttacaggaaacaaaaagagaggtgtgcgatagaaggttcgtaggtagtgtctggtcagttagaaataaagagtgggttgctctcccgacgtgcggggcttcaggagggattttaatcatttgggattcaaagaaaatgagcagtgaggatgtggtaattagatctttttctgtcttagtcaagttcttgttggatggatgtggacctttgtggttatccgctgtttatggcccaaacagtcccttaactaggaaggatttttgggtggagctatcagacctttttggccttacttctccttcatggtgtgtgggtggtgacttcaatgtaataaggagaagttcagaaaaactgggtggctctagattcacttctagcatgagggagtttgatggctttataagagaaagtgaattacatgatcccccattacgaaatgcctcttttacttggtcaaatatgcaagagtcaccggtgtgtaagagattggatcggtttctctattcaaatgagtgggagctttcattccctcaaagccttcaagaagttctccctagatggacatcggaccattggccgattgtattggataccaatcctttcaagtggggtccaacaccttttaggtttgagaatatgtggttgcaacatcatagtttcaaagagtgctttagtagttggtggagagaatttgaaggaaatggttgggaaggtcacaagttcatgagaaagctacaatttgttaaggcaaaattgaaagattggaataagaatacttttggaatgcttaaggaaaggaaaaaaaccatcttggatgaaatagctatcattgatgccaatgaacaagaatgggctctctattctgatctcgctgttcaaagagctgtaagaaaaggggagctagaggaaataataatgagggaagaaattcattgaagacaaaaagctaaggtaaaatgagttaaagacggggattgcaactcaaagctgtttcacaaagtggctaacgggagacgaaataggaatttcatcaaattattggagaatgaaaggggtttggtgttggacaattccgagagcatcacagaggagatattactttatttcaaaaagctatactcgagtcctccaggtgagtcttggagagtagaaggtattgattggtcccttatatcagaagagagtgcctctaggctggattcctttttctccgaagtagagatctataatgccatctttcagttagatagggataaggcgccggggcctgatggtttcaccataatagtgttttaggattgttgggatgtgatcaaggatgacttagtgagggtgtttgcagagtttcacaacagcgggattattaatcaaaacaccaatgcatccttcatagttcttttgcccaaaaagagtcggtcaaagaagatttcggattttagacctattagcctgatcacttgtctttataaggtaatagcaaaagtcttgtcagggcgtctaagaggagtactacaagagaccatccactccactcaaggtgcttttgttaaagggagacaaattctggatgcagttcttatagccaatgagattgtggatgagaaaagacgatcatgggaggaaggagttgtattcaagatagacttcgaaaaggcttatgactatgttaaatgggattttttggatcatgtgttggagaagaagggatttagtcctaaatggaggaaatggatgagtggttgtctgtcgtcggtctcttatgctgttctagtgaatggtaatgctaaagggtgggtcaaggcatctagaggtttaaggcaaggtgatcctttatcccctttcctcttcactattgttgcagatgtgttaagtagaatgttgttgaaagctaaagaaagaagtttgctggagggcttcagggtaggtagaaataggtgtagggtgtcccatttgcaattcgcagacgataccatcttctttgctaactctagtgaggaagaattgcaaactcttaagagtttattgttagtgtttggtcaagtctctgggcttaaagtcaatcttgacaagagtaatctttttggtatcaaccttgatcagaatcatctctctaggttagcattgttgcttgactgcaaggcttcagattggcctatactttatctgggtcttcctttgggagggaatccaactacttgtggattctgggatctagtgattgagagaatctctaggagattagacgggtggcaaaagacttatttatctttcggcggtaggataacgctcctacactcatgtctatcccatatccctagctactttctttctctgtttaagattcctgcttcagtggttgcaaaagttgagaggatgcaaaggaactttctttgatcaggggttagggaaggcaaaagagaccatcttgttagttgggatgctgtgtgtaagccgagggtaaaagggggtttggggattgggaagattcctttaaggaatcgcgctcttttagggaaatggttgtggaggtatcctagggagagtacaactctatgacatcaggtcattcttagcatatacgggacacactcaaatggttgggatgccaacactttagtcaggtggtcacatcgttgtccttggaaggccattgcacaagtctttcaggatttttctaagtatactcgattggtcgtaggaaatggggaaagaattcgcttttgggaagatttatggtggggggaccgaatcttcaaagaccaatatccaagactatttagagtagtaatggataaaagtgttcccatgtattcaattcttggtttggctcgccctttctcatggaactttaatttccgtcgtaatctaaccgattatgagatagaagatctagaacgcctcatgtgctctattgattgtatgaatttatccacctccgcttcagatgcaagatcttggttcttattgccttcaggactgtttacagtcaagtccttctttacagccttgtcccaaacgcctgattcatttcctttgttcccttctaagtttgtatggaaatctcaagttcccttcaaagttaaggcctttgtctggcttgtgaatgacttgctataattgaggagaccccacaaagctcttagccctgacatttgtaagttgtgtatggggtaaggagaatcagcagatcatctattccttcattgttctgtgacgttggggttgtggcacaaactattctagctagccaag

SEQ ID NO: 13422 - DNA, 10679 bp, Vitis vinifera
  Intron number 11 from transcript GSVIVT01020355001 (locus GSVIVG01020355001) derived from phytozome v7.0 (chr-ID chr 19; pos 20760838 to 20771516 reverse strand)
ggggattcagttcagaggtttgttttgtattaaaattaattcagtaagctgaaatgtgatattgaactttgtatcctttttctcatttgctagtttagccaaccaaaaaaaaaaaagaaacctataaattcaataaatacgcacacacacacaaagagagagagagagagataagaaatcatagcaattattctctaatatggaaaatttacttaaacatggatcctaatatgtttaacatacatgaacactaatgttgcatgggtttcggtgtgggtgttgagtgtgggtgtgtgcctagctgtttgattctttatatcctaaatcttttgatatggggcttggcctaaaaatgatcttgaatggtacttgaatataacataataatgagaaaaaaatcaattgaaagtcatttagaagcaaataattaacatatccttgacaaaaactatatgctctctctctaattttttttttcaatctcatagtaactcacttattctatgggccatcacttgaaaatttgcctctatactagatctagccactatatgttttcatttctacaaatgactaagagggtgtttggtaaatcaacttaataacttaatatgacttaatgacttaatttaagtcattaaatagattaagtatgtttggtaaaataatatcacaacttaaagtcaaaaataactttaagtattaagtcaaaatggctaacttattcttaatcccaaatgtcttttacctcatttacccatgtttagtaaaaatatattttacgattatgactttacattcacaactcatcttttatggtaaatatttttgtagttatctcatgtttctacaatactttaaatatgaatgtttaacaaataaatttattacctaagattagtgaaaatataaattttagttaaaattaacgatggtaaatatgccaatttgatgatttaaaataaaatttaagttaactttaccaaacaaccttaatacttaaagtaaaaaataagtaataagttttaagtcaacaacttataccaaccacctaattaaataaatatgaattttttttttaaaaaaaattggatttttttaagtaattacaaaaatacgacacttttaagatcgtcttttcaataaacaattttacatacagaaatcatttttttcaaaatgggattttagcatgagcacaatttataaatttgtattgaaattgtttttttaaaagatgaatttgacgtgaatagttgtaacgtaaaatcttctttttaagcacaattttagtataaacacaatttataagtttgtgctaaaatcatttttcaaaagattttgacatgaatataaagtgctatatttttggaaatagatttgtagctaccatttgtttagaattttttcaaaaacagatgtaattgtgcaaaaccccccataaaaaagtgtaagaacctaaagttgacttactgttgaccattgatatgtccaatgaacatttatataagcctccaagttaagtcttgtaatttttcaaaaaatgatcccctttcctggaattgattttagatatctaaggatcttgtgaattgctcctagatgtagctcttttggataatgcatgaattaacttacaactcaagttgcataggctatatttgctcttgtatgagataagtaaattaacttctccactaatttttgacatgtgtctcaatcaacaacatcatattttacctttatgattttgatcaataagtgagttatctcattttttgttcgttgatgacactcttgtattttgtgaagtctcttaggatcagataacttatttatgttggttgcttatgtggcttgaggccatttcaaggttgagaattaatttggataaaaacgagttaattccagtggaaagagtgaataatgtagagaagttggcttcagagtttggttgtaaggtgtgaagtctaccttcctcttatttggggcttcctttaggtgcttcgtttaagtccatggtagcttaagatggagtggaggagtggtttcgcaagaggttggtcatatgaaagagagaatacatttccaaaggaggaagaattatcttgatttgaacactgtctagcttgcctatttatttcatgtatttgatttgcatgccaaggatggttaaattcatgttagagcaaatttggagggactttctgtacagaggtggggctcttgagcagaaacctcatttagtaagatgaacgactgcttgtttagaccaaaggaatgagggtggggcattaaatgtctctctactctcgataaagctcttatttacaaatggagttgatgttttgcaaattagagagttgccttttggaatcaagtgatcagtggaaagtatggggaagaaagaggggggtggtattttaggtaagtaagggaggggtatggtgttaggttgtggaaaacaataaggagggattaggaccttgtgactagtcggctttccttcttattgggtaatgggtggcgggtgaaattttggaaggataagtggtgtggggccactcctttgtgtgtctccttcctttctttgtttgctttagctgtttccaaggaagcatgggtgaaggctgtttggaattcctaaatggtaggggggagctggagcccttgtttttctagacctttcaatgattgggaggtggattatgtggatagatttttgttgagtttgcatgggaagagagtacatagggatgagaacaacaaggtgctttggaaagtgacaaagaacggcaagtttatagttcggtttgtttacaatgccttggagctagatagttcaatttcttttccaatgaaaatcatttggaatttgtgggtttagcctaaagtgagcttctttgctacagaggcaacatggggaaaaggtttaaccttggacgaaatttagaaaagaggatggtccttagcgaatagatgttatttttgccaagtcaatgaagagtccatagatcacatcctcttccattgcgtaaagataagagttttatgggagatgctctttgttctttttagagagacatttttgggttgttatggttcatttgtgggcaaaaagcataagaaagtttggagagcagacccctcatgcatcttttggatggtttggaaggcaaggaatagaattgcttttggagatgatgtgctttccattcaaaggctaaaaggctcttttgtttgctttctttggttggaaactaagatgtttgtaaatgatggtccttcaatgctagttcgtttcattgattgattgggctcttgttgagggtggggttgttgtagttcttcctgttttgcaacttcttttttgcttgagctacttaggggtgggtgtatttatcctgtataccttgggtagctcatttggcgcctctttttaatatatattcttctttatctatcagaaaaaaaaaatgattttgattaataagagtatcagatggtttacacctaaacattcttgtttctttgaatagatcaaggatagtttctgttgtgagaggaagatcccactttttgagtgaaacacttcaattcccaagaaatacttttatctcctaagatctttttatctcaaactttttggcaagatgatcttcaacttgctcaactgttccaaatcagtttcagttactctgatgtcatcaacataagctatcaaagtcgtcacttttcttttagttgaatgctttctaaacaacgtgtgatctcctttactttgatactacattttcaccattgttttaatgaatctcctaaatgaacctccagtagattgtttaagttcatacaaagctttcttgagactacactatccccattgaagttctcatctaaactgggtaacatctccatatacacctttgctgcacatgcatttactagtgcacatgattcttctaatatggcactattgaagcaatcactcaatatattcgaccttgaaacttgtttgaaccacgcccattagaaatttaagtttagagtaaagaaatatcaaatgagtatccattgtctccatttctagttccatagaacttgatcttttcaattcttactctatgccatgagttcttcatgtgccatggtccccttgtgtgccacggtcccttatgcaccacgatcctttgcgtgcctgtgcaccatgatcccttgtgcatcatagtgcctcatgcaccatgggcactccttattagccttctagtagatcttcatagatttaaccattaagtattttaccatttcctcctttaaagattcaataagtgtgtgggaggagctacatttattctagaataacgaagtacatgcttcattgtattgcattccaattagagaacaactattttcaccttcgacaaaaattcttgttgcaatcctcttttgtgttcctttctccttagttcttctagaaatcttcaccttggtgttttcagaaatgtccaacatagctctgataaaagattatttctcttactcatgatatatggaatcacaacaatttatattgaaacctatacaaccagaaaaagaacagaaaagaacacacaatcaggaagctaactataatcaagcaacactaaaaaatcaagaagaaaataaagggtcagctaatagaagaagcaactaaatattttacaaatatattcagaatgtcttgtgcatttgtgagattttgtcaacttttcacttagaaattgttacctaattacgaggaaatacccacttgattcttgaacaatgtatatataggaaacaaattttatcaacacacaatatttttatagaaaacaagatcatattaaaagagaaatgtagaaaggatggatgtgatgtctttcaggtgaaccaacagaagaacaaacaatgtatatatatatatatatatttaaaacccaaggggtatacagaagaaggtgacttaggttaaaagaaaatcccccactaaaggactctgatgcttagggtcattcctttgccagttgatctgccctgtgggcagacctaggtctccagaagaacgagcacctgatactttgtaagatcaatgaatcctatgaatataaacattttgtttccaagaccccgtcttcctcttggatacttgagagaataacagttgaatcttctccttatgtatatttcaagaacccaaagtcaatgcctcggtgaacccctgaactaggatttagcctcactgactagttcagctagcttggagaatgctttaatcacattgccatcaaatctctaatgacattgcttattcccataggaccagttgcctcgtgagcaaccatcaaattaaatttaaaacaactcatcaaggatgaagtcctctcaatctgtctctccttctagtagtggctgcttccaattcagtaaaattacgctgaatgaaattctccgtaatgaaacataaaaatgaaaagcattccacgaaggtgtttgtttatcctaaaaagtgtctcaagccaaataatccagaaggtgatgaataaagccctcaaaggtgtccacaagctcgcttcaagggtggtggggatgtgcaagaaacattggctgactaatataatctcaactataattctgaagttatagatcacctgaaaaataaaatgctcaattatttgaatgcaagttaagcaaaaaacactgaactcagaattgatgcccttacacaacatttcaatttttatcagttcattagtgttcacctccttattagctaccaaccatgtgagagcctgcattttagttggaactttagacatccaaatgaaattcgaaaatgacaaggtgattggaggattactttagaacaagactaaaaagaatgatttcaatgcaaagagtttcttaagatgttaaggtttgacacctgtcatcaggaaaaaagtgggcacaggggcaaaggtatctcttttatttcattcattcatttatttaattatgcatagaagatgaggacaattttgcttcattagaaagaaatattgtaattaaagaaggttggtatcctccaggtgacaggaagtaatgatagatttactattcaaatataattaatgacatttgaaggccactgacattcaataaaagcctatcaaatactgctccaaatctaaaggaattaaaggtgggtggagtccccagtaacgtccaatatagttgctcctttctctgccacatggtccactttgcgatgatgactccatacgacattttagcttattgcaagtcattagtattaatggtgtgaagagagcagagggaggacaagttttcatttattgatctctcaggttattctgaaaattaagattctaaagtttagatgattgaagattggctgaaaataattagatctgatttctagcctccagtatggtgtggagacaggataaagaatgcaaagtggttggtccctcaattacaagttcccccaaaaactaatttttggaatcatatctaattaacagatgaaaggagagaaatcctagaaatccttcttgtggacaatggtgtaagccgtatgaccacattgttgacattacaccattttggttgcagaccatatgtactattgcaaacactgccacaatgggctaatttttgccaaagccaattacctgtaagatttatatttctaaaagagattcctgtaagggcagactcctcttcacattttgacctaggagtgagttctacttgtaaggttatttttctcatgttttccagcatcatccaaatcaaatcacattgaactctttccattctacccacaagatggggggacatggatgagacaggactagacaaaagcattttttatacccaaagaaaagaagccatcttctacctaccacttactagagaatctttagaaaaccagacaccaaaaaaacgataccctagaatttcccctgaagggagatatggataagacaagggccaagggtgctagttctacaacccacaaagaaagcaagcatatctagatgcttctgaccaacgttgatatcagtgaaagtatctttgtcaaagtatcctttaaacatcattcagctcagttggcttgcagtatgtacacctctggggttgggctaccattgagaggagccttgctattttttcaggagaggtttctctggtacattcttttgtgatgtatctttttatacaaatctccttgtataacggaggtttttagtggtttagatcaggtttgtatatttgtgagaaggattcctcatctctctcatgaaatctttatataatattaatacaattcttgtttttgataaaaaaaaagttgactttgttctctttgttttctcattaaagtggtcaatagtttcatagaaccaatgtcttaaaaccaatattcacttcattgttaaatggctcaatcaaattttttcccttcttcaaaaattaattttgaaaaatatggcattgaaaatttagtaaaaaaaggaagagtggaagtccaccacaaatatttgatacatggtttgttagaatagtttcaattgatcattttatattgttgattaacttaaccagtccattgcaatagaattagactctatacaacagagtatatactgggaggcaacatcatacaggattcatcttcttcctcatcaagaatccaaaccaaaacaacaaaagttaggttttatgtaaccaccttgagatgggaagactgggtacttgacaataatgtttcttgataatgggaatactaaacttgtttatgaaagcctgggttatagggtgaagagatagtagtttggataaaaaatttccttaattctgtatcattcacatcttcccttaccttttctctcaactggctggtgttatggtgaagttccaattcactcaatgcatggtactccttttaatctttcaggttcctccaacctagaaaaaagaaggcaggttagaacacaatttctgacagcggtaagttgcttgctatccattgtcaataaaaatagaataaagtctcctcttctctccagcaatccttcccaatccatatccgtttccatcatcttgcaaaagagaggcttttctcttataatatgcaattgccctaatattattccacagacaaattgtgactatgcacttcaatagtgtcctatctgcattgcctctgatattagtatggatctctctctctctctctctctctttctctccctctgagtataatattgttctgcagagtcatgagtttgtgcttcaatactagtatgaatgtctcttcttctctctctctctctcaaagaaacagacaaatcattaaaaatgaattgaggattcaaagaaggatgaacaatcctaacttaaaagccacaaagggaagcacatcatgggagagtagtagaaaaatagaataagaatacccaaaaagagttttttttctcataattaatatatctttcgttagtgataaaaaaagaaacctaagaaaaccaaaaaaaaaaaaaaaaaaaaaaagagagagaaaagtacttagttacttagggatggatgaatccctaagaaaagcctttagcctatgctgcctaggttcaagtatgggtgtgtctaggtatctgattcttcgcaactcaaattttttaggatatggagactcaaataaaaaggatccaaaaaacaggtatgagcattgggatacaacataatgaaagaaaatcggttaaaaataaagtggaagtgaagatattctttttaaaagcttccatttttccttcgaatacctttttcatcctcttatttccaaatattcttacaaaattcaattttcagcttactcatctttttctcaaatgtaattattactatagttgaaagaataaaaggaaattaatgaaaaaaatcaaataggagttccgactaggatccaatacccacaaccatgtcatatcatatggacataggtatgttgggtgaaattgaaggatccaggtgtgatagccttcagcagtggggaaccttggttgctcaaccattttgttatctgattggttaatctaggaatccaagtgaattgtaatccatacccttgaacagatcaattattttgtgcaaccaaccatgtgattgccaaggctcttgcttccactgagataagcaagaaagagtaatgaccaagttaacttcctctaagaaattgctaatgtcaaatgattgcgcctttgttgaacttcccaactgggccaatatctggaccatgattggctaactcggtccctgctgacttggggacaactctagccattttgcctcaatgatctatgaatgcaacaccaatttaatttgacccactttattggaaattcacctgtcctccctatagaacaagtataacattaatctgcaatgataagacttgtaggagtacccataaactctttagtaactggcacctagaaagagccaaagaggtgaggtaatgaacagctgcacataatatatatatatatatatatatttttgataggtaaatacgagaaatatattaaaaagcgctaaaaggcgcaaccaagtacacacgcagtatatgaaggaggcctaaagactagcaaaagaaaccccacaatgaacagctgcacataatgactccaagggcttctgtatatcttaaaaactcaccttaaggatggaaagtgcagcacctgcaataaaacaccacccctggaaatacttctaattccattaaaagcaataatcattatatctacaatatttctaggagcccatgctaaatgagcaagcccaaatactgtgccataacatggacaactctcctcttttgacttacgcttccagttagtgcatacaattattttcttatggacccttgttgaaaaaagtggtaaggtgaaggccaaggatcaaggagaaacatatattttttaatcttcttataatagacaatgagtttcatgtccttttaacccaatcataaaaattcaagtgtgatatttttttctctgcagtttctatatgattttctatgtattcttgtagacaaaacctttttcttttcattctttttagaacatgaaaaatggaaatgatgttaaataagaaaggcatatgaagaatggaaaaacatctttttaaatgttaagcaaacaggaaccctgcctgaaaatacttcctggcaaaaaatcatattctattgacctgctattaatgtacttcctgatgggggttgtcttctaaaataatgtgggcaaactaaatggaatgcctgcaaactccttggtcacaaatgcccaaagaaaagtcatgaagcaccttctgtcctgaaacgatgaaaagatgtgcgtattctcaaaaatcctacaattcctcactaagcagatcacccaaattgcagcaaatggaaagcaagctttaagaaatatggaatgttcatcttttggatgagtttaatagaagtgctgctttatgcataagcattttctgctccatgcaatctatatttctgtggttctttaatatattacttcataaaaaaaaaaaaaatgtggttttactaaaatccctaatatctgtttgaaattttctgttatagaagttgtgca

SEQ ID NO: 13423 - DNA, 9782 bp, Vitis vinifera
  Intron number 5 from transcript GSVIVT01007840001 (locus G SVIVG01007840001) derived from phytozome v7.0 (chr-ID chr1 7; pos 8494786 to 8504567 reverse strand)
gttttgcctgaggtatgaatcatgcatattggagattcattctttatcaatttatttatttactttttttattcaaggaaaatttttcccttttaatctagcaacacttttgtggaaactatggtggaaatgatgtcaagttgatgaaatcattctactaaatgcaacaagtggtgcaacttgatttggtttgagttgtatcggcctcgatcccaaattgaatcaaccaaagtgtaatttccattttcttaaccctgaatcagcatatgaactagtagaaccatactaacccaacacctgcaaagttcaagttggttgatgaattcttcaaattgttctattacaatatgagatagaatgtcttcaacccctttttttttggatgaatggcggcctaataaaatttagaagtcctttatcacaaagaaatcttatcaaggatatcaatctatagcatacctatagacaatatctaatgtatgcaatcatatttgtaaagaggctgacctcgattcttcttctcatcctcttggaaaaaagggtcaattctcttttagttagtcatgattttggaaataaatcaattgaaatatggcataaggtatttagagttatatgataatttttttttttactatttatgtaaagtaggttcttggttttggattggtttcaaatttcaatacaccctaatctagaacttaaccaagaaaagtttgttcttctcttacctaacctaggagagtgctaaacccctaaaagagtcggactaacttaccttagaggttgtcgggttggtttagttctctggttgcttgtacccttgagggcatccatgcaagtgcacttttgcttggcttttcgggaaaaaaatttatgcttggtttgaaaatggattgaagaatcatccatataatgtctttaagatttgtgcaatagatggtgtttgtttttgtttttaaaattatggtgtttgtatctgaatacttgggtgtgccccactttatttgttaggcactgttatccaataaaatttccatttggctataaaaaaaagggaaaaaaggaagaatcctacactaggtttaatctaatgtggatgtggatggaaatataacaaaaaattttggccatccattgcaatgcatagagctttttcagtgaatagttatttataatttgctgaacttattcttatttaatataaaaaataatttgctgaactttgtgaaagaccacaatgctttagattagcaaaaaagggagttttaaccttggtatccaagatatatatatatatttttttgattggtaaagaaaaatttcatataaaaagagatgccaaaaaaatgactcaaggtatacaatacctatacacccacctccaaaaagaccaaaaggaacctagatggcccagaaaacaaccttaattaaagcccaaccaatcaataaaattaactatagttagagggcagtcaaccataagcaacttaccctttgaccaaatagaaaaaacaaaagagtattcggtctctggattgacaacacatcatccttgaaggccaatctatttctcgcctttcaaatcgtccaaaaaatgtaaagaggagtaactctccacaccttcttgcactttttgcccacaaaagaaccatgccagctaaggagagtctttctaattgaagaaagcaacacccaaaacaccccaaataaagtaaagagtaaatcccataagacccttgtttttgaacaatgtagaaggagatggtctatggtctcctctttctcaagacacataaagcatctatttgccaaggcccgtcctcttttttgaacaatatccaaagttagggctttgccccacgtagcctcccatgcaaagaaactaatcttgggctgcacacacacattccaaatgcagctagcaggaaacaaaaagggacaacccgcttctagggcaaagtagagagacttgatcgagaattttccactctttgtttcagtccaagacaccatatcatccacatctccaagtactctctttccatgtagttgctccaagaatctttccgcctcctctacctcccaatcattgaatgctcttgaaaaacaggggttccaacggccccaacccccctcagccaaggggtcccaaatatctgccacccacgcttccttatcaatagacaaagcaaacaaggaaaagacacacaaaggggaatccccgcaccatctatcccgccaaaatctcaccctccgcccattacctacaatgaataacatcctagcgtccaccaactcccaatccatccttattcatttccacaaccccacaccatgcgcctctctcacttcccaagagcaccaaccccctctatcttccctctaatcacttgattccacaaagcctcactctcatttgcgaaacgccaattccatttagaaagaagagccttattgagaatggaaagacatttgacccccaaaccccctttcttcttacttaagcacaccaactcccatcttacttaatgaggctttcgctccaaattagcaccaccccaaaggaagtccctttgaatttgctctagtctccgtctaattgagcttggtaagcacaacaatgacataagatagaaaggtaaattcgacaaagtgcttcggattagagtcgccctccctcccttggataaatattgtctcttccacatgaccaaccttttatggaaatgctcttccactccatcccacactgctactgacttaaatggagcacccaagggcatgcccaaataagtggacggtagactaccctctctacaaccaaagtccaaagcaagatcatcaatattctctatcctccctactggaatgagtttacttttttccaagtttattctcaaccctgacacgacctcaaaccacataagtagccaactaaggtaagtcaaatggtcttgataagctttgcaaaacactaaggtatcatccgcaaacaacaaatgggaaattagaaccccttcttcactcctacccttcaccctacaacccgacataaaacctccatccacaacccttttaaggaaagagctaaagacctccatggcaatcacaaatagataaggtgaaagaggatcaccctgcgtcaatccccttgagctttgaaagaatctcgtaggggttccattaaccaacacagagaagcttgcaatggatatgcaccacttgatccacccaatccatttctctccaaaacccattttctgcataactgtgagaagaaaagactagtccacattgtcgtatgccttctctatgtccagtttgcacaaaatgccattctcattattcttgaggaccgaatcaatggcttcattagctatcagcactgcatctagaatttgtctacgtttcacaaaagccccttgagccttagagaccacctttccaacaaccttttttagcctattggctaataccttggccagccacttgtacaaacttcccaccaaatttataggcctaaaatcccttaaatcttcagcccctgctttttttgggattaagaccataaaagttgcatttaggctttcaacaaattgccatgttcatggaattccttgaagaaactcatcacatcaaccttcacaaagtcccaagcaaactgccagaaagccatagagaagccatcaggccccaaagccttatcaccattacatcccaacaacgtatcaaacacctcttcttccgtgaaaggcacttccaaagcgcatgcatccatctgctccaaagtctcacactacagcccggaaacaggaggacgcaagtcccccggattgggcagcaaagacctaaaagcattgactatcccttccttgattccattcttctccgtaagctaaacactattaatcctaattttgtccacattgttccttcttttgtgagcattgaccatcttgtaaaagaaacctgtatttctatcaccctcttttagccacacttccctagatttttgcctccacgtaatctcttcaagtaaaacccattttttatattcttccctcacttctgttctagcttccagctcttccaaggacaatatgctattcttctccttagcatcccaaaactccacttgctccaaagccaaattcttcttgtattcaaccctaccaaagatgtctctgttccactccttcaatttagacttcaaaacctttagtttttccgccaaaataaaacttgaagagccactaaagctgtctccctcccaccaagacttcaagagatccttaaaaccctctacttttagccacatattctcaaatctgaaaagggaaggacctcttctcagaccccctccgtctaaaagaatcggaaaatgggtagacacaggctccctcctctgctgcgctcttctagacttaagatgacattaaaatccccaacagcacaccacgacccattccaaagctcctttatggcccctaactcatcccagaaacactccctatctctcctcatggttgggccataaacccctgtaaaagtccacatgaaatcatcctcacaattcttaaaaatacatgaaattgagaacattcccttttgtaggtagaccaaatccaacaccctattatcccagaacaccactataccaccaacaacaccccttgaatccatagctccccattctagaaatctccctactcttaaactatgaataataccccttgacatttcctggatcttggtttcctgtaagcaaaccaaatccaccctattcttctttatcaaagctttgatcaccttcctcttatcacaattattagcccttcttacattccaggaaagcagtctaatcttcatttagacctgcaagtactacccccccttctccttctcctccaagatagttcactgtccattccagttttctcaactctctttcaaattttgacgactccaattttttaattttcctaccatccaacttccctttctgaagtttcctctctttcattctttttaataaaaacaaaatctcccctttgaaacccttcgtcaacattccaagataacaactgaacttagccaagcaactggaatgccagcatggctcacccacttcattcctctcctccacatcctcttggaaagtcctttccgaaccccctctatcacctcctcgacaaccccattagcccttcctgacaactcagagacctccacctccctcccttccgccaaaatcacccttaaagggcccaactctgctcctccgactgcttctaaaccacaaccttgttcggatcccccagcagtggcgacgattaccccatcccgcccagaaggagtagaagatggagagaaatcctatttccccaaagaaaaccaagaacaaggatggcaatctgtgtacctggaagcctcctccatcaaaggttcgttggtaatctctgtaaaatttagcgctggtggagacgaccccaactgaagaccaaaaacttccttgtctggtcctccgcagtcatgaagacccccgcaagccctatccccatttaaagctttagaattgggtcgtcccaccaactctgggcctttaaagactccgacgtgggccgacccacttccaaagagtcttttaggataacgctaacttggccctcctcgttgggcctcctctccaataccatctcccttacccggcccaaagagctagaaccttgggttataggcccgatatttgggatctcctcccaaacagactgcatgcttcctctggtcacattaacctctgcccctcttgccgacacaagggccaagagctcgaccttcctttcttttctgcagtcactttcaccaacttcgcacgacacaaccacctttgtagactgcccatgcgtctgtacctgctccacattgcaaacgacgcgtgaatcacctcctccatcttccctaacctcctgctccttacccgtcccatttttgatcaccgaagccacttccgacacccctagttgcacctcccaccacaactgaatagcataacaagaagatccaattgccacctacaaagagcttgaccactctaaccccttagatttcactaataatctagcccattgaagctccttaaaagcagcagtgtcttcatccactgcaacaaatcccccacaacattccccaatctttctaaacacttcccgactcctaaaatgcagcggcaagcccaccactctcacccaaacttccttaacttgctcaccattttgagaacaccccacttttgggtcccacccttccaaatgcagaaacgattccttaaaacagcgatgccctcttaaaagcaccttgtctgcctcttttttattctcaaacttgatcaatatgaaagggccccctatccttgcaaacttcacccctcctttaatgttctagtgagatcttccctaactgcccaaagcggacaaatctagagctgacacgggagactctacccatctcccaaccatacatcggtccaaaaactcccttccgcttagcacatctttctcccccaattgtaaccacactgcttcccctaatcttctcactcttgttttcaccgcatcaacataggagtttttggccttcccctcagaaaccccaactctacactctgtcctatagaaagtggagattcccctgggctcatcacgtgtcgatactctaagagaacgaagcttttcagccaagaagacccaacctcccaaaatacctttccccttcggaaacattaaacaatgcctctttgtttccgagtcaaccacaaagctcaataagaacctgcctgcctcatttgcacgactttccaatttaaacttcctacctccatcctcccaacttttaacaaatctctgaacaaactcacccctacaataggcctccactccctccaatagacaacacaagctaaggctcccaaacttgatccacgaagtcaaacctttgctcctttccacaatgatccccttaagtttctccccaaacacatccatagaaatttcaaaggactttgagtccactgcaaaccaacatccgcctcatcttttatcagccatttcaacgccatattatccaagatatatatgtatatatatattggaaaaaccaaaaaaggaacaacaacaaagacaggcttacatgagatgaaagcacctcaagcaatcaagcaactccaaaaaaaaaggttaaccacctttaaccaatccctagaccaataaaaaagaacttggaagaaagactcttttaaagcccgattcacacattcatggtctttgaaacccaaacaattcatgcattcatttatttgttgtataaaaacctacattattacaagataaggagaaaagacaataagcccttaaacatagaaaagaaaagaagtgaaaaagaaaagtacaatgaatgaaggctaacatttagctcgataccccatgcattaagtaggacataaatgcccactgaaatcaaggattgcttctcctttcttgtgtaggacttggtccttgttgatggaatgtggtatctattgaactcaatcttcttgtgatatgcaaaatctctctcatgccctccatgaatctgtaaaattggaaccttcccacatgcaagatctgcttttagcttcattctaccccatcccaccacttcaagatgagcaaggaccttctcgttgttagtatgcccaaaacctggcatcttgcaacaagatgatttcattttgtccacttgcttcttgaacatagcttcaattccgatctgaactgaattccctaagaacacgcatcaaaatttgggctatgtttaattctattctctaagaatagcttgatgtccttgaagaatgaaaaaatatgaaggagttctaaaactcatttagctacttatttttgggaaatcgttctttgagaacatggttagaaatgtttgcctaatatatatcattttcttgttacctaaaatgtaaactttatagtcaaattggtatcttaacatggtgtgtgaatgccattttctgggaggctataagtttgaacctatttacttgtttatttacctcatttatcaccatgtgcaactgagaggaggctgcatatggtgctacttgttaatttgatgtttgcatccctacatgcaagttggggctgcacttgagaagaggtattaaccctatatacattctttgttcattacctaataacttatgcttttgggttaaattgattgcttactttaaaaataaagtattttcaaataactaataaattggtgttcttttcacaattaatgcatttttcgtttctgatcaaaaaaataagttgttgttctttatcttcagctgttattgtcataacacaagaaaacacagagaaaacattaaactgttgcttccccccacccatgcagttggtggagagttctgactaggagtaaagaactgataattgctagcataagtggctccataggcccctaaaatacatacaaaagactcctttcaaactcctcaaggaatgaaggtctaggaatgcccaaaatccaaaattttcccctatcaacttgacagggctgtacttattccaaccaacatcccatacaaaaatgtctgaacaacaaaaagcataaaaaaatttgagtgttgaaggaaaattgggttgtcaatcaagctgtttgatgaaatttatcattaacctatgaatataagtcacctttcaacaaatgactcatagttaaattaaatctagtaaataaaatatttttctggtggactgttttgggatttttctcttggcttctcttttatctatcaaaaaaagaaaaaagaaaaaaagaaaaatcagatgctttagaaaagacatctctaattcaatctgatttcacttttttttttttactgtatttctctattgaatggtcatagtaattttattggtatatactaagggacttgttaggtgtgtcctattttatattagcatgtactgtataaatcacttgaacctggaatattaatcgttgtttggttgaatacaaggtcttttccttttttcctatctaacgaaaaaagaaaagaaaaaagaaaaaaaggagagagtttatttttgaaaaaaatgtcaatctattatttgagactgatgtttaccctatgtgtttcataagctgatatggtttcaaatttacaagttcaagataattttctttgctcatcatattagttttctcagctattacatgaagcagtcctttttttttttggatttatttttccgctttttctgaatttcccaaattttctacccaagtttttgggctaaatttatttttttgcaaacaaacttttctgagactgaaatgagatttctgaatctctacaaagaaatttagattcaggaagaggccaattatctccatcttcgtttattgtcagtttgatttagaagcctcactgaattggatggtgaaatttagaaattacttcttgttttatgaaaatatatagctatctgtgtttgacaatgttctgttctatgtgatagaggacattcttgacttttcagtgcccttaattatgagcggcctttacaaaagtcaaatgcagaattttaaagttgtgttagtatgtatagaataataaggttgtgaatgaattctttttactgccctaactgtctatcttacttgttttgttttcatactcaggaagttttcaactacaaaatagcagctcgtccaga

SEQ ID NO: 13424 - DNA, 2512 bp, Vitis vinifera
  Intron number 12 from transcript GSVIVT01035548001 (locus GSVIVG01035548001) derived from phytozome v7.0 (chr-ID chr 4; pos 2206227 to 2208738)
caagagaagatcgctatttcagcatcccaaagcaagtaagtgcactcaagtattaaactgctctgaaatttaattctagacctcattgtgagaaggccaaacctttaattagttaacaataaatgtaggtttggatatttttttgataggaaaataagagtatgtatattaataactataaaaaggatgtcaaactaaagtggcaaatacattatggcggaagtatataagtgagaaacaaaaaccagctatagtagctgcaaacccaccttaaaaagaagagtctgcccattctataaaatctaataaagaagttgggtcttcttgccggtcacctagaagaaacccttgagatcacatatacagattagttatgagggaatccttgagggcagtgcgttgttctccttcaaaagttctttgatttcactccttccaaattatccataaaaggcaaagaggggttgttctccaaatcttccttttttttctacccacaaagctatcgtgtcatccttccaacaaatccataacaaaaaaagaaagaacccacaaaatgtcaaaaaaagagaagagaaaatgccataactttctagctaccccacaatggatgagaatgttcaaccgattcatccgcatctttacacatacaacaaaatcctactaaaacccatcctctcctcttgagttgatccatagttaaaatctggccccaagtcacttcccaagcaaaaaaaactcactttggtaggagcccaggaatcccaaattacctttgaagggaaagtcacttcacccctatcttccaatgcattttagaaagacctcatagagaacaccccattcttgctagctttcctaaccattttttcttcatcttctctaaatctaccaaacccaccaagttttagaaaaaaattatttacaacgtccaactcccaatcatgaaagtttcttgagaagcaaaggttccaagtgaccattcctctttctacccgaacatcttccacccatgccttcttagcaatagcaaaagtgaataaagaaggaaaagaatccttcaaagacatatcatcacaccacacatctgctaaaatttgactcttcttacattacccacctcaaatcttgttttggctttaaaagttcctcatacttttctaattgactttcacaatccaactccatggccttctctcctttcccgagagcaccaacctcctagttcttcgccaaattttccagaaattagttttctcaacaacatatccctttccaaggtaaatctccaacaccatttacccaaaagagctttattgatactagataaatccttaaaaccaaggccccctctttttttatctttgtaaattgccaaccgattcacaagatgagtttttttatccatagaacctcctccccaaaggaatccctttggattttctctaatctcttagtcaccaacttaggaataatgaaaaagggacaagaagtaaattgggaggaggctgcacaaagtacttttcaacaacgtgattcttcccccttttgatagatattgccttttccaaaaagccaatcttttgaagaacctttcctccatcacatcccaatcaactttcgcctcaaagtgggcaccaaggggtaggtccaaatatgtagcaagcagttttcctatacaacagcccattacctaagctagctcctccacattagggacattccctattggaataagttcactcatgctcaagttaatctttagacctgaagaagcctcaaaccaaagcaaaacccatgctaaataagtgagctggtctggacaaggatcagagaacatcaaatgtaggtttgggtatgtttcccattctatacgtttctgtttgagcattttttaactccaaaaccatagttaagatcagaaagaaaacatatttttcccgcttcaactggcatgaccaaacatgcttagcaagtcctttaggttattgagaagatgagggaaagaaaagaaaactcagaatcataggacctatgtggcaatgttttttaaaacagttttcaaaaaaaaaaaaaaagaagagttttgagaactcataaatgaaaaacagctttcatacttatatataatgtaaaagttccaaaagtactctccaagcagaaagcagttctcaataacagtttctaaataggtaaatattatctggtattggataacatttggaaccagtaaatttactttcttgtcctgcccaatggagcactaatctttggaaaaaaaaaaaacgaaattatatttctcagttaaatgtacttactgttcaagataactgaatcattgaaaattcagcatctctgtcaggtccaactcaacccctttgtgttttctgttcaatgcagaaacaaaaccaaagaagtcatggttaaatgggaaagtggattttttagttcaaacatcgcagttcagtcaatactaatcttcatgagttttttgcttttcaggcaaagacgt

SEQ ID NO: 13425 - DNA, 9465 bp, Vitis vinifera
  Intron number 4 from transcript GSVIVT01020254001 (locus G SVIVG01020254001) derived from phytozome v7.0 (chr-ID chr1 9; pos 22215671 to 22225135)
ttgaggtaactggcactattaattgaaaaactataatgcattaatgcagagtttcccaaatttacctagcaaataataataataataacaacaacaataataataacaataataaaataatgaagggtttcccaaatgctgtactgttatggtgttattaatctcttcttgctgtatacatgtccatgatctttagcgtgatatgctagagggttgtatacattgtgatagtgacaaagatgatttagcagagttacagagtacatgataaggaattatgggaaatattataataagttgatgttgtcaaccaaactgccacaatgaacattctgaagctttgttgggcatttgggaaaagcggaatcctggaaattggataaggaaaacctttaattaatattttttttaccatacaaaaatagaataggttgatcctaacaattctacacctctttaggatgatagaaaataactgcttttattatttttgagtggatgttgctctttaggagatacccagggcagcttcatttaactcatgttttgttaattcttcaagaatatagggtttgtttagccatgtttttttaaattaaagaacaaaaaataattttttagtattttataaaaataagggtgtttggcaagttgtttttaaaaacaaaaaacaaaaaacttgtttcaatacgttgtttataaaaataacttttgtgttttaattttgtaaaaatatttgaaattcaaaccttattaaaaaatgaaaatagttttttaactccaaataaattgaaaaataaatagtttttagtaaaacatgaatagtaatattatgataaaatcataaattacgtttttttttataaaaaaatattctcatatcatatgttagaaatataaggatattaacatcttcataagttttttttgttaaaaataattaataacaatttaaaaataataattattaataatattttatataaaatgaaaatgggcctagtttttcattacatgtacacatttaatactcaattgcaaacataatattctagattattttaatttaatctccaataaattagattagtttttttaattcgaaattattcttaaaaattaaaagattcattcaagaatttaaattattaattatgtcttacttaatttgtaatctatttacctagtgagaaaattttaaaaatattgttgtgtataggagaaatagtaaaatcatgtatgataatgtatcagttttgatctattattttttttagtgattaaatgtattttttgtgttccaaattattttaaaatattgttaaacccattaataaattcaatacaaagttttgcttgatttgaagttcatttttttaatgagaaaatttataaaaatataattatgtgcaaaaaagaaataataaaatcattatgaactgatttttattcataaatttatgatattaatgagtttattatttaagttccaaattatttttaaaaattactagactttttatgaatctaacgcattaggtcttgtttaatttggaatttatttgcttagtgaaaaaaaaatttgaaaataatgattctatgtagaagagaaatgatagagtcgttctagatcaatttttgtccataaatttctagtattaattgaatcgtggtttgagtcttaagttaattttaaaaattactaaactcattagtgaatccaacgcattaagtcttgtttaatgtggagttcatttgccttgtggaaaaaaataataataatttttctatgtagaagaaaaaaatggagttattataactgatttttgtccgtaaatttatggtattaattggatcattatttgagttttaagttattttttaaaattattagactcgttaatggatctaatgtattaagtcttgcttaatttggagtttatttgcccaatgaaaaaatttgtaaaaatatgattgatatatatatatataaatttaatttggagtttatttgcctagtgaaaaaaatttgtaaaaatatgattcatatatatggataaagaagaaactaaccaagttatttaaaataaattttggtctatgaatttctaatgttattgacttccatgacttttttagtactaactaaattggtttttaagtttcaaattattttttaaaattaataaattttatgtatcaagtataatttgattagaaatttatttgtttaataaaaaattttagataagttaaaataaatttagaaaaacacatgtaatttaaaagaatatcatagttgaagatttttggtattgtttttagaatgtagagagagaaaaagaatgacactatgttcaattttacttgttttttatgggtttttttttttttttaaatttctctatgttttccttttgttttttaaaaccggtgaaaacaacttctacttattctctaaaagttgttatctattttgatttgtttttaaaaaattagaaattgaaaacaacagccaaacagtgttatgcattcattaaagcttacaattatgaccaaacaggctaatagattatcaacttacagtttcatgactagcctcatcaattagtctgcattcatttcttttggctgaaacaaattggagattataactatccaagggcttctagtgctaggattagattcttattctttagtttcaaaggagactctatgttttgtatttgattaaaaagactcggtattttaagtgatggatgtcagagctggagagaaattccaaacatgtaattttagatatgcagcttaccatgtgggaacctcaacctagctatttgcgcccgctacatatacatcctttaatgctatattcaaaggcatagacaacacaagatatttgcaaaattcaccattatcaccttgccaaaatttgcttgctcttctccatcattgtgtgagctatagttgcacaatagtatactatagcatatagcacatttaagccatattggataaaacattgtgaaacatgagagtcacttgactaaggtggcttcatcaagtaacagaggtaaataaatgaattggatctaagattgatacaatccaaactctctttgagcttaaaatataggagataccaagaagaaataaataaaattatcttcaacccaaaatctcttcataagcaaagtagaaaatttcaatccaactttttttttttttaatttataaataagagagtgaattaattaatgcaaaaaacgtacaagagtacgtgagttgcatacaaagagcaccaaacaaaaataaaaaacgaagttacacaaaaaaatactcatttcctcaacaaagacctaaccaatttatgaaatcaaccaaagacatatagcctccgcctatgtacaccttaacccacgaagagaaattgctatgaaaaattttcaagcctttgatatgacaattcctcactttcaaaaaatctcctatttctttccttctagatcatctagaaaatgcatgaagaagcaactctttaagccttaatacaccttctatctacaaaagagtcatgccaccctagaagagttccctaatcggctcaaagataacccaccaaataccaaaaatggagaccaccaactgccataatattctcgccttgtcacaataaaggagaatttgatcaattgactctaactcctctttacacaatgcacacctgttgcccaacatccaccctcttctttgaagctaattcaaaatcaacatctttccttaagaagcctcccatgtgaagaaactcactttcgaaggaatctacaagttccaaattatctttaaaggaaaagggatcatacaatttctctccaacatagaataaagccctcttacaaagaagacctctttgctatctcccttccaaattactttgtcctcctccctcttcactgtttgtccttggattttgaataggaatcactccatgtcacccaactcccaatcatttaggttcctaataaaatgaaagttccaatttcctcatttccctcattgctcccaaaagtcagctatccatgccttcttgtagtcaaataaggcatacaaggatgggaaagtctcacataaggctcctcacttcaccacctatctttccaaaacttcaccctacctcctattacccaccgcaaaggaaatctttgtattaaaaaaatcccattgtttcccaatctctttccaaaccctaaccccaaaggaatctctcaccactcatgacctccaatccccttcttcctcccaaactttccccttatgattttcttccacaacaagtctctttcactagagaagcatcaacaccatttgcaaagaagggctttattgagcaaagaaagagaacaaacacctagtcctcctttcaatttggctttataaacaattgaccacttgactaagtgtaatttgttctctaaggccctccttcccacagtaatccctttaaatcttctttaatctcaaccttacaattcttgggatagtgaacataaacataaaatagattggtaaactgactagagtacttcgtagtaaaatgagtcttcccttttttgagaggtgttgtctcttccataaagaaagcatcttacggaactactcttctaccccatcccagactgccacagacttgtatgaggcccctaatggaagccctaggtaagaagaaggcaacttttccatcttgcacccaaattcacaagccaaattatccaagttcttcaccttccccactagaatcatctcactcttatcaaattaatggcttcgaaccacatgagaagctaacataaaaaagtgacttgcttttgaaagaccttacaaaaaacattagtgtcatcagcaaaaaaggagatgagagatttcctcaccccctatgttttttaaaaggctattaaggcttatgccttgagacttgccacaaaacaaggccttacaaattagccttgaggctatagcgtcaattaagttaattgaggcttaagcctcaccctatcgaggcttatagcctcagggctattaagacctaagcctctaatattcaaaggttttttggcccttatgggcttttggtgtatattttataaaaggtttaagtctcaatagtcaataagctataatgggttttatcatctatgcctttgtggacttttgatatagattttatgaattttgtatttggttctcactttgttaaagcctttacaaaataagggcttacttaactttcaactaacttttaaatataagagaaaaaaaaaagattgagaagaataaggaaattgttaacactcctattggttaatcttatatataatctaactattgatagataaaaaagataccactacaattagtggacaaagaagaagatggatgagtggatattaacataaatgaggaggataatataacaattgaatattattatattccttgaaggatcctagtgatggtaacagtaatgttgaaaattatttggtgaaactatgagagacttaaattttatgagagaaaaatgaactaaattagaacttttaccaatgaaaaataaaccataagagagctaaatattataagagaaaaatgaactaaattagaattattaacaatgaaaaataattaattttattattatgaagtttgtcttttttattattcaattttattgtgattttatgactattttttattttttgataatttttaattatttatttgtttaacttgaagcttacacctcattccgcctcaaggcttatgcctcacctcatttaggcaaaacacctcaacaacacttttagccttttaaaacattccttctccctaccccctcttcccccaaccttgaagcctgatataaaaccaccaagcccaactttcaaaagcaaactactaagggcctccatagcaatcacaaacaagtaggggaaaaaagggtccccttgtctcaattccctcaagctttgaaaaaatcccataggggagccattaattgaaacaaagatattagctgaaaagatacaccactttatctaatttatccatttttgcttgaaccctatcttgccaaaaattgctaacaaaaaacctcaattcatgtggtcataagccttctcaaagctaattgcagagcagtaggcttattagcacctgatataagtaggctaccaagcattgggcctacaggagatgccaatttatctatataaaaaaatgatcataagtattctcaatatcgagcttgcacaataactcacaatctctcttttttagcattgaatcaactgccccatttgctatgaacatcgcatccaaaatttgtcttccctccacagaggcattttgaagcttggagaccactttatccaccactttcttaagtctgttggccaacacttttaccaacaacttataaaggcctccaatcaaacttattggcctaaaatctttaagatcatcaacatccttcttcttgggtatcaacacctttcttattggggatcaacaccggaaaagttgtatttaggctttggacaaacctaccatgctcatggaactcattaaaaaaatttagcacttcatctctcacaaattcccaactaaattgccaaaaggccataaaaaaactgtctaatcttagagctttgtcaccattcaactctgacaacgcaccaaacacctcttcctccgagaaaaccccctctaacttcctagccccaatatcttccagcaccttaaaggacaaagcatcaacaccaagcctttaacccccttctttagaaagaagggttttaaaagcaccaaccaccccttcttttaactctctatcttctataagacttcccattcactttgatcttaacaagaaagtttctttttctgtgagcattaagcatcttatgaaaaaacttaaaagagtttctatccccttccttaagctaaatttctcttgatttttgtctccaagacgtttcttccatcaaagtccatttttggtaatcctcccttgcaaaattccttactcctgcctcagcagtagacaaagtaccttccctctccttagcgtcccaaaagcctatctaatttaaagcctcctccttccttgccaagacattgtcaaacacttctttattccatctttttaagttcaacttcaagactttcaactaagacaccaaaatataactgacagaacctgagagctccaaacccaaccactagcccttcagcagatcaaaaatcccttccttcctcatcaaacctgaatggactgagaccgtttctaaacccaactgcccttcccctccaataaaacaagagaatgatcaaaaacaagttttggtaagaccctttaggtcaccccattgaactgaattttcttcccctcagacactagaaagcgatccaatctagaaaacgagcagttgttctgccctccatatcaaggaaaaagacctctactagcaagagatctctcaattctaactcaatgatgacatcaagaaatctcctcattggagcgttcaaccctttgatagcctccaactcaacctaaagaccctctctacctttcccagaacaaggcttatacacccctgtgaacacccacacaaaatcatcctaacagttcttaaacctgcacgaaatggaaaactctcccacttccaaatctagcagctctaacaccttgatatcccaaaacacaagaacccctctagcaacacctctagcattcactgaaccccactttaaaatcctccccaccctaacgcttcttacaatgtctattgtcatcaattgaatcttggtttcttagaaacaaaccacatctgctctctgagacctaatcaaggactttattgctttcctcttctccgtgtgtcattagcccttctcacattccaagataagattttaagaatcattgacaaactggaatatcccttttggaaacactatcaccatagttaattgagttttccaacttcttaagtgccctcacaaacttcggagaagccaaaaatttcctccctttttccaagctcccttgtcttcacctctcttctccacttcatctttttcaggagcttcaagatctcctcttcaaaaccctgggtctgcccatgaaattgctgaaaactgccaaagcgctggcagaccagtctccacccttgacctccccttcccaccatgattatcagttattaggggcatgccatctatgtttaacatagatgactcttgaaacctttaggctgaaggttattttgcaaaggaaggttatgagatgcacgtgcatataaagatgaaaggtttagagagactgttagatggacattactcaagaagaacaagagaaaaagaagtgagtagaaaatagaaactcctagagaagagagaaaagagaataaactcaacttctaacttatttccaaatactctgtttgttaaagtgaacgtttttcataaacttcacaggacttgctaagcagttaaaaggaaaaagaaatctaaaatcaagcataaccaaatagtgaccaaatatgactcaagttcccaaagcatttgggttttctacagagtgacaatgcatgtttccttatccagttggaggctgcaagataaatgatggttttgagtttcaatatcagcatcagcatcagtaccctttggacttttagatcaattattgctgatatgtttgctccatgatcagttagcgtgttttgtttcaggataagaaatatggatacagaatatggctaagctgaattagcttgaatgtgctgtaatcttatattttgtacttatttaattatagaaccttttggtagtaaaaatgaaagacattgtcttagatacaagttctgctatcaagatgatataactatgagcagttcatctgaaattgaacaacaatttattgatcagtgcttgatgcagctgtactaatttgttccttaaactaagtgtgctttctggggattggtttttcctctttgtttagccttttggcgtccttgtatatgctatgtatgcttttgtgcacccttttcttagaagcttttaatatatttgctgtttgcatatcaggggggaaaaaaatttattagagggattggtttgatgctatgggttgtaggaaaaggttttgaaaaagctccactgctttcctgtttggaatacaggaccaccatctgcttcatgcagattctttaattttctattactaagtgagacgactatttatgtgggaagtccctctgtgtaagctatctttattcatctgatataattgatttgttcactataatgcatgcaaccttctttttcttggatttgtttttcatggaactaaagcttaagtgaaattttgacattggcaggttgctgcagttcctgagg

SEQ ID NO: 13426 - DNA, 4218 bp, Vitis vinifera
  Intron number 1 from transcript GSVIVT01031753001 (locus G SVIVG01031753001) derived from phytozome v7.0 (chr-ID chr3 ; pos 4062570 to 4066787 reverse strand)
agttcttggcacggtgtgtggaagatatatacaaggtcatccttgaccaaaacatccctatcatggatgcatgaaatgaaattttaggcgatgtttaatttttgaaaagtattaagtgaagaaaaaaaaattaaaaaaaaaattaatttttttattgattttaattttttttttaattttttttttacttttcttttatatataaatatttatattttccttcaaattttttaagaaccaaacattaagattttcttaaatgatagaatcatttttgcatgagtacacacttatcaattatagtggacgctatcttgcttctcaattattacaaacaccgttcaattcaatttgttcaataatttttattataattttatattatatatgtttggttattagaaaatagtaagaaaaaaaatgttaagaaaaatgattttttcatatttgtttcgacatgaaaaatcaaatataattaaaattatatataaatttatatatttttaaattatttaatttttatgtagaagaggaaaaataagtgaaataagtgtgaagtaatatataaaataatttattgattttaaatctatttttttatttttcttttacttttcctctgtatttttttttcttgcattttatctcatgttttttggtgtttgacgttattgttgtaagactttttcataggaaaactagaaaaatgaaaatagccgtcaattacatttgtctatagcaccacttggtataatagagtagaacaaccaacttctagaaatgccaattgaaatgatagaaagaaacaacctacttgactgatgaaatatcaaataaatgcattaatcataaattagtcaacaaattttataaacacgttttaaaactgtaaggattcttttaggtccaaagtgaattgagagcggattataacataaaaagattaaaaacatttcatatttttataaactaagcacccactctcacttctatataaagattaactaatttaaaatataaattttttttactaattcaatacaaaaataaaataagttattcctatttttatatttatttttttaacaactattttttcataatatttttttaaaatactatttaaaaaaaaaaaatccagaaggcgggctgcgggacaaggcaagacttggtgacagccattgctggtcaagtcgtttcagttgtaggaatgcatccatcgcattctaaccatgagaagtatggtgcagatggacgtgtgggtcatgctagagctcctggtcctggaatcccaaatcctagtccagcaccacccagtgtgtggagtgccccagactcccagcagcaccaccctctggtccactggtctttcccattcctcccatgctcctgcaaattgtaagtaccccaaaattcatctaccttttcacccatttattcccacatcattaattcttccttttgttgatttattttaatttatgatcacttcttagaaattttgagaggtaaaaatgtatagaaaaatgaagaagattataatgccctatgggtcatcaagtttattattttagggttttaaggaatttagacaaagtcgaggtaaacaataggacgaattcatattttactcaaaaaacttagacttaaattctttcaaaacatatttaaagggtttataagaagttttttcccgatgtcctaatttcaaattagtcttaaaatagcaaaatggtagtactgattgaagtacataagaattgattgattaatcaattaggcgcaatatgttaaggggatcaaatgcttttacaataatatttcaaccaatagaagtaaaaaccttgattggttggacttttaaacttccaataatcatttactaactacaattctttcttatttaaaatattaaacttaaatatatagtattttcagagtcattttaacttttgtagtattttgggtatgtctttatagattaacttgtaaaaatttatcattatcgggttcaatatgattgatttttgcatattatgaattgagaaagcaaatctaaataactcaataaaataattaaaggctttttattctatcaatttaaatgaaaattaattaatttatgtttaggtgtcaaccttttaggtcttactagtcttgtgacgtggacttgcaacttgagtcttgtaagaataatattttagaaagagagagattgtgatgtgtccccaatccagctaagagttggggtgttcacatttaccaatagacacttccaatcctattgattatttgaattaacgagtggttgtgtttctttccaataaattcgaaattttctataataatttttattattaaaaaaaatatgtttttttttataaaaaagattgaatattattatttaagatataaatattacaaaaatattaaataaagtttagattagaatcaggttattcaaatcttgattgaagtttaacccaaattgaattcaagttcaaaaaacttaatctaaactcaattcaagtaataaattgaactatatataaattggatcaaatcaacgcatctaagttgtgtgggttgcacccctaatatctatgaataatacaaaagttttaattttttttttcaattgttgttgggcatgctttatggaaaacaattaaaaatacttaaattttattttatatttctaattaaatattaataataaatattttatttgtataaaagtatttataagaaaatattcattaaatgggtctcaacaacaaacaaacttgaattaaggtagtgtgggtagaggatgggattggtacgagaaattaaattccgacactcgtcccatctcccatccttccatttatttactaatttttttaataattaaatttatttatttttcccaagaatttgtatttatgaattacatattttatatgttgaaaggtgaaaaggcaaaaataatttttaaataaaatttatttcattttatatataatctaataacataatatttaaagagtggtataatttttaaaacaaaatccgaaactcgtcttaatcttgattaaatatttgttaaacattttttattatgagtggaacataacaaatttaggagttgaaactttttcttgagggtatagaattggtaaaaaggtaaaatcgggtttggctggtgggtcgtgtatgcgttcttacaaccttgaactcgataatatcaggcaaaaaatggaaattaattacaaaaataaattgaaatggaaaattcaaaggtgtttttattattattattattttcttttcttaaaaagttctttgaaaggaactaggaagctcaagtggctcagcgaacacatgagcatagaaaagtctcggaggagactggctagtggatgatacacaattcataatctctgacagagataatgacaagtcttttcttctctctttcgcttatcacattcaaaattatcatcaatgaaattgtaccatcatcatcatggggtcgatattaatgcaaatgggaggagattccacataatacaacaccccttttaaccacaaaagttaaaaatgagaggcctattggctatacatttcaaaatttgtatgaaatatgtgcattaaaattaattttaaaatacatactaaatttacaaaaataatttgagaataattcaaaaattattttctaatattttgtaaaacaaatgctagtttgaaaatctaaaatatttttaccttattttttatatttttaaatatgttttaaaaataaattttatatgtagtattttagttttaattatttttcatatttatataattattttttaaaacaatgttcaaaaaataaaacaagtcaaaataatttaaaaaaaattattttttaattattaaatatatatattttaaaattttattttaaaaaatgaaaaactgtttttgaaaacactcaccaaacaggtaatatcccctaaaaagagagaagacaaaccaatataatattacagctatatggggagtagcatagaaattcaatttactattacattgggttttgtagaccctttgagggttgaccacatgaaaatttcctagaaagtggatttgtaaatatatatatatatactaatactatattttggtttcttaaataaggagcaactaggaaagacttggaggcggccattggtgaccaattca

SEQ ID NO: 13427 - DNA, 6509 bp, Vitis vinifera
  Intron number 3 from transcript GSVIVT01025513001 (locus G SVIVG01025513001) derived from phytozome v7.0 (chr-ID chr6 ; pos 113102 to 119610 reverse strand)
acatcggcgagaacaggaggggtcgctttttgaaggtaattttatttgttaattttccctctttgccatggttacgcttgcttttcaagacattttcctttttttctttttcttttcttatcttttttcaatgcataaagttgagcaattttgagttatgcgtctaagtttgtttacagaacttgctttcgttgactctccatcgctagtacaaaattcaacttagattccatgtgcttgcactaaaaaaggggaaattctctgtaactgcaatctttttgcttgtgcatgatttggctcaattatttgaagcaagatgctgcttaagaattcagcatttcgggaatgccttccagggtagccaacttggaactggaattacccttataaagccatgttttttcacaaatctaaaaatggaaaaaccttgaaaggggtttccttgggaaacctgcaagaagaaaggaggcctgaatattggaggcatgcagtcctgaacttctctccttgttaaaatatattcacttttggcaaagtcttcttgagtatgaaggacatcttgtaattgcgtttgcattcttaggtactaatcactcttattgttaaaaattaagggccaaagttgcatcctttttgataatgattctttacttttctaggggctttgtctcattatgttgttggctctgtaatttgaccatgattataaccatcgattttagtcatgaaattactggggcccataaaatttcggcattgcagagttgattatatatatataattttgggtagaaaaaatacaaaagaaaagaaccatgagaatttaaaagcctgaaaataagatatacattggataggttaatgttgttctgaaacttatgaaatcaaccctgcattaagccattgagacatcactcaaccagcaacagattggaatggggataggagaggctcatggtttgggtccattaaattacatgaaaaaaaaaaaaagcttgccaaataaaaaaaaatcaacgatatttttttatttctcccaaattctatcatcagcttacaacttatgaaatcaaccctgtattgagcccttgagacttcactcaactggcaacagattggaatggggataggagaggttctaggtttggttccatgaaaatagtgggaaaaaaccattacctagcaaagaaaaaatcaactatatattttctttctccgaattgccatcatcagctcttcatccaattctctttataaagaaaattatttacaatccatgcatttttttattacaaatctctaaacctattgtgtattgtcaatcttggcctcaataggttccataccgattgatttattaaacttaggtgtcaaagagcgacagtttgtattccaactagtcacaatttggatttgtgtaggcatactgggttaggcaagatgggtttaaatttttgtccctatggaatgtccacagggttaaaatttctgcctttacatagttttctcttcatcctttgtatctcatgtagaatgagttctaatatttgctagtattttgagtccaatttgtattgaactggtttactaagtagggattattgtgaggttgtactactcacattatggagatcaccaggtctaaatagtaaatttattcttttatcattacataaataattctgattttctctattttattgtagttgtattaagatgattatatctttagataacttacctaatattccagtttatttgttgaatgttttagactctagcaataattaataaattatgccacacttgggtatcctttttgttagagcttcacagcatattgcacctggtattgcaacctgggaggttggattgaaggcccgttctagtccattttctatgtttaaacaagctgcccatggcctcctacacaatcccattgttctggttgggcttggctttaattgctcaagttgcagcccaactggtgtccttgctaaactgacacctccatgtttgacttatccatcttggaggtgcagctgaattatttttcttgtgttgatcttggtagttttccttccagtttccttaatttcttttggctttgtcagtatctaatgacacaaattgttggttttctatttttgagacttttttttacgaacattttgttatggtgatgttcttctttctttctccatggatactgatacgtctcctctttttcctttttgtttccctggatagtgattactactactattattactattattattattattattaggaattcaaatattgatataaactattagtacaattattattactattattattgttagggattcaaatatatgatataaacagatatatgtaaatttcttattgttgcacaagatagaattaattttactgatcaacccctatctctattgctcttggattatttatgtttcttttactgaaaaaaactagtgttggaatacccatttcctaagcatgtgtttggatgaagcatttggaattacctgaggaacctgaaaatagtgggatttcatttttgattagagaaaatggagggattgaaaacactaacattgcaaaattcttgttggaaaaaagttcttggacttaaaatttttactattcaactgaaaattatcctgtttggttgtatatttcttccttatttgaatgagttttacttcttatagaagattgattaactatattttagttgtcatatatttctttaaaatttaacagttgacatatactagtttctacttctattggtcatgtatgaatctgcaagcgtccaccacttacgtatgagccgaataatagcatatgtagctgacttaggtggcttcatggtttgttctctttgttgattactgagtttttgatgagcctaggctctcattgcttccaattcatcttattgatgttttggggctacctttttttttagtttcatttcttatggagttctccccttttgtttgatatcttttctcttgcttccaagatgaaggaaagtggactggtttaaggcatgagaagtgtcagaagctttggatgcttgtgatttaatagaaaggtataatcctagttgaagtggaacaacagtaaatatcttgagtggttcacctcaaatagttgggacaaagttttatctgtgtcacttgtgaccttatgcatgcacaagtgcttgtgtatgcatgcacaccttgtcatatagatttgtaatgtaggttttataactgtttgtgaagctcttttgcaaaaatacgtgtgtggttgggttcttggatagggaggaaggactgtatatgactgtattctgtgcaccccaatatcatgcaatatacgatggtgatggctgctttatatagctgggatggactttcttaattcacaaaatcaacttttaattctggagataattgtagtttgttcccatgctggttttgaagctaacctcttgttgaagtactgaagtcaggtttactttaaaaattgtagatcgatttttttctttcctgcctaagtgctgatgcaaaggatgctcagcttgccagtgattgaaggtgttggtgtcgttgcttgaactgtcattaagttatgattctcatatgaatggttgactctgattttctgatagttaaagtttactgtgagttttaaagaatcttggtgtgtccatggctttttgtgcatatagttagaatttatttttgaatgttggtttacgttttgttacagcttcattttataattaattttttattttattttatttttttattttttattttatttttaaattattgtgaagcatggggaaaggaaagactttctattaccaaaggtattgaaggccatctttgtatagtaagatggttgtcccttgactgttgttccccccatcctcttctttcttaagagaaaaaaaaaaagtaaaaaaagaaaagaaaaggaaaatgaacagaataagagagaaaatgaagtgattgttttatctgcaagaaacccaggacaagcttccttagtttttattttttgttaatgaattgaaaggctggctgaacgtttatgtgtctgaacaaactatctaaatgacaggctaatctgtagattgcgaaaaaataatctccttgtaaacaggttgaacccactgttcatttcaagagtgcagaaatcctccttcccatatttttttttaaacttctcagaatttgatttccttgcacaccatgattcaaaactgtgctataatgctagtcatttgttttatgttggttttctggttgttttatttctttctttgattttctttttttttttttggtgctcaaatctgaggatatacaatgtaattttctttgccaatggcaagccaggtgaggctaggggtccaggctttctggcagattaattgagcaaaatgatctaattgatcttctctctaatggatcattatacgtgtggtttaatctttaattgggagggaaatttttagcatgatttagttggatacacctttttggtgttgctggagtgaaagtcactgttgggtgacatattgttctgatggtcttgccaagacctcttttgtttttttgttttttttttggccaaggagctgctgccaaatcttttcaccttggagattgcttcaaggatgtagctaaagaagagtagaattggcttggcagaagaggaaaggaaaatcatcctctcgctctgtgttaggattcttatgtcggttgcttgcattcttcctctttatccatttgcttccgacacatcaggactcccaatgcatcagatgagagagattctgcgggtgaaactagcttcttacatatgtctacttctctgcttggcacctgaatttgcactgagacaaagaaagcaacactatctgcttgcagcattgtccagccttcacttagtgcgatatttactgaaccctcgcaacattcacacctaccctctcacctttcacccctgtcctaaataccaagctcataaatttatttcaaaatattgggcattcagtttcactttgtctgcacattgctcgtctgtgcataggatttccttttttttttgtgtcaacattgctcatctgtgcatggatgagcttcctctaaaaggacaagcaagatgatagcaatgccatactaatttatggaatcctgacatccttcatctgccttaacagtaagtttggcgttcaccctcttccacacttaggcaattcttgaaattgagaaaaagtatgctacaagtgtgccatttcttgatcaaattaaaatcttggaattctagcacgctctttcttcttattttcggtgatctcttgttactaaagggacctgaagcacagggagactgggcttagtgtgtggtggtctgtggacttttgttgcaagctgtttgatggtgacttctttcatttggaaaggggagggggttgttgtgataattacatggtatcatcaaatcttgaaagtcttggacacaaaaataatcttgaagagatcccttggttcctagaaatcagagtcctatttatgtaggaaacaattttctcatggaattgctaatcctgcaattcttgatgagatctcaaggtgccaaaagatgcattgccttcttgctgaagagggcgattttctcatgagggtttgctgatgctgaaaagggtgaatgttatttctcagttgaagaacaggaccagtggacctcagatgggaaattttaaagaagttaatttttcaaattaagaatcctttataatgagcctgttctaaggaaaccaaatgttgtcaatgccctttctctattgaatatccatagtctcattgtttaagcccttgaggagaaataaattatttacaccatttttgacctagaatgcgataaatctcctgacacatataaggtataataagttcaaccccccttgtttcttttcaaacagagaaaaaataaaagcttgaagagaaaaggatcagatatcctttagagagaaccatggaaacccaaatccttaatacaccaaatatgaaagcaaatgaagggtacaaaattagtccactttttgagggaggtgttctttcattttcttggagtattcatttctaatcgtagaggaatattttgtggtaaggagaaaaaaaaaaatcaatctttcattttcaaacctcaaagatgctgtcataaattctggaaggaggaaatatctggtagtgttgactcttatttaattgtgctgtaacaacaaatgcaattcctaattttctagtttgtatcaagttcatttcttgttgcttaaataactgcactgttacttcatgacttccaaaattgtgatatgagaaggcaggtctagtggtttgaatataatctggttcttgaagcttttttggtctaatggagtgaagtctgcaggtatctgaagcttctgttagcagaaataggagtac

SEQ ID NO: 13428 - DNA, 7149 bp, Vitis vinifera
  Intron number 1 from transcript GSVIVT01025814001 (locus G SVIVG01025814001) derived from phytozome v7.0 (chr-ID chr8 ; pos 11562055 to 11569203)
gatttcttcttccagacaagactcctcattcaaaggtattcttttctataaatttctattctcattcatctgtcttcgttctcattcatctgttttcgtcgtagatctgtttgattgccctgaaaatataattatagggaagcttttgagtcggttaggttgccgagttataacttatatacagttttttttttttttttcaaagcactagatacgttggagataaagttcgaaagtttgcattttttaatcctctgtttcctctgatggtactgtggttcgatgtggtggtctgagggtatcggtgtttctaaacaattttatagcagaaaaagaactgtaaatttagggtttgtatgacgttaaatatttacttattatttattctttgcttagatgcgggggtttgcatccgttgtcgcatgcagttaagagttatgataattgaaactcctttttattgtatttttcttaggcttcgtttgttaattattatcctggaagatttttgtggagatgaatataaattttcagagttgagactttgcatgcaactagtaaagtagacatcatttgataaatgacaccagtagagagatgttttctcatgaaataaaagttgcattgtaaatatgaaatcttgatttgactgatttatttaaaatatagaagtgaagtgaacaagttattatgaaattttattcaataagtttattctgagtaattacaaaataattgtctaagttctgttgtttaagctaagatttggttggttgggggaggtgggatgctgtagtttaattgaaatgcttttgtgggagtaaggcttaattgtgatagcaaattagtgtttagacaaagaagtggacttccttgggttatttgtaaatttgatgcagggaaggcacgttatattgcaagttatctctttttagaaaaatgtgtagttgttaaggaggatgggatatgtagagagagagagagagagagaaagatggagacgtgggtattggtttcaatttcttcatcttaatgaatggtagctcccaaagttgatgagatcactatcttgttttgcaaggccaatctccatctaggatttgaactagttttgggacttggaattagtcttagtaagagtgagctcattctagcaaggagtgtgtagtgaacttaactcatatgtctttatgggtcggttgcaatagtggatccttgtcttctactaatttgtgtgcctctaggtgcatttttaagccatcctatgtttgggtgtctatggaaggaaggtcgaagaagaaactttactctaaaaatggcaatatttgtcagaaagagggagacttacacttccaaagaacatctttaagtttatcaatttattctttgtcttccttcaagattctaagtagagtaaggaaaagaatggagaagcattgacatgattttctatggggaaatgggtttttgaggggaaaatttacttggtgaaatggacttctatttgcttttcaaaatctaaattgggggaggagggtggcggcgctgcacttgtggaggggtttgaggtgtagaaatctttctctacttgattcaacattgtttggaaaatggtactacatgttttctatggagcataataacttgtaaagaagagtcattataggcaagtatggggaagtggagggggtttggtgctttaggatgggaagggagatgtataggatgggtctttggaaagccattagttatgtatgggatatctttgttagaactatacttaaagtaggcaatcaaaggaagactaaattttggcatgatgtgtggtgtcgggagaaccaacttaaaaggagggaatgtatgattccaaatagatgctatatgtgtaaagaagaagaagaaacaatgggtcatatcctcctttactacttgaaagtggtaatattgtggcaattgaactttactctatttggaatagagttgatacactccttaataaagaaagtccttttgagttgacatgaatgttttgtagggagcaagaggaagaaagcttggagaatttcgcctttatacctttctggaccatatggaagaagagaaataggcgaatgtccaagaataccaaaaaagcatattaagcactcaaacaatcatttatgtataatttttggaatgggctagagtgtacataggagttgattccttgtccatgttagactttattgactagttgagctctatatagcggatgtgggttgttttttgtgtacccctctacttggttttgtggtgcttttgtatacactgtttattgtagtgtgctcttatgtttggcactattaatacaatgaatatttaccaatcaaaaaacaaaggaagggatctctaaaggatcaatgacctcacctttatgttttagctttacatagaatacttggattgcggatttgtgggtggaaagaagagggtacttggttattggttgcatcgattcaaaaggatcttttagtacttaacacctgtgtagtcttttttgcagcttatccatcttttttgtactaataagcagaattgtgaggataagttgttttgatgagaagcaaaaaagggtattttacctgtgaaacccttctattttctctacactcaggaagctctctctttctgctctaaagaaatttagcttcagtgactcctaaagtgtacccttcttttggggaggctaaacagggggagattcttaccatgagattcttttatttttctctatactcaggaagctcaattttgtgtagcctcccacaaaaaattaagcatgctttagaaggggtccttttagctaaatttcttaccattgatagacttatgattaagaggtgctttcttttgaatggatgttgtatgtgtaaaagtgaggaaacaactaatggaatcctcattcattttgctcgtgtggcatgttagctttttgagaaggaaagcaaaaaaaatttcttttgggtggagggtgatgggagcaaggttcaaagtatcaatcgagttgtagttgtatcttgagtggctatcgcccaaatgtgtttgagatccattctaagattttcaaattccaacaatgaattggttggtactgttttcatggccaagtcatgactgatacattttagtcatggtcaacttgtcccatgctgtcaaactcgtacaacttctaaagccatacttgcctgactatggattgtcaagcaatcgactctactggatccaagttttgataattctttcaaccatattcttaccatggaaattatcatcctgctttctatactcatcttaagaccgacgatgataagtttaaactttctagtgtgtatcattaaatgtgggttgcatggaattattttctttttaagtagaaaaacaattcaacttgaaattctactattttgaattttttatttcattgtagactaattcaaacacatgcttttatggtgttttaaattgaaagaaagtcaaatatgataggtgttcttttttgtttaggacctctagatttagcgattgatttgacaactttgaactatggatggaagggagaggtcttattcctcttttgtggatttcattaattgttttggtgtgtgtacctatcaaaaaatatataaataaataattgttttggcatgtggtagactgcaccttggcctattgtatttttttttttttttttctggtgcttccttatggtgctttttgtatactgcttgtgtatgtgggtgccccctcttttttagcagttttctataataatccattgagctatcagattttggggtaacattgtgccccaagccttgcatataatgttcgcacatttgcctacaaggcatctcaaaagtactttgccttagctatagtggatattgatagtaacactgaagcaaaagaaataatcgtctcaagcttgtcttgtgtgcaccgagccttgcatataatgtgcacactgtgtgcctacagaggtgcctcagaaacactttgcctgagctctagtgagttgtggtgatgtttgcctcactgcacctggattctttttttcgcctagccacacctcaactattatggaatgattatcatcaagtccttttacagttgttggaggccaccagtgtgtatgaacttttttcagctgggagagtttggtgctcactagcttcatttaggttgcctgctttgtgggaggatctgtgagagatgttgtcagttgatggctgggtattgggcatccttttcatcatcaacaggttggttgagtgctttgggtgcttatgtgttgcttatttgtgaactactgggtcatggctatatccatgattccatgataggcccattttgtcgttggttgatcaaagctggaagttttggttagtttgtttgaaactgtgctatttcttgtcttctttggtatactaagacagtgcacaacaaggttttccaggactaaggactttctgatttctgtggttgaatcttaaatccatgtacttgtaagcttcctttttaagctttgtttggaggtcttgttttgtgattttcttagatatgtttaagttccattaatgtgtttgttctgctttccctttcttataccttatgtttaccttggtttttccatttctcctcctaatgaaatggatatctattcattttttatttgataaaaacaaatttaacttttatatattgtaattaggtttgcttaatgtgatgttagaggttatttatttatttatttttataagtaaataagatttcatatataaaagagacgctaaaaaagcgactcaaagtatacaatacctatacacccgccttcaacaaggccaaaagacaaagaaaacccaacactacaaacctacttagaacccaaccaatcaataaaattagctatagttagagggcaatcatctatgaacaacttagtctcagcccaaaaagtaagaataaaagagtgtttcagtctctgaattgacaatgaatcatccttgaaagccaatctattccttaccttccaaaccgtccagaaaatgtgaagaggagcagctctccacgccttcttgtgttttttgcccaggaaaaaaccatttcaacttagaagggtctctctaactgaagaaggcaagacccaagacaccccaaataaagtaaaaagtagatcccataacacccttgttcttgaacaatgaaggagaagatggtttatgttctcctctttctcaagacacataaagcatctatttgccaaagtctatcctcttttctggaccatatccaaggttaaggctttgccccacatagccttccatgcaaagaaactaatcttggactgcacattcacattccaaatatagcttgaaggaaacaaagataaaccacctgtttcaagggctacatagagagacttgactgagaatttaccactcttagtttcagtccaggacgccatatcctccacatccttaataactctcttaccctgtagcctctccaaaaatctttccgcctcctctacctcccaatcattgaacgctcttaaaaaacaggggttccaaccccccccagcccccctcagccaaggggtcccaaatatctaccacccatgcttccttctcaacagtcaaagcaaaaagagaaggaaaggacatacatagaggagaatccccacaccatctatccctccaaaaacttacccttctcccattaccaactatgaaaaccaacctatcgctcaccaacttccaatccatccttattcctttccacaaccccatacaatgagcctctctcacttcccaagagcaccaaccccctctatcttctccatacttccctctaatcacttgattccacaaagcctctctctcatttgtgaaactccatttccatttagcaagaagtgccttgttgagaagggaaaggcatttgacccccaatcctcctttcgacttacttaaacacaccaactcccatcttactaaatgaggctttcactccaaattgcccccaccccaaaggaagtccctttggattttctcaaatctccgtctaactgagcttggtaagcacaacaatgacattagatagatgggtaaattcgataacgtgcttcgaataagagtcgctcttcctcccttggataaatattgtctcttccacatggctaaccttcttcggaagcgctcttccacaccttcccaaactgtaactgacttaaaaagagcacccaagggcatccccaaataggtggttggaagactactcagactacaaccaaattcccaagcaagatcatccatattctctaccctccctactggaatgagttcacttttttccaaatttattctcaatcccgaagcagcctcaaaccacataagtagccaactgagataagtcaactaatcttgtgaaggtttacacaacactagtgtatcatcagcaaacaacaagtgggaaattaggaccccttcttcactccgacctttcaccctacaacctgataagaaatctccctttacggcccttttgaggaaagcacaaaagacctccataactatgacaaagaggtagagggaaaggggattgccctgtctcatacccctggagctttggaagaagcccgtaggggttccattgaccaacacggagaaacttgcagtggatatgcaccacttaatccacctgatccatttctccccaaaatccattttctgcataactgtgagaataaaattccagtccactttatcatacaccttctctatatccagtttgcacaaaatgccactctcattgttcttaaggaccgaatcgatggcttcattagctatcaacactgcatctaggatttgtctatcttctacaaacgccccttaagccttggagaccacctttccaaccaccttttttagcctattggctaagaccttggccagccactgatgttagaggttatgttatggaacttgcactattttgttcatatcttgttatttatttgtttctcatcacattctatggatttgttttaatatttgaagtttatattaccttttgaaactgcaggtgttggcctaggaaatccaactttag

SEQ ID NO: 13429 - DNA, 8655 bp, Vitis vinifera
  Intron number 3 from transcript GSVIVT01000492001 (locus G SVIVG01000492001) derived from phytozome v7.0 (chr-ID chr1 9; pos 14911705 to 14920359)
gaaactattggcaatcacctggactttggttccaagtatatccacccagttgtccttcagcttagttaatctctcccttatcttttggttgtgatattttgttgttgtctttaaagcttcccagaaatctatgggtaggggaaatgataacttagaacttgtttattgaacaaagtatagtcaaagtggtttcaactattttgagcattgtagtgcttgattttgattcaaattatgaaatcatctatatggggttacaacctttgggaaatgtttcattggctagagaaagacattaacaagccatttggcatcacttcttccaacaaaatttcttgggcctacaagagtctaaacacgggaaaactagtgatcccttaaggcaaaatgagagagcttcaaatcaaagcatgccttaggtcccatgaaaaggagtgcaggttctttcaactggacctagaagcattgctccaaattctatagagtctcataccaggaactagaaaagcaatttctatgattaatgctccaccataaaaaacaacaaatataaaaaataaattcaaagagagttagcaacaatacagggaatttgatctaaaactagattttgttgcttcaccgcaagcttctgttgatgattcgagttatggttatgagaagccaaacctactagtaatctacagaagactcctcatgcaaccacaagcaatgtagtcccaatcacacacccgggtctcactctaacttggtcaccttagtgcatatcatcctcctcctaatgtaatcttatacattttaaatttggatttcaaaatctttttcattaaaacaattttagttttcttaaaatttcatccttaagagattttagaaaataaaattcagtttttaaaaacacttgcttccatattcattcagtaagcacctttctcaatttattttataattttattgattttcaataagcataaacaaacttcatggttccaaataatggaatattcatagaattaattcatgcaaaattaatttgggccttggtggggtccaacatccattatatcttctttgatttgattcaagagagatatttgtttgatattttgattgatattaatcctcttcatgatacataaaattgttttacacatgttattgagctaaccttgtttcccataaagcacttagcttgttgcccaagtacgctccctaccacctcattttcaaaatgccatgaatatgcatgtcattgcccttgtttgaatgttgtctttgattgccttgacatttgcttcattatctcctataaaatgcatgttgaataatatattattcaaactaactttaatttcttatgatagcacttaagaagcaatccaaatacacaccctaactcttctttatgattgtgattgactttcttgtttgacatgctgattttgaaatcactttagcctatctagctatccataattaattgattcattgtcatatttcccttgacttagccaatagagacttctttagggcttagaggtaccttcccaataggtaacctaatccctggacctagactcgggcttttcgaagacatgcctttccaaaactttggagtcacttttttttttcttaggttttttttcttactttattttcccttttaaaataaaataaaataagtggtaactccgaattttccaaaatttatttttcacctttaaaaaacgagtctcgctaatagtggggacacatgtaaaaaatgtgggtccatagaaccctaacctctagccttaagatctatactatcttagtgcctagactcaaagaagagtcattaggtgcaagatccttacatttacgagatctgctacaactttagagtattttacaccaaaaggatttgatttgggaacatctaaatcccaagtatgacactaatatctagatctttggtatttttttttttttttttggtttttaatactgtgtttccactatgcttggatctagagaagcctaggataggatttcatacactttaactatttagggtcagggaatggagcaatccaggatttcctaacaatttggataccaaatatcatataagaaggcatccaaatccaagtttaaagcacttactgacttatttggtgatttttatgttatatgtacagttgtcatattttttcattgccttagagtaggaaaatctatgacatgttgtaatttcaaaaacatttcctagtaatagaataaagagctatttcaatgagttatttaggcatttcatccatccatagaaggcttcaagcattgtcaccccatattgagtattgatggtacatatttgcatgggaagtataagggcaatttaatgattgcaatagggatgagtttctcaaggtgaatgtactagtgtgtatagttacacactagataggacatatgatgagtcatgacttaaggctatcaagtagtcatgacttcactaagctacttcattgtgttgtctttcaaccttgagagaatattgagcttgtactaaagttagcgatggctttgacctatggatgagatcacaagtagatcacatattccctatagattgggtcattgttgatggaagttggtagcaatagatattctcaatagagacactatgatatctcataagattaagacaatgtgtccccttaggtgatcctaaagaggcatgttcataaaaactatggtcacaatagttccttaagtggaacttaacattatcaattagaaagataagatatgtcagttgaacataaaataggaggacctgtaattcaaggatagtagaagtagtgttaaaagattaatacttttcaccttgttaaacgacaaacactagttcatggggagactgaatgcaatggatgacaggttatggacctgagcatatggtgtcttgttatttacataggatattggagttcagttgattttttgtagtgagatgttaaatcaacctcaaaattggattctaagggaactggtactcttatgggtcccagtggtctttgttctaagctcatataccgttttgacacgagttatgggggttggatcaaggatgaaaatatccataattacggatatatcggtacttcaattttacggatatattagagaaatattagtggatattttgacacaaaatatcagaaggacaaaacattaatcaaactcatagaaatgtaagaaaaaaactcttaaaaatgacattaaaagtataatagacacttttaagttgtttttttttttgaagaaattaatgcatacataatataatttataatatttaacaataatgttaataagttaaagacatattttatatacatctatctaatttggatatattcaatgacataaaaggagtgataatacatgcataagtattttttttattaattaatttatatttattttgtatttaattattatacaaaatatatgataattaaaattaatgaatttgtaataatttgattctaattaatttatgatatctatatacgcaaaaatgtattaatttataaacctataatttttaatatgtaattatatatatatatatatatatatatataaaagtattaagaaatttatcattggaatatcatatagaataattttaatgttatataataaacatatgttaataaaataataaatacataaattgatttggtggcatggccttcctctttcaaatgtgaggtcttaggttcaaaaccttccatcacactctaaaatttaattttcctcaaaattgaaatgtagcttgtgacgcattgaagtattgggctagataggagactaaattgaaatgcagcttgtgacacactaaagtgttgggctagatgggagactataacctagggcccatagggttgataatatgaaatgtataggtggcgagaaactataagttggggcccataaaccaattttgggtgatttttccaaaaaaaaatttctaaaaattggtgatttattgttgaaatatcaacgaaaaatgcaaccaacgcggattaaatgaaaaactcgacaatttatcgccataaattgatataccaacgatttattcatgattttttctgaaattttgtctcttcgatatatcaccacccaatatagtttccatgtttctcgatacatgacatgtcatcaatgtttattgaaaattttatccttgactcaatcaactccattgcaccctacacatatggagacattctagcttgaatagatagattagaaaaatatgtctttatattgtaggtgtttggagataaagaggaaggcccatcatatggcactcattggggattgttttttttttttttggttgattttcatttgtattatattgtttaattttttttttatgaaccaattattatatatttaaatgaaaatatgataaattttaaacttaaattgaacttacatacattggatattatatatcacttacatgatactatataaaaattaattaactaatataataatttatagtgacaatttttttaataaattaaacaaaaatatttttatatcaaattaaaaataccaatcatttaattcacacacacgcacacacacatatatatatatatatatatatacataagcttattaaccacttacatattaataaaaagaaaataagaaataatataataaatttatgatattaaatttatttttaaaatttaaaataaaacaacaaaatttaagtcaagtgcaaaatagcagtcaacaactatgactttaaatttaagcttgaaaccgtagtttgtgactacaactttaaaatcaagttcaaaaccatagtcatcaattacaactttaaatttaaacttgaaaacatagttggtgactacgattttgaagtcaagttcaaaactatagtcaccaactactctattaggcttaaatttaaaattgtagttggtgactacagtttggattatttataaaaaaaaaaattaaaaccataattgttgagaaaccccaaatttctccattcccaagccttggatcattaaggtaaatgtaatcctatcctaggttctctagatctaagaaaaacataaataatgacatttgaaactaacaataataccatatatctagagaaaaatgtcatactatgattcgaatgttctaggattgatttctgttagtgtagaatactttaaatttcatagaagatcttgtaaactcaagctccaaatgatcaattagcccaatccaaatataccacttacttatccttgtgcaattttgcataattaccaaatgtctttatgcacacaagtgaactaaaaacccatctaacccttataaacaatgttattaaggaatatgagttcaagtggggaccattaggacccataagatagtattagcctcctcagaatctaattttgaagttgacctaatatcctactaccaataattaattgcactctagtatcctatgtatactacaacaagacatcaagtgtttgggtttgtgatctgctatccactatatatagtctccccatgagttggatgttcgtagtctaacaaggtgtaagctataaaccttttaagactatctataccatccatgagttatagattctcctattatgtgatcaaatgacatattctaactcgttaagagcatatctcaaatttcactaaaggaattactttaggcccacagatttcatgagcatacgtccttaagatcacccaaggtgacccactatctcaaagtctatgagatatcatggtgactctattgaaaatacttattctattgacttccattaatagtgactcaatccatagaaaatatatgatcactttaggatctcatccgtaggcaaaagccatctctaacttctgtataagctcaatattctctcaaggttgagaaataatacagtgtagcaacttggggaagtcatgactactcgatagccttatgtcatcactcactataggtcttatccaatgtgtaaccatacacaccagtgcactcaccatgggaaccctatcctgatagcaaaagcccactatccctctaattagatggtagtgcactagagcctcaaatagattgcttaagtccacgaaccaacttactatctaatagcactacctcaaatacactacacactagtgcatcacctctaattaggagattgtgtatcaacttggtgaagttatgactatccgatagccttatgtcatgacttactataggttccatacaatgtataaccatacacattagtacattcaccataggaatctcatctcaataattaagactagttatctctctaattaaaaggtagtgtactacaacctcaaatggatatttacctaagtctatgaatcattttttaatatatcatctacttgcaaggaactcatgacttgaatcttccatgcaactcctaatgtttttaagtcatgtacaatgcaagagatgttaggccaaaatgctcataaagtataatggatggaataagaatagataaaagtgaaattggaacattattaaatgaataatgaattccaaatttattacatcatgtcatgcttttaagggttcttttctaacaatagttaccaactacagttttatgacatagatgatcacatggttaaaacacattagattgggaattattttattactcaacttagtttatagatttttttttttttttttacaatgattatttttggtttcactaactacccccctatacaccccctagtttatgtcagctaataacaaaataagaggatctgatactcaaggatagtaggggtaatatagagaggttaatagcttttaccttattagattacaaacatcgattcatgaagcgtctatataaagtagatagtaagtcacaaatttgagaaattaaaaattagatttaatcaatttatctcgatgtgattttattgggcactaagtgtatttgaatctcttgagtggagtattgagttaaattcaaaattagatttcaagagagtcattattttcccataggtcccaatggttttgttcaaactgatattctatgttaacataaggttatgagattttatggagaattaataatttacatgcataagggtgttggtaatagtataagattacacaagaatttatgattaattattttgagtttttttggatcaagctaattaattattggaactcattaggattgatgaattacttaagatctagtgggctagatttagtaactaaacccatcttaggctaaagttagttaaacctaaaaaagaatctatataaagcctttagcttttaagattagattttaactactataaacaaatcctagattttttctcaacaatcaagaaatcattactatccaacaaaacatgtgtttgcgctgattttatctatttatttattgtgtattaacatagtacgcagacctaccactatgcaatcataaacttaaaagatgcgatgatgattatcgaaagaattaggtatcgaaatgatgcatacatcttaaaaaagtcccacgtagagggcataaaacaattaccgacttcaatgattactacaagggaaaccaatttaatttgtttttagttatcataattaaaactttgggattagtattgcccaatataggttgggagattgtctcgggatgggtgtctcattgaacatgataaaaagatatagcgagaagatatgaccacacactctctaatggttaatttaagtgcttgtcagatattgagatggctaaaaccttttttgatatataatgatttttttttttttttgttaataaatatgttttcaaattttatatcatttttatttttatttttttccaattctatttttatcccatatttattttatttaaaccaaaaattgttgagaagggaggaagaaagaaggccaccggttcttcccttaactggttaaatggaatttttatttcaaatttaaaatagatggccaagatgtaatattgaacacccaatggcttagaaaaacttttagataggtaccgaagaggtaccctagaattttccttagaaaagatatatgtatttgtcattttcttttatgttgccaagattagccaggtgtccagacctacactgatgcaagcataaactcaaagctgcaaagttgattgaattgatcaggtctttcaaatgatacctgcctgcctagcaagaaaaagtattcatgtcagtttctaagcaaagaaaggtattcatatttgtttctatggcattgtaaaactattacaagcttttgtttgtttctattttctttattgggccctttactttcttaattttataagtatatttctctggtaacccatctttgtcacaagacatattatttagcgaagagccattacatgacaatggaatatggccttggatatgtcttctggtaacccatctttgtcacaagacaactgaagataaacaaatactaaagggaagcagcatgtccgtagaaaaatctccactataggaacaaaactattttttattttattttataataag

SEQ ID NO: 13430 - DNA, 9346 bp, Vitis vinifera
  Intron number 8 from transcript GSVIVT01023155001 (locus G SVIVG01023155001) derived from phytozome v7.0 (chr-ID chr1 2; pos 21836784 to 21846129)
gtgaggtgagtaattgcttttagaattggcatgtgcatatcttaatttgtgtgttaataatacaaaaggctaaacaaaaggaaaatgaccttcaggctgatgtttgattggacccttgctgtgcaatttatctgctatatataaccccaaaatttgatgttccaatcccttggacatatgtaagactatgggcattggaaatctataaagtttgtatacacatgtaaaatagaagaatttcttgaatcttcaagtgtggtaagattctggaaaatactcctgtatttgccaatcacctgtcatctctttcatttgtgaatccctccccttttttggccttgtatacatcttgtgcatacttcaggtgcgttttaggcacttttaatacaattgcttttacctataaaaaaatctttttcatccctccacctctcaaaaaaaagtggagcttatgtccattatgctcattggcaaaccaagaaccaaccacaacctcaccaaatagtgccattcaaatataccaatcactagaccaatctttttatctataaaaaaaatctttttttatagattgcttttacctataaaaaaatcttttcatccctccacctctcaaaaaaaagtggagcttatgtccattatgctcattggcaaaccaagaaccaaccacaacctcaccaaataatgccattcaaatataccaatcactagaccaatcataaaacagtaactgaaaatcatacaagaaagaaataggctttcgaaatccataatgtgaataagagaagtaataaattttgcaagagtcctatcaggatgaatatatataggatgaatatatatataaataataagcacacagaaaatagtattaataaaaaatacagataatacaaaagtaaagggttaaggcgcaccaaacctaccaaaccagtcaacaaaattgaccatgcacataatattcccttatatacgatgcctcacacatttcagaaagttatgcataggatgcctaacacatgcctccatgggattgataaaataaactttcagtaaggaattttgtttgataatgggatcatggatcagaagatttgcagtaagcttctcaaccaggtagcctagatcatcatgtagcatgaaatagaactgaaaacaaaagcagtttcgtgagcgtaatataacattagcaacatctaaaaatagtattcaaaaggaaaaatgacattagaaattttttacttctgtgagaatgtttagccataagcatgagctaattatagatgaggaggattaaaattctatcctagattcgtagaaaggagagacagttggtgtctcccctgacagggacaggaatggctttcgggctttcctgttaacagacatccaattaaggcactccatggatctctaacccaatttttaaacctataaaaaaaacgattctatcctatggcaacaatgtccatcttttaaagctttccattaatagtatgcgaggaggaaagctaagaaaatttgatattgatactgtatggaaacagactcgcacttttatggaatgaatgtctatgatctgatggagaagtaatgcttctcatgttttcttgtttatagtaatgcatgttaaacttctcaatattctcaagaggaatgttgtggggttccattaaaggtttgagtgaataggagaagctagtcataaatatactaatccgcaaaaattttgtgaggctcttattagattgaaatttttaggaatttcaaaaccatgaatccatagaatactcatttctgattatcatttacatggtcattgtgactcccttacctacccaatacctcatgttagatgggcattggaggaattattagagactattgtgtgggatttttagaaccttttcaaaaccttgtgcgtgttggacattctattgaggctaaggctttagctctattggaaaagggtgttactaactatatggtggagagggattcaataactattatagcttttgtttttcatgctgggagaagttcttggagatatgattggtggttggtggttttatcagattgttaatctctcttatagatttgttgttcctctgtgtgaaagtgtagatgggcagaccaagagggaagtctcttcctctgttaagttggttggaaaatttcccctcccttgcattcattaggctttgccattcttttcttgatgtggagatgattattttttctttcttcttgtttgaagttgctttttagtttttatctttatattagaaacaaattatatattttctattaattaaaaagatcaacaagggtgagacatccttccacaatttacaaatatgatcaaaacaagagaagaaactccttaaacagaagccatacaagctggacaacttaggaagataacaaagatctaagagcagaccatagttacaacttaaggagcaaaagatccctaacaaaaagcattaaatgtctcgttcctcttttgctaaaggtctgcttcttgattgactaagtgaggaatccaaaaaggagaacacccaattgtctaacaatttttttgatgggtaaataagagaatagattatagagcaccagcaaaaggcatagccaagtacacacgaagtatacaaaaaaagcctaaaggctagcaagagaaggaagaggaaaagaaaatacaaaccacccacacaacaaacaaacccaaacccctaacaaactagaacaaccctcagcaagacaataagcctcccgaaagcccacctgaagccatatactaacaacgaaaacaagaccgcacccatggagtgagaaaactggacccccgctacttccccccttctccctagttgtgatatgggtgctattgtaattcactgagcattcaagcttctagatttccctctccagatgagaagacaaagatgtactaccaccccttgaaaccttaaccccacgaccttttcttgccttcattttcttaaacagagtagtgattttcttctcaaaacctaacattggcagtcccaaaaagctactaaactcagcaaacttgctaggaataatcgcagagcaaaactcctcccctccaaggccttatttacctcctcccccttaatctcctcagccctacccaccacttgcttccctgaagaacccatcccatcattccttgtgagatctaacagccttccatcttggagcaacaattgcagtgaccaaaaacttgaaaaaggagaagaagagagcccagaggagtaattaccttgaaagccagtcgcttcatttaaaagggcttcatttgcccctgaaatccactccaccggattttgacctctatctttaagagaggatcatcgaaaagctcccaagaggaagtagtagccctagggttcctctacctcttttcttgtgcacttaagcacaaggaatccaaagatgagggttggggcactaatggcccaaacttaaaaggcctaacttggctttctttagacaatacaaaaagggctttggtcagaggcacgaagagggcccataggccacactagcaaaagctagacgtttggtcctcctttcctctaaagagcccaaattgaggcgctacccatttgaaaggcccacagcctcaacggtctccccactaggtccagtacctgctgcagttcccatcctatcagccttgggaagagacactacagagatggtcagcctgcatcatttcgattgtagaaactttccctccctttgcagggttcctcaagtcttccaatgacgcctggaaagttgccttttcagaggaccctccttccactctctctatggcgcgtgacccaacttcaccttcttctccaggccctcatccactgtaactcagaggaggctccacctcactccaccagggaggaatttcccaccacaattgaatcgcaaaaacaaaggtacccaccaccacttgtaacaaacttggaatcttccaccctctaataccaaccagaactctggcccactataggttccttcgcttcgccatgtcttcatcaaccgctacaaaactcccacaagcttctcctagtcttttaaaaaaaactttccccaaaagatacaagggggacctatgattctcacccaaacttcacttttgtccctatcctccttgagacacccaaccgaggggttccaccactcttaagaacaaacttttaccatcaaaccatttcacacccaagtgaatcaccctcttagcttcaccaacaccttcgaactcaaaaaggatgaggagccttcccaacaaagccaaatggagcttccttatcaacttccagctagactatgacattttctcaagacgctaatgtctgggggttgatcaaacaaccacacactacaaggctacttttaagaaattcctcatttttgtcttgcacctccttttccacttcaatccataagacattgcaatgccaacaaaactgcatgacctcgcctttggtagcaaaccctttttccttttgttgccctcatcgggggccaataccttcttggaagaagcaaaagcgtcctcctctcttcatatggctaaggaaacaccaagacttctcagcttgttggacaaaatcttccatcccctaagaaaacctcttcctttaggaaacactaaagaaaaccttttttcttccacataccacatagagcaaaacaaaaaccggcttgctctattgttgcgtaactcaaacaaataatgtatgtccccttccacctaaacctttctgaagggttccccatccttgataatgcaacaagtctcaaccccttccaccagcaaagccaagccctttccatcaaacctaatccacggagaaaagtttggacccttctcacaaattttcccaagcacaccttccttttgacctcctcaattgaaatctcaaaggtttttgaatcaacattgaaccaacacttaccactgggagaatccactaacgttgagaacccccctcacctcatcaccatagatagtaggatttacccaattctctaacaatgttaaatatttgatgaagccacccactatatgagcctttgtccttctaatgactatgaaatgacaacattaaaattttctctagtactagaaaattaatcaatgtcctgtccctcaatatgtccgactcaaatcaaacccaactcgatgtcatgtcgagaattcctaacccatgccaagcccatgggcaactcaggttccaatgggttaacaaacaacagttattttagagatttataaaatatatgccatattataaaataagaagttaaaagcgaaatatttgcaaagtcatacaataaattattagtattgttcaatctaattgggaagcagtatatagaccaaaaggttaagatatcaaagggacgaacattgctttaggtccattttggtagggtatgggttagcttctaagtaataattaaatgatcatttcctctattttggagaaggtttctccacttttaattagagtttgtacattttgggaaatgtccctcatccttcaattgtacttttaattgatataaataatttttttttcctaataaaataaaataaataatttgttattaattttttttataaataaataattaaattaaatgaaagaaaagagccgccaaaaaacagccccaagtatacaagataacaaacctcccttcacctccaaggctcaaccacaagagtatagaaagaactttaacaaactcaaccaatacccaactattcaaaaaatcaaatcatcgacaaataatttgttactaatttaacatatatggctactaattaactcaaaactttaactttcaaagatctttaacaattaaagaaagatgataaatttattaattgggttgctcacaactttcttatcgtctaattaaaaagtaagaaagtttaaaggtatttcttatatcttttttcaatgttttttatatttgaataatacaatataaagcttaattaaaagcaaatgaataaataatgtgtgggtttgggtgtagataggttgcccgcatctttaacccacgccaatcctaatatttttgggttggtatttttctaacctaagctcaaccctaacctattcaaaccttgtccgtgccaacctgaacactaagttaggtatagttgggcaggttggacctgcccaagttgcaattatagtggtgactatgcatgggaggatgtctcaatgaacctcttggacatgcagagaagtttccaatctaataatataaggcttgagagcgtcttgttaatgcttcactggtagaggtccaaaggagggaagaagagttacttggtaaatggaattggagattcgcttctgataaggaggctctttggaagcaagtgctggtggcaaaatatagtcaagaggattacggttggaggaccaaaaaggctatgggtgcgtttggggtgggggtgtggaaggagattttaaaggaagctagctggtgttgggaaaatgtggtgttcaaagtggggaaaggcaataaaatcaggttctggactgacacgtggtgtggggatatagcgctgtcccaaaggttctcgcacctctacatcttggcagcccatagaaacgcgtcagttgaagacatgtgggaccagaatgttggagaaggaggctggaacttgagatttattagggattttaatgattgggaggtggagatggtaggtgagttgctccaagtgttgaggggattcaggattacttgggaggaagattcggttttttggaagggagggggaaatgggcagtttagagtgaaggaagcgtacagtcggttggataggcttatggatgtcgtcttcccaaaaaacaaaatttggatggagagagttccaactaaaatcatgttttttgcgtgggaagctacttggggaaagattttgactcttgataggctccaaaagagaagatggcagctccctaatcggtgttttttgtgtgcttgcaaagcggaaagtgtgaatcacatttttattcattgtatagtggccagagtgctatgggatttagtgttgggtttagttggggtcaagtaggtgttccctaaaactgtaaaggaggttttatatagttgggggggggggggtgcttttgtggggaaaaaaaggaaaaagctttggaattccattccgttatatattttttggacggtttgaaaggaaaggaatagactagcatttagggttggaggggggggggggagttaacaattcagaggtttaaatattcttttgtatgtaatatttggggttgggctaaattgtatatggaagaggagccgcattcccttttaggattcctggagtggcttgcctccagttaaggggtggtttgtttttggcctttttgcttgtaaggctttagctaccttgtatacgtcctatatactttggggctttttagccttcttttattgaattctgtgattgcttatcaaaaaaaaaggaagaagagtgaaacaagttccaaactgtatctgtcgtcttccaaacattctaaaaatttccttgcatttctttcctagtatatcatccaaatcaaatagaggctagcaatactccttagaagcttgcctctagaatgacccctatagcttttgaatgaaatgactaggatctttgacaccttataggatgggacctagttgatccaacaaggacaaacgatctatgccacaaacctcaggcaattgagcaatgaatgaaaaaagatgatcaatctgcgcttcactctccttgcacatgacgcctacatctggatttatagctttgtaagtcctccgcttgtggagtatagccttggtatcaaccctcttattagctagaagccacataaaagcctttactctaaatggcgttttaggtttccaagtaattttagcaggagcaaaaaagatggaaatggtagaatgagaaaaaactttgaagaatgaactaactgagaacaaacccaagaaggtcaaaggccaaatccttgcattagggtaggaagatgattgatacacttgatctataggagacatatggagaattaattctgcaattttatgatcgaagggcttttggtggaaactaaaattccatgacgaagtagggaaggagaggatgaaatagtagagataggggaatttcttgtcttgccacccaaaagagattgggtactgaaaatgcaaaggttaatcacccaaccaagtgtctttccaaaatcaaatctttgtaccatcacccactgaaactgagtaaaataagaaaaatcagagaagatgtcagtattaacctttcagggacaatagtgctttcatctgataatcatgttggcatcccatccattaaaatgtgacccaaaaatacttagaacaatattgtgctacatattgttgttctctctaggaaacttccacaaccacatctgtaagagggctctaatcctcaaggataccaccagcccttctctttcctcttgggcttgcacacctggtccctaccaaatcccgaccagagaaaatctttctgtaaatgctcaatctcagaagtcactttgattggaggtttgaaaattgatgggaaataaagtaataaacacaattgcacaagagttattctgccaccaaatctgatcaaaaaaattctgccaccaaaagacaagtaggctattctatttccttttttttttttttctgtgacctctcatccttatatattcttttatgttttaagaatatttttctgtgacattatattttaataatctttcagtttccaatccaaatagtaataataatggtgcatatggttgatatttcaaaagtaaattgactctcaaggttttgggtgaatgcctactaagagctttatattttttgggtatgagcttaaggtctctgatgcttgttcctggaggcattttccttgaagcttgccatatcccctttttgtaagcatgattattaccctatttttacagaacacataatttacttattctgaatgtttggtcggataccagttgactacatgagtgtattctccactaatactgtcgcttttgtcatggtcatggtttttgaagtttgctgtactgttaccatgtgtgtcattcagcactacatgattttctagcattgactgctatcaaccttgtgcaccattagacattacaacagaatctgttctactgcccattattagctgctgtcataaattttctttgcagggtagcggttggaaagttgttgcaagttttgaagg

SEQ ID NO: 13431 - DNA, 3908 bp, Vitis vinifera
  Intron number 6 from transcript GSVIVT01031122001 (locus G SVIVG01031122001) derived from phytozome v7.0 (chr-ID chr1 4; pos 1967964 to 1971871)
attcatccaaagggaaggttggtgggccccattttattttatttgtcacttcctatttatattcttgccttcttgacattgggataatttgaccattctttgccatgtctctgagctttatgcacgcaagcacttgatacctagtcatgaaattctccattaatttggttgtagatttctcttgtacacaaggcataatcatcaagagcctgaatggtacacagcataattgtcaacagcttattgtgcatcaacacaaggcataatacattttcatgtaacatgatgtattacccatgtgtattgtatcttaattatatcctaagatacaaaatgtggcacatactccttttatttatttgttggttttttataattggtgaatagaagtatcattagaaaatgccaaaaagggtcctgttaatgagatctataacaaataggctcacattcccaaggatccctttggctaaacaaatagaggtttttaggaaaattgtctttcagattctgctttgaaagctcaagccttaaaatcttcacttcctacaattttataaacaacaatacaaagccataggagctgttctccttatttttttccccttcttttgtcatattcatgcatggaatacatgtacatttgtctatttttaataaattttaagaaaatcaaatttgaaatagtttcttaataatgcaatattgtctaaaatgtacatttaagttaaaataaaattttagaaactctcttttgtatttttattcttttcctccacgttaaaattctctttatgcacttgaatctaatatcattttatacttatctcttttctttacaacttttttggggtttctctcaacccccaaccacttgaggtgtggaggttgaagtctcaaaatatttaatgagtttcaagactatgtgggaagctgaagctttactattcaattggatttgagattttacaggcttttgggacatatttttttgggttgtggtttgtctttgtgtgtgtggggtggagtttgaaatgtagcctttgagacgaagccttatttggtgagatgccctatcgcatgcatgggaaaattatagaattatctattctaaagaaggttttgcttggtaagtggagttggaggtttgttacaaaaaggggagactttgtggaaacaactcattatgaggaagtttgaaaagacccccttgtgtgtagatttccctttttttgccatagcccattgaaaggatgctttggttgtgggtttgtggagaattagatgggggagagagttggagaaaacgtttcttaagacggtctcatgattggaagaggttaatgcatttattatgacaaaggtgaccaataagaagaaatgatgaggatagactgatttggaaaaatctaaacgatcaaattatgtggaattggaaagtggagggtctttttttgtaaaagtgggttggaattcttgggtccccatgaaactagggttctttgcttaggaagcggtttaggtgagggttttgatattggattagcttatagctaagaagtagaggaaagaccttggtggaccttgctttctttgtaaggaagcagaagaattagttgatcatatccctttttatagggtcttgtggcattttttattcttcatatttggagtggagcgagtcttaacttctttagtgtaagaggatttcctatgctagcatgggagttttctagggaagaagcccaaagtgtggaaggttgcttttttatgccctttttggagtatttggaaagaaagaaatgaaagaccatttgaaaatatggatagcaagaaaatgagagaagaaaaaaaaaaaaaaaaaacccctctctccttactatttgctaatctaatcttcatagcccttcatgaataaagaatgcatcatggataaagaatgatcatctgtatacagtttgatccattccaaagaaatatctattttaattgcttgttttgattgttttgagtcttcaaaagctcgtttgtttctttcttttcatattgtccaaaacaaacatagagggagtggttctcaaagcgttatttttttttctgctttttgtccatgaaagatccatgccagctcaatagagttcctcttaaagttgtttgtttatatataattattgtcttattaatcttgtcattgataaatgaagtaaagagatcactagaattgatggatgaagaagaagaagaatggatgaggaggaactaatgtaaaaactattgaaaatagctaacaattaatttttttttattataagttttataggtttttattgttcaattttacagtttgttattgttctatttgatgaaatttattattatttgtattatttttaaaaatttatttactttgaggtttttgtccctttgcatcttgaggcttgcaccttgcctcattagtctcaagaccgctttttggccctttaaaactttggaacctggaggcttggaatttttgaaactacaacacatgaacacatatgtatccataaatatatatacatactcatatttcatttttggtatattggttggggatttgagtgaactttaagactttcgtgttgtagttttattagcagacttattttttgggttcttttaatggactatgtgtgaacacatcatatcttgttcagttgttttcagaaaaactcttatagttaatgtttacctatctattatattgaagttgtttcaccttttctatcctttgcattttcatgaaattggttatatatcactactacattctggcactacatgtgttttgcacatgcatacttatttatttatttttatctatttttcaacatgtgagaaattgttgcaatatgttacatgaaaagataggagaatgatacatgacaacttactaattgacaactatgcatgtgagtcagagtctgaaagtgatgcagtggaatatattatggtttttttaacatcgctagacagaacatcataaaaatgtattagttatatatgctagttgtctatgcatgtattatgttgtttctgttacacaagtaaggaaaacaaaatatttgaatgctttggtatgacattggcaatcatgcatgtggttaatcaatcaagagaagtccatgagacataggttttagttgcaacttactcttgttgcttaacttttgcttaaggaacttttatttgaataagatcatttttttggaatttgtgtattcaatagtgtggctgatgtttgacttttgttttgcccatgtgaaagactaagttggtggactgattgaattttctatgtcgtgggtggatctctcatattggactctagatccatcataattttctgtgaatgaataaagtgagctagaaaaaggtactcaaacccaaaactatttggatagagtagataatttctttgtgaaaagaaaagttaaaagatccaccccaaacccatgtttacttttttgattgcacatggatttcagtatgtttacatccaaaacccagtcccttccctagacatgactccaagaaagttaatgcaacccatactgcatgaacatttctggatggaaatgaacaaatttttttccatcatttaaggaccatttacatttacttgatttcatagtcaaattattcatgatttgctagatccattcatacaaataatatcaaaatactaataatggcccatatacaacgttcatgaagtagaagatgctcttggtaagatcaaagaaagagcatgttcttcttacataaagaattcttctaaagttctcaacctaatcttttcaaagaagttattagatgccatatcaaatgttattctcaatactgtcacgattaactgttgcaggttg

SEQ ID NO: 13432 - DNA, 6120 bp, Vitis vinifera
  Intron number 1 from transcript GSVIVT01036089001 (locus G SVIVG01036089001) derived from phytozome v7.0 (chr-ID chr6 ; pos 20803456 to 20809575)
gccaacgacaccttcggaagtctgtagtcatcgcttcttcgttttattttttaatttttggttttattataatttttgttttgttcggttttttggttgatctggcccgggagctagggttttgtgtgttgatttttggtgattgtggctctgtttggtggctagggtttaacgcgtaattaaaacgaatctgatgctttcttcttcatttccctgttgatcttattgtttacttgtttgcttttctgttcgcgaagtttggcggtgatggaagtgttttcctttcctcaagtacttcggtctgatcaagagattggtcgaggtttgaattataataaacgcaaaactgttgaactttgaaatgcggaagaagattgagtcttgcttttttgggtctcagaatcatgacttttcttgctagtgcaacgaggattcgtttatctgtgaaacctttttactgtgttttgtgatcattagagatggaagtccttctcgatgacaatttcttatctgtgaaaccgtctttcagtgtttactctttgggtttggaacttatttgctttcctttttccctgttctacttactcctacagttgactggagaatcaattggcaggtccaaaactctatataggaacaatatggatgttcatgagggaataatgtgggttttctattccatcacagatttatttcaaatttttgttggatagatattttttcccctgaaactgaaatgatcaatttgtcactatggtagatttttttggctcaagcaggttggcctcttattagactgatttcttaatcactctttatgtaaacctagtttccatcataattggttctagaaattatcagttacaaacattcttcaaaattttttatatataagcctatttccatgtgtaccatgaggtttaagggaggttgctgttggttcagagttctgtccacctagaaaccaactggagtcattttaaaaaatgagattacatagaatgtaaaataagccgaaccagaaactagttggaatgaagtctcattggtttggatcaggttctgcttaatttctaaaagcattaatttagtttcttgaagttaaaacaactcatcataattataaattatgataaaattattgaaaactttactcctaaaattgcatcaaagggcttacattcaagcccaataaaccaaaccaatccctgggttcaggtcagatcaggtcaagcttttgtaggattggattgaaagaaccaagttgtctcccttgttttggtggcatgagatgagtgagcttccaactaaactatgcatggtttcccaagctatttatatacattttaccttgagtttttggtattccaagaagaggatgtggcagttaagcaatcatttcaagcctttaagatgggtcatgaaagcggttggccaagacttcttgtgagtcatgatttaaccatgactgcctttttttcttcaagctacttaggcatgccatgttggtctaaggttttggcaaagggctttttgtgttccacaaacacctcttcagtttgacaggtaaccaaactctctttcaacagactgaattctgtaaaagacggttgaacagcaattgtcaggaaaggtccttgctgagtcacacaagattccatgtgctccattaactcgggtcagagtgtaagcttaaagaaatgctgaagaacacatatcccaagtgtacattctcggggggggggggggggagggaggaataccttagggagtttctatgtatgaaatattgtgtccatgtcaaattgtgactcatacctgctcatagatcattggtagatatactttttcgctatacacttcctatgtactccatttttgataggcaaataaagtgtgaatgttatatagaaagtgtcaatcgaaatagtggatgaaagtgtataggacaatacaacaggagccaaaaggcacaaccaaaaaggaggaaacacaagaatccctcacaaaagacattaagctagatccttcagttggccaaaccatgtgcactgtgactggttgcttcagggtgactggttgcttcaggaatcttagaaataaggcgtctcaaagctttagtcaagtcaattgctttgatcacctaagaatcaaattcatgagcctctcttatcttgagtagcccaatatatcactattactaagtctccctcaactaaaatattgtcaatccatcaaattcacaagggttatgccatcacataaagcaaggatcttggcctccacaatcaatccctctttggcaaacttgggaagtccttaaccacatcaccctatggtctctaaatacatccccaatctcaatatattgtgtatgatctaaagagagtccatcaaaatttagattaggtgacttgatgtaagggtttactcaatcaaggaggtttacactatgcataacctccaaagactttctgctgaaagagcgagtggacctgtggaccaaatggattagggtctttgaaattttgtttttgctattctaattgtgaaagttgctaaaattggtaccttattatttaaataatgtttgatcaatcaatatattgaaaggtagattttctttttcattttttgatcttgaaagttgctaaattggtatcttgttatgagaaaatatttggtcaatcagcattcagataaaggcattaaaaaaataagcatgcaatgtctaactaaataaggtaatttatttaatataatttgaacagccttcttattgagcctaattagagcttgagttgaaaaccttgaactagaggtgaagttgtgttgggttgggttgtaagtggcctattcaactgttgggttaggcatgaattgaccctgaacttgcattaatcctcttgggttgctacctcaatcatgtcttttatcaaatttgtatctttctagccaatttgctctaaaaaaaaacacaatatatggcattttatttatttatttatctttaattggtaaatcaaagctaaattaagaaacccctaacatggtgtaacctaggagcacaggatgtattagtggatcacttaaaagacaatatacggtgttttgttttgacagcttattggctttggaaaggtttgaattacacaggattttatgaattgagatcttaagtgaagaaaaatatattgtttgaaccagatgagaagactgaaaagacacaaaacaatttttttagcttttctttttgggcaatagctgcaacagtagtcatagttattagagtaaattcaaggggcaattactccctggctgcttcgtctcaactgtcatatcatggctcttgttcaaggggagtgcctcattgattttttatttttttattgttttttccttttatactcttattcttgaaatatctatctatgtattaaaattttgtatatgcattagttttctgttggataattcttttaaacacttagaaatattcttttggtttttatttcttttatgtttaaattaagttttggattatatttagtgatatgtgagtgtgaactaaatgcatgcatatccaattttacattatgttgtatagttaacatgcaccctaggttacgcctcactttgcccaagtgtttgcctttggattgcaccttgcacctaggccttaggatacctttgcaccttaggtgtgccttccaaaactatgttgttagtccatttaagaaacatgagtcataggcatgagatcaagtagcttcccattcaggggataatggggtttatgtttatttcttcttagaagcaagtcaaatatgatattttaggggataattattgaaagctttacctttttgaaggaagataaaattatcttatatttgaaaatatcctcaataggattatacaagatgatttaaatttgacatagtttatttcaaattaatttactggattctagaatctagttatgaaagttgaaagcaatgctaggagcagggtcctttggggtgtgagcaacgcagtccattttggatgatctggctagatatgttgagggcagatggacgcctatgggtatcaatatccttgaagttctcagtgcactgagctcggtcattttggactagagatcagcctgctgatgaggaggaggattctggagatgcatagtgggatccatcttccccaatagggtgcctgtttaacattgatgtttgttccttgattatctgggcccaatgggtatcaatgaccatgggggagtaatggttagagcttttctgcaagcatactggatagagtctggttacaaatgcagagatgctgtttaaaggcctggtccaggctgtttctttgggctgtatgatttgttgtggatggtgatgctactgcagctctttcctgggcaaagagggccttggaaattgcactcattgctttgtagaatttttaatatgtgttctggtgtggttactcctttttgagataccttgctcagcaaaccttttagcagattgtttggctagggagggaggcactaaactagaggacttcataggggattttatgcctcatttaagggttgctcccccttcccctccctccctctctctcccttcctcctcccggtcttgctttactttttttttttaattgatttttattttattttttctatctgttgtgttagggtacactttttggcagcattttctcttattctgtatgtctcttttgtgaaggatagcttgtccttcttgcacatgtttttttatatacatgtagaacctagcttctattttttaaagaacagaatgaccaattgatgaaactctcattcctttgtaatcttttagcttgggttagcttgcacttaagtgaaggctcaatgcctttgatttggtagagtggtggggtcttgttgagtgttagggttttttttgtgcctttttcttttgaggtattgctttaggtgccccttgtatttgtcttgtatactttggtgtattttcttcttttactaatttataaataccaatctatacctatatataaagaatccagctttgaatagaaaatgaaattgaaaccaggagtttgagagctagctggattcctctctttacatccatggggattctaccattatagtctaagtaacatcccaaacatcacaattgggaaaagagtgagctagtttagagatataattgccattcaagctagaatatatgaaaaacacaagggaattttaacccatctttatagctgatatagctgctagggttttggttgtggaagggtatctaaggtggggcttctcccctacatatggtattgatggccttacatgaaggtttcttgaaagggaacattaataaaggcatgtagaggcagatatcttgaactacaccttttcggatggatctttctacctgggtattgattttgctactgtaaccaattttagttgtgctattatctttgttttctagaataaacgattttgattgcttttggttagaaggatttcacatccttctttgtactaattttatggaaatgaaatatttgtttctgatgaaaaaaaaaaaaaaaaatgaaacccttacttttttttttttttttttggatgtgcttagggattgccttccttaatgccatttaagtgtgtttttctctcagtacctttgtctcttgaactaatagagcataacatttgtacttatttattttgatgtgtaactcccacctcctccgccttttttgtggtttggaatggctcacaaccctatcccaaccccttaccacttgaattaaggctcaagggcctttttatttatgtattttcttattttgaaggggtatttgtactttctgacttgtcatgccatgccttcatgcaatttcttgactcctaattcctgtactgttgtttctacaactatgtgcatctattcaggtctttgaatattttttattgctttccatactcgtacatgtttttctctctgttttttaccctttctgattttaagatgcatgtctaatgcttggcattttaatccagggcggatcccattttcataccttgaagatattcag

SEQ ID NO: 13433 - DNA, 7339 bp, Vitis vinifera
  Intron number 38 from transcript GSVIVT01020854001 (locus GSVIVG01020854001) derived from phytozome v7.0 (chr-ID chr 12; pos 1067459 to 1074797)
actattggacaacgaattttggcaaatccgttgaggtgagcctatcacagtttctttattgaatgaaatgttatgttgttttacatccaacatattaatatttacaaatatttcagtgatttgatcattttgacattttgtcacctatgaataggtatggggatggtattaagtaatagcattcagggattctaaaccaaagttcgctcattgaagctgaaaattgtggtggaaaacattttgaaacattgtcaaaccaaaataaggataaaaatagggaaaagtttgtaaacagttagaaaaatgtaaaatacacttggatgtacaaaccaatagtaatttgagtaaaaaattatgatccaaatgtgcagaccaatacataaacccagaggtaaagattatactcaaagagagagaaatagtgtgattgtaatttaactgcaacttggtacagcaggaatgtcctgctgagatgattctattaacaaccaaataattttgaatgacttcttcagcctaagattttactcatcaagtgatcaaaatattaatactgcttgattgagtggaaaaaagatccaaaaataattattgttaatattgaagcacaaaatcatccaattctttattgttagtttcgactattcttaggaatatgatattgttataatatttttatgtaaatcatttctgctgcatattgagaagctgaaataaaaaaatttatacttaaaataaaaaataagtattgttaatatacttattttttattttaagtactatggttgtttggtaaagttaacttaaaaatttattttaaatcatcaaattggcaaaattaaccctcattaattttaactaaaatttatatttccattaatcttaaggaataaatttatttgttaaacattcatatttaaagtattgtagaaacatgagaaagcgataaaaatctttactataaaaaatgagttgtgaatgtagagtcatagttgtaaaatatattttcactaaatacaggtaaataaggtaaaagagatttgagattaagaataagttaactattttgacttaatacttaaaattatttttaacttcaagttgtgatatgaagttattttaacaaacatgcttaatctacttaatgacttaaattaagtcattgagtcatattaagtcattaggttgatttaccaaacacccactaagtttctataaaataaaaaataaaaataaataaaaatctgttttctttcattttgtttttttaaaagatttaatagttttaggaaaggaataaaagtctaataagagttactacataggttaggtttctattttcatggttttgttcaaatttgaaggttttctaaagcctataaataaggctaattgatgttatataggattaatagttgatgataaatagtcttaagttcatttgcatgccttgcaactttcagtagtgagactctattacttttcttctaggtgagactcctagaaacgcttagtgagactttaagatctcccatctttcttcttcatatttttttttccattttgtattctagttttttcctgttataatcttattcttgttcacctccttaaatcctaaaagattgaaaacttagcccagtttatttgattgtagacaaccattttagggttttcctacatcactttatcttggtgctagcttaaattaagtcttctctagtttagttagctaaaagagtactttcagcaagcaacattcaacaatatgcccaatgagtgtatccagctaatgtataatggtaagaggtcaatggagccatttgatgtaagtctataatgattgggaatactcttgctataattcatttcttcttttgttagttattgctctctgacatgtgtatttgattgtttgtatctattagatgcaaatttctctttgaatataatctctttaatgaccctattttaatcttctacaatcaataaattttgtgtataaaactattttatctctcgcatttccattagttagagagacacaatggctcccatggatgccaagttccttgtacaaagcttccatcaattatagagaatagtttccatgggtgccaaaccccaatctctctctctctctctctccccctctccccctttccccactccactagcaaagaggaaaaattttgttcaaaaggaaggagaaataatgtttgcaaagatgagtaacccttcaagcaagctgcagaaatataatagctaaaagaacatacaactaggaaacccaaaagaccccactagagaacacgcaacagaaaatcttagaagagaggaattctctactaaagatatccaccaagataacttgtcctttagccaaaggattcactacctagatcgttggcctaggcttcctaccaaagaaacatcatgattgctaagtcaacaattttctgaattcgcatagcaaactttaatgccctccctatcactttaaagcctaataaggacaatcgtttattctccttctactcaaaggttactaatactcaatagaatgcctctgtaaatcctacaagtaaggttaggatcttcaattctatggccacattaaaagcagttaacttaaaagaagaagaaaggacaaatgtttgttctccttattggtctcctttcactcaaaggccactaatactcaataggaatgcctttgtaaatcctacaaggttaggatattcaattctatggccacactcaaaggttactaatactcaataggaatgcctttgtaaatcctacaagtaaggttaggatcttcattgatgattgtgtgtgcataacttcaacttaacatctcaaagagaaatcgtaagttgccacaaatttcaaatcatttcacacaatgattttgatgaggatgaatctctgaaatatatatcaagaaaggaaatttgtattagttgcaattaaattagcattagtatttgttggagtcaaattaggattatctagctaggttataagataataagaattagagtcataataggtaattagaatcctaatagactttggatttcttagagaagcctataaataagggtaattgatgtaaatcaaaaggatgaattgattgatgttaataatattatatttttttcattgcaattgttacaaccctcaatggtgaaattccattgattttcttttaggtgagacttcgagaaggccttagtgagactctaaggtttccatattttcttaatcgtttcttctctctctatttttttattttatttttctctaccataaactttattcattgttcctctccttatactctaaaatcaaaaccctaacccacctacttttgaatataggcaactgttctagggttgtcctacattagattcaaatcagtttcatgccaaaattaaagcttttcaaacaaataatggaaaagatattttttaaatatttcatctcaacaaaatgaaatgggaaagaaaaaaaaaaatagtggaagttgcttgagcccttatggtttacccataatgtctctaaaatttgctagagggatgttgtcttcattactacctatttaataaattgcatctctctaagactttaaaattcaaaactcttatctaggttctaaaaacaccctttcccagtgttaatctctttggatccctttctcttaaggtttttgggtgtgtaacctttgttcatcttccaaataggatacaatctaatagatgctagaatgattaagtgcatatttctgggttattcacctacacaaaagtgatacaagtgtttttactctacaaccaagaagagttttgttactatggatgaagctacgaagaaatataaaaaatgaaacatgccaaaaatgtatctaatcctttaagtccattggtttagtcaagaagaaactagaacaaggtaatggatcctatgtctctctctcataaccaatcttaaaacccaaagcaggtaattttgactctttttttgccaacacctttgtttgatattgatctttatgttcctactactataaggaagggagttacaagctttacaaaacattctttttccaattttgtgtcataccatcgtctaaatcctaatttcaaggctttcaccacttggttatctttaaaatctagtccaaaaaaatgtacaagaggctttaaaagattaaagtggaaagaagcaatacatgagatgagagctttaaataaaattaaaaaatgggaagtagttgaattaccaaagagaaagaaaaaaatgggttagtagtgggtgttcactattaaatatagggttgatggatctattgagagacataaaggtaggttagttggtaaagtttacacccaaacttatgacaatgactatcgagaaacatttgcccttgttgtgaaaatgaactctattagtatcttatcatctttagcagttaatttagattggccattacacaatttgatgtgaaaaaacacttttctatgtggaaagttaggggaggaagtatacaacatcttccatctagttttgagaactttcaaaaatagaaaaagtttataaattaaagaaaaagtttatagatgatatcattgttactagtaatgacatggaagaaatcaaaggtttgtagagttgactagcaagtgaattcaagataaaggatttagggaacttaagatactttcttggaattgaagtggcaaggtccaatagtgatatagttttggctcaaagaaattacatcttggacttactagaggaaactagaatgcctagttgtaaactggcaaaggcacccaatgatccaaccacaaattagggtgagaaacgaagatacaagagacaccctatgggaaaattgatttacttatctcattcaaggttggacatagcctatgtagtaactatgataagctagtttatgcactcaccattagattactcttaaagtatttaaagattactcttggaaagggattcctgctttccaaaaatggtcacctcaaaatagaagcctatacaaacacagattatgttagctctcttatggatagaagatcaatgacagaatattgccccttataggaggcaatcatgttacatgaagaagcaagaaatagacagttgaggcaagatccaatgctgaagcggaattttgggctatggcttagaatatgtgaagtcttatagattaaaagactactcagagtttaaattggcgcccaaagaaccaatgaagatttattatgataataaagttgcaattggtatatcacatcgtccagttcaaataattgtactaaacatgttatggtggatagacacttcattgaagaaaaaattgagaatgggcagattttcatgccttttgtaacaatcaaataacagctcgtagatattttcacaaaaggaatgtcaacaatcacatttgaatctaaggctgacaagctgggaatgcacatctatgaatcaatttaagaggagtgttagtaggagcaacatagaatctgtctagattcatagaatctggtttagtcaatgttttgtgtatatttggtagggagtagatatggagtcattctagggattgaatacttgtatattggacttttttggtcctctaatagctgtacaaatcttgtatttataccctgtaaaacttttctggttaaattaaatgattaagaaattaagttctccagaagcttgggatgtgttgaagctaagaggggttgttggagatcaccaacacctttaaactgggagtactaccattcatccaagctgtgtgcttgatttgttgggaaattacttcaaccaaatctgagcagaaagaagctgataaaactctgaaattctggaatgatacaaactatttaattatttttctttgcttagatagcttgcaagaatcatgtagaaggcaggaaaagaaataattacaatcttgaaactcttcactctaggaatttaggaaactcagtcaagactcgtgaatgactttctcttctaatcagagaacattcacaatagatgagctaatttgatagatgtcttaacaaagaatatgtaataaaataaaaaattaaaaaattaaaaaaataaataaaggaggaaaaaaaaaagggagaaaaaaaagggggaaaaaaaaaaagaaggaaaaccccaatatttgcttagaatttgaacaaataagctggttctttatcttaaaattaaataataaaaaagtaattcaacatggaagcaccatccttatcaccaaaaaaatcataaatgaggccactaattgaaactcagaaatagcattccaaatttggttggttgtgctagatatagcatgagtcaaactagcactaatgcatgaacctttctgcttacaaattagatgtaacagatcagcttgagattgcattgagcttaggttgaagcctaagtcaatgtattcttactcattcatgacctattttatacacctttataccatatgcatgtagaaagatattatgactaatagttactttcacttatgtaacataatgtatttaatactcaatgcctacataggtcaaaatgctcctgatctgcaaagggaaaaaatggtaattcatccaacttaaactgaattgctcaactttgactggtgtgccctaagatatggtcaagacaatgataagaggtagggttcagtttggcaggggacagcccatataaccttaggcttgggatctgttggcctttgaactaacctggcctacagagttgctgcatgattgtgaaatgacttatttttaagctagagtgtagattgggagtgtactcatctaaacaatgtcaatagaaaattaagtctttcaaattccacgggtttccacaatgcccgacaaccataaaatttatttataaaattttcctgtttatttcattgttgccccatactgataacactgtccttgtgactaaaatatttctgcaaaaatgcaatagatggatggagatgcaaacattatatgataaactcacatttcatctacttctaagctttgaagatatgtctcaattttattctcttagaacataaatttaaagtaacctgcatcggaattgtttttgcattttattgtgttttgaataacaattctttctgttttttcttgtttatattggaacatcaaatttgttaaggattcttgaaattcctcatatggttgaatataatctgtcttatttccatttattcccgtgtgactttctaattgagaaacatcctaaatttacagagtgcggttccatt

SEQ ID NO: 13434 - DNA, 994 bp, Vitis vinifera
  Intron number 1 from transcript GSVIVT01008659001 (locus G SVIVG01008659001) derived from phytozome v7.0 (chr-ID chr1 7; pos 55940 to 56933)
tttttgtgatatatttcaacggtagaaatataattgttattatcaactatcattggaataaaccaaataatcatttcaatcttatatttctaagttcgtccaaacactgcaaataagatcatcaaattcattttcatttcacaaaaaaattttacataccaaacatgcatttacttctatttgtttgtctttgagaatgaaaaattccaagggaaaataagattcctcgaagaatgtcacctcaattcctcaaagtataaagtgagatccatatttattacatatttaaatatttaaaataaataaataattgtaactagatttaaatataaatatttgaatatttagatataaagtcatcaaatcatttaatatttttaaatcattaaaactatttaataatttaatatatatttaaatgtttttaaagttattaaaatgatgtaataaagagaaatgaattatctaaaaaaaaccctaagaatagtagcaagaaggtaggattttaaacatattatcaatattttctcatcaaaaatcgtcataatttgttttttttttccagaaattccataatttaaaacttgctctttatttcataatttttaatttcttttatttccttaattaatcgctcttgttataccatcggttatattcttttcatttttatatggtttttttttttggtaaatgtgtgtaatactaatattaaatataatataaacctcttattttcaaaaaattttaacaaagacttttttttattaaaaactacaaagcagctcaatgaaattccgagaagttccgtttttatgtatttcagtattttgtattagagcccatcctaccagtcgacccggcccagtcaaagccacataggctacgcgatggcttttctagtcgcatgattatcacatgctaatccacaccgtatgaaagggtagtaccttttacagaggaaccggaccctccattttcataccaacgagaa

SEQ ID NO: 13435 - DNA, 3287 bp, Vitis vinifera
  Intron number 10 from transcript GSVIVT01018866001 (locus GSVIVG01018866001) derived from phytozome v7.0 (chr-ID chr 4; pos 19122842 to 19126128)
agtcaacttgcaggtcttctacacaataccttagttcttttctattttccatcagattttcctttcctactatagtgtagagttatttaaatgttcagtttctatatcagtgggttctgctggtgcatgatgtgaaacaaggccaaaataattaagaaaaaacactccagagatgggggtggggggtgaattgggtgttttaaaaaaaaattcaagttaagcaacaattgaagtaacataagtaaatagaagagggaagtgagatgcaaactcttttatagtggttcggcaaacctgtctacatccactctcctcaatctcctttccgagtgaggactccactaaccaaggcttcacatcaagcctttaaacttgtacacttggattcaatggctccaatgggcattacaattctcttcaagttcaataccaacttgaagtcccaaacactcaacctttcactaaaaaggatttttaacatgactcaacttagcccaaaaatggatcaatccaaataaaagctaggatgaacacaaaggggtgtactaaatggatttgtaggtggaaaagtaaatgtgcttaagtttgagagctttgaatgagagaaatgagtagtaagcaagttaatgcatatattctcttatcaatatatgcataggtgaactctcaatttatagaaaaccaaccctaagcatcctattctacaaaagtgggcctcgattgatcaagctttggttcaaccggtcgagtagttgttgggtatttaatgtactgtaggtgatcgttgttccttttcaagttttgaccaacctttgaccgggaaaggtcgagcctctgttggtagcaccaaggttttggaagagagagagaatttttggagggtttgactggtccttaatagggagcaaccaaccgattgaaccgattcccaaccagtttgaccagttcaggaaggccttgaccagttgggccaaaaccaacttaaaactcttcttttttttttttttcagtccaaagctttccaacccttgggcaactcatttataaacctttgtaaatcaattttgaaagaatttaacccaaggttttgatgtataaaccgtattcattcaatttaaaaatgtttaaggccacttttatgaaaaacaaggtatgaatgaatgcatgaaaaatgacttaatcctaagtgcacccaaaggattcatcttacacagattcctagacaatacttgtctttaaggattcatgtcttcatgtcctttgaatctattttaggtgaacttgagctttcttttgattttgtcaataaaacctaaaactttacttggtttaaacatgctaggagtaatagttacataataaaatgcctcaattataatatgttcattcaataataagaacataatcatgtgactgattctagtattgtagtttgttaaatatctcttccctgtcactagtcccttctactctcttctctggatgcaaataaccccattgttgtatgttatttcttcagacattttttcagtaccaggatggactatagttaagtctcttctgcagcatagtgtcaccaatgaaattctggaaaatgcttagcagggaacacttaaggaatttaagccctttcctgaaaaatctcctagtcagctaaatcatatataataaagggaatatggaaatacttcattcagttcagtatccaatgaaacactacaaataattaccaatgaaacactacaaatacttgatatttttgcaacaaagcaagaaattacacaagattgaagatttccagcaacagatttcaacaaacttgaagaaatgtagttgtaaaaataattacatagctttgtaaattccataagcatattccaattcactaccttgacaaactctggtctcatggttggtatgtagcatggtatgcactttctctcaagtgggtaatttggttcactcatgaaaatccactaaactaaaactttcccgcagtccacatttcatggtagaacacaaaccatgttgctaaacctattctgaaacattgatggtgtgtcacttttctttgatgtgcaaaagaaattgtcttgttgaataaatttcaacatgtggacaaattgatgtaggacaacctcagaatggttgtctataatcaaataggtgggttagggtttcaatctttttgttttaataggtaaatttttgtccccattcagacttgaacctggaacatcccacaaactctccccatctgtttaccacttgagccaagcctcaagggcaaggatttcaatcttttaggattcaagaagaggaacgaaggataaaaatttatggcaacatagaaagtaaaataaaatataaggaaagaaagatacgatgaatagatagaaccttagaatctcacccggaagaaaatcagtggactcttaccattgagaattgcaaggtatgggaagaaacttaaccatattgattatcagtacttaatatcgttttaagtcaattaaccttatttataggctctaaaaaacactagaacttgaataaaactatgaaaaagtagacataacctatgtagtaactaattaggatttttattcattttctaaaactattaaatcttctaaaaaaattaaaagaaataaaaaacttcatttttaaaattagaaacctactttatagaaactttttgtaataacatttctaataaagaagacttctaaattctaatgactcaatagaaacttcaagataaaatgataattttaaaaaatagaaagttctagaacttttaagcagaattctaaaacctcctaaattctaaataaaactcaaataataattatgatacctaactacaaaattacccaaatacgcttaattaagttaagtaattcagaagttttgtattctttcactcctttcttgagtagatcttggagatttatccataatgttaaacattatactactttgagataatgactaaatcttgttattttcacatacaaactttctgaataatgagttataatacaatgtttcaactcctctaaataagaaaattgaaaggctggtagagggaagatgttttatgaattacaataattatgggattgctcaatgttaaatatcctattactttgcaatgttgactaaatattgtcattttggcatataaagttctcaatggttataagtcgaggtttcaactttctctaaatgtgtggttatttccaactgtttgagtccagagttcttgttgaacttgccattcc

SEQ ID NO: 13436 - DNA, 18550 bp, Vitis vinifera
  Intron number 1 from transcript GSVIVT01014901001 (locus G SVIVG01014901001) derived from phytozome v7.0 (chr-ID chr1 9; pos 11442412 to 11460961 reverse strand)
gaacaaaaacccaagcttgcccaatatctgccaacgcgacaattttgcgcctcttcacagcgctgttaggtatggtcataaagagctgactttatatttattaagcgtcaccagagatgatgaacctccatatcctttctcaaattcgcctggattcgaacttctgcgcagagcactaatggtggggtttcatggtgagctatatttaccatcccctatctattttcttgatatgaattaccgtcgggttcccatgtacaattttataatatgcagatgtagcactgcatctggttgaacgttatcctgaccttgccacatgcaatttcggtgatgctaaagattctgatgatgataaagcccctttgacggtattggctaaaaggccttgggctttccgaagtggaagtcgcttcaacttatggcaactcataatatatcactgttagtttctttactcgcttgccccttttaaattgctttgtgtttgccattgcatctcccttgcttttgtttataagtcaagttattttcttttatgctaatcctgtttaattaattttctgtctttggataataattaatttggttggctacccacacctcaattgatatgatggtggggtggacaaaagtctctaagcaattatggttttatttgggaaggcatttttagtatggatggcgtgcttatggtgtgtaatttaagctgggcaatatcaatggttgcttaaaggtgtgcagtttttagttgcgctcctttggatgcaccgtttaaattaatctcttagggtgtggagtttcagtcatgctttcaaagtgtacaatttgagatacgcaatttaagtcatcatacaagttgggttagcaaacctcaaaagtgcgcaattcctatatgtccaacactttcctggtgctaacaatttacacctactctgaagcatgataaaaccaatagagtatagagaaatttatacttagagttcttatgatggtactcctacacactaaattggccaaagcaatataaacaaaaataataaagaaaataaaaaatgaaagctatttacaagtttttggctagcttctagctagccaatggctcttcactttttctttacttcccacaggtagattggaagcatccattttgataaatttttcttcatggtttcctaaaatttttgggatgccctcccctctagttaagagccactttcagtcaagaaatttttttcagtagaagagatattgagaagccctctgatgatgccttgaagatcaacattttatcacttaagtgttagaaatgttagaaacgcttcatagaatcactctcaaactcactcttagtacccttcttttaaaatcatttccctaatacatcatatcactttaaagaaaatgtttgaaatgttggatttaacaactaaaaatgaaaactgagaataaaaagaaaatccaaagaaaacaaattaagtaaaaaaagaaaaaaatccaactaaaagataggtggggaatgggtgaaatatacttgttaagcttctaaaacaacaagcatatacacaaaaatacctatagagtcatcaatgttgaaagttccctagtgacgacactaatttttggtttgtcattctctaattcattccttttatcaaaacttggaaatatatttaacagttaagttttacaaagagaaattaaactagatcattcattgaaactctcaactccttaaccaaaaaataaaaaaataaaaaaattaatagtggtatagttgttaggttgcctccacaaggaactttaaattgttagcaactaaggtaatagctttaggagtgtgaatggcagctaaaagattagaaaaatgattttataaataaaaaggacatacacacacaaagtttaaaagatagaaaattaaaggaaagaaaacctcaaacctagagattcactaggatcaccactttcatatacaactcaccaacaaggctttgaacttatgctttcagatttaggctcaaagcaaggatttatacaaaaaaggtttcctgcttcaaatgaacaagaaccaccttaataaggttcatctctctctaattgctctttatatatatatatatatatatccttacaaccaaatgatttagataagattattttcatggcaataggcctatacttagttgaaagaatcattaaaacaatgcctaagtatgcttccaaatttgcttgacgtacaatgctcacaaccaatgcaacatagactttttccccatggttacttgttttggtcattataactactgatagagatcatattgtttgtaactaatgcacaaataaaccaatagatagctaaactaagatatgggagacttgagctcctctcaccccttagagtgttaaaggttatctaagcatgttaaaaattaagtaaagaattaaaaatgcaaatttgtaagttgaaattgaaaaactgaaatgtaagaataattaaaaagactagaaaattcattaaactagaaattaaggaaagtttataatgaaaagaaaagattacaatggaaacctaaaaacttaaattacattaagttactcttattcctacttttgttcctataagaagaaaaacttatctacaatttcactttctataattttcttccacttgtatattcacaatcctccatttatatacaaaacaatgtcccccctccctccccggtcattccaactactcggacaccactcctctagacttgtctcttcttatactaagggtcacgtcctttgtcattgcaatcaaccaccttcattcttgattagttagcttatggtcagtagttgcacctttttctctatgtaatttggttagggtacgttttggtagtacaattgaagactttgaggtatgaacaacatactactttggtgggtgagccaatcattagaagaattattaagtacttagctattgtagaggtaagaatggtttgtaatttagatgacatcaaggggttgcactactacacatcctgttgactcaagtgagggggtgcacaacatcttggcttaaagcacttaagaggtttgcagatcgagttgcttgaatagggtataaaatttggtccaaagcattagagaggtcttgtgtgtttggtctttaaggtatacatgggaggtgtactatgtggctttacaaaaagaaagaagtgcatgattgagtcttgcacaccttttgggtgtgcaatttgtatttcctccttacttgggcatttttgtctctatgagttcctaacaaggttctattgcactaaaaatgatgggaaaaacctgaatctctctctgtttccctagtctgaatcaggttaggaacatgcataactatcttaggttttttctaaatcctatgcacaacagaaaaataacatttttatactttaaaaggattcaaaaagtgctaacaaaaactatacattagatttgggtgttctcgaatcaaatctacatggtgaagatgaaaattgaaatcccagaagtctcgtaaactcgaagtcttccgcccgatgactcgaaccttgatcttggcacacttccaatgaggaggaaaagatggtgaaggctatgactttctatctctttggatgatggaagacaaaagttatggaaaccctaacccatagggggtatttatagggtttctaagtaggcttaagtgacttgagcccacatgggttgggtaacttaatccagcccaaaatgggttctaattgattaatcaattagcctaatctagaggccttgttcatttactcctatataaccttacataattaccaaaatacccttatgcacaaaagtgaacctagagtcaatccaaccctcattacccattccaacaaggtatataagctcatagcagggaccattgggacctataggaataccatggatccctcatagtccaattttaaagttgattcaacattgcactacatagaatcaactaaactccggtatcctatgtaactaacaacgaagacactaagtgctcgggtccgtgacctactgtccattatgtttagtctccccatgaattggtgttcgtagtctaacaaggtgaaagccattagcttttcaagactacttctaccatccttgagctacagatcttcctgttgtatgttcaattaacatatcttagatctcaaagagtctatgtcaaattccacttaaggaactactatagccatagtttccatgaacacacctccttaggatcatccaatgggacacactgtctcaatcctaagagatatcatggtgcctttattaagaatacctattgttaccgacttccatcaacattgacctaatccatagggaatatatgatcaacttacgacctcacccataaatcaaagtcattattaacttcagcacaaactcaatattctctcaaggttgagagataatacaatgaaacaactcggtggagtcatgactacttgatagggttaagtcataactcaccataggtcctatccaatgtgcaaccatacacactagtgcacttatcatgggaaactcatcccatggccaagactaaccatccctccaattaggaggtggtgcactacaacctctaatggtttgcctaggttcatgaaccgactgtgaacaaataatctatttgcaagaaacccatgacttaaatcttctgtgcaactcctaatgcacctaagtcatgtacaatgcaaaagatgtaggcaagaatactcataaagtacaatacatggaataaggatagataaaagtgaaactagaacatcagtaaataaataatgaattccaaatttattacatcatgtcatgcttttaaggattctattctaacaaaaaaaacaccttaaagcatgtagaatggtcatagaatgcatcaaacataattttctaaggtattatacaaaaaacaaaaccttaggttaattttttagtacctcaaatacactaaagtgggccctttaaagccattaaagtattaagtttgagttctcatcacttagttcttaccttgcacttggaagtaacattgaagcttcaatgtggcgatctaaggggcaagcaccagtttttcaatatttatatatatctcaggtttccacatctaagagggtcttttagacatagtacattgattgctcattttttcctctttttttgagataagactccacttactactgctattgagaccttgtaagacctccttatcctagggtttatccagaatgggggttaacatcatgtaatgctttagtgattcataggcttagttgcattttttggttcttttagtccattttcccttcttgctaatgtcgaagaaagggtgacacatagttgttgttcaatatataaatctatttcaagaaccaatcttgttagtgatcttttggacttctctagcccttttggtcattggtatctccaaagttgattttatttggcctaggttagctttcattcctttgtatgtaaccaagtacctaaggaactttccacaccctacattaaagttgcacttcacttatttagcttcatttaatacttttgaagagtttgaaatgttcttaggaggtcgatcaagtagtcattcctcttcttacttgttactaacatgttattaatgtaaactagcatactaacttctatttgttgtcagaagacctagatgaccaaatctagcatctaagagcctagataccttttttttcacaatctaatgtctttaaggagctaaccactagggtttatgttgagttgatgacatgtaacttggggatcaatgcccacgatgtcttgtagtttcctagtaaagatgtgttcttttctaatagccatctgaaaccttttttttttttttttgcatgggctagaaggaacctcctaggtttaggggctctagaataatgactccctaggttctctaattgccttctcgggtcacctactaatttttatttgacttttgatttatgaacttcctaagggtcctagttgatgcacttgatgaccgctttaagggctatggtgtagcatactcatgatgccacctagtctcgatatatttcccatattccttgtagtattaggaatttaatggtgtgatggtatgtgaatagtgttcctcttaggttgtatatccatggtcatcccataatggcattatcgggaaaaggatatccataacaaagaattgtgtcattatatggcaacaaccaattggaaccattagagcgacttccctagttgagccacataggactttgtctagtcccacaaacgacccaagacttgacactagttttccttcgtccatattcacttgttcatatatgggctaatatatttagcaagttaactaaacttgttaggtcaactaaaaataggtgcatgttgtagtcaataattcttaaagtaataaccaatggatcttgagcagggtttggactcctcttaagcctttattagagaagcatatgacatgtgggcaagtggtagttgcttcatgcaaggatgtgaggacttttgcttcaattgccatatgcttctataactatcttgataccttgcttagttgctcaaatctagtagataatctttaagtgcatgtactaagaggcatacttcacccttagggtctcgatatcaggagcaaactctaaggtaagttgataaagacaaaacaaagttagtccttggaggatggaggggaagattttgcataaaagtcgattgtttcccttctctaagattatcacatgcatagaaatgcataagtagtctagggtgtctttagtttcattgaaagaaattgaacttagggagagaaaactctcatatggcctcattctccttctaaagggacttgggctcaatcaccttattcaccaagattatgcattttgtggtagctctggtggcaagaatcccttagagcattggggcctttggcaaggtggtctgtttggttagtttaattaaggtttatcccacctttctctcccaatttaatctagatgttggtctagttgcttcgataactattattcattaacttgcatcttattggtgcttgccaatgagagctgttggtcaaagtcacattggtatttgtctacccttaccctaaaggcaacattttcttgagtgagttagtcgcttcttttaatgagctcttccatctattgaagggtttgctctcactcattgctccacttcatttctatcatgattgcctttccctaccaaaactctattgcatagttttctattgcccaattgttgctatagatctaaacaatgtcttcaaggcttttaatgcattcccatatgaagaagctaacactcttcatagataattgaaaatttttattccaccaattttttgatacaaaaaataggtttctgcattcaaagaaatctttttcaaaggagagagggacttttttttctttgttgtttatgatttccttttataggtcttcttcccttgtaggttcaggttattcttataaaggagcaagctttatgtaggtttttatgcaggcttttcaaccttatcatgcatggaaccaagtttagttgacttcatttcttcaactttaggtctttgatttggatatacctcaaggagtacttaaatgaaggtccttgcctgggggtggggtgttttttagtagctttactgtgattttttggtgagctgaatttttgtatcttaaccatagatgacaccatttttccaactcttagttcactttcttacttcaatggatggttaggaccttacaatcataaggaacctaaagtgagcactctaggctccttatggtcgtagagccttcaaatgtcaagttagtaagaagaatgtggaaactaccaaacaaataagcatcaactcaaaggttaactttctatgtttttggaataataacatggcatagaggatgtggccattgttaaacttctccttttagggaccaattagggtctccccgcatggaggcatgggtcttagtatgggtgcatgagtatggtttaattcatcatttagttctcattaatgtgcttaggtgagaaattgatcatttaacacttttgtaagctttatagttacttattctttggctaacatgtggtcttctcctgtggagcaaccacacactcacttttttattctatcaaataaacatagctagaggattttatttcttatgatctactatacctaaaacaaacatgtaccaaagcaatagttttaagtcacctatttcactttcaactaattactttatttactctttttatttgacaatggctttggcattcatagaaaaaaagaatgatataaaacactaatttatagctttcaaagttctcttagtttccataatagtttttttttttaaattacaactttagtaatattaacctaaagaaattcctacaatgaaggaactatatagagaaaaactcttataaaataatactcttgggaccaagaaaaaatatgatcttagcaaggttattgatttatagataaatggttatttattaattgatgaagagtattatgttgttattgtacattatttgtacatgtataacttataaatttgaaaatagtacacatggtaaaaagttaataaatagaaacctaagagactgaataaaaaaaaatagttattgattgtaaaagaaaaaaagactccccaacaaagatgtggcatcaaaacttaatgttgtaaaagataaagctatttcaaatatgtgataattctaaaagaagtgaatttagaaaaataaaagttataaaaaattacttaatactatgttatgaagttctatttgctatactatgattttttgtttatacttcatcaattattagtttatatttcttaagcccttaaagacttttgaaaatatttttatcttatgtatttagcgagattactaatttagtacattggcttgagttaagactagaatattttgttttataagtaagattattaatttatcaaacattcatttattgagcttttactatttggaccattattttgtattagtatagcttacaaagtttcattgaaaggggtttaatgagtattgggaagaacatgacaaattttctttttattatattcattataataactattatattattatgttttttcctttaagtctttgagtcaaattagacgaagcataattttccttcctttttcttgacatttttattcttaaggtgttcctatgaaattaaaccattttcttagtcaacctaatagaggaggcatgaagaatcaagttggtagctatgaactatccacacaaatgtgctgttggactcgattgttcaaaggtaatcatttttagtttgtcaaattctactaaatataacaatacaactcataattactcaaaaacttgagtatataggtacacaaaatgaattatatatatatatatatatatatttgaaaaaaaactaattaaattgcaaagagtggaaacaaccaaggctgaaaatgagagatttagtatgtaaactcattaggttcaattgaaagatttagtttgcaaacttattcaaaaattaattgtattaaatacttttcctaactttgaaaaccctgatccctattttggttaaaatctttgaactccacaatcaaattggaagattattaaccaaggagaatacaataagaattaagatatctaataagcatatagtaaatctaaacctaaatagcaagctttaaaaaattataattgctaaaaactaaagtagaagtatttaacaactgccacaaactaaattgaaaatatgcaaaaggcctagaattggaattacaaaaagacaaacaactcttacagattctcaccaaatctaaatatgaaccttctcccacaagaggaatcttaactaaactttcctcccatgaggaatcttaactgataagtatgtaacttactctcaagttcttagttgatgaagttctactaagagtatctcatgaaatcgaaactccattgtctcccactcatgcatagtaggcaaaataacatcatgcatttctctcaactatatcattaccatccatgtttatattgaccaatggattgtataacttttgaacacattgataagaaaggtgtaagagaattaaactaaatttcatcttaaccaatgtaattcatccctaaaaggtgtctcattatatcttaaacacatttattcacattgagttaaacatggttaatccccctagaaaaatatttcaaactacaccatatatgtaacttatgactgaaaatcacaagggcataaaagttatcctatataattacctataagattaatacacaggatgaggaagtagctaggaatatattcattcattcttgtttgattaccaagaagatatagtatgaatatacatgccaacatggagatcttcattatgagtgtaccttagatcttctatatcgtacaaatcttagtttaattgcatcaagtaaagaactgaagttttgcacatgcttactaaatcaagcactaaattaacaagatttggcaattggctccattacaaatgtagacaataggactatctatacttggtcgctactaacatgtaagtcatattggatacaaaaaggagtactacaaatatcaatgacctaacacactatctaagtggtttggactcattatgtttcagttgtgcaaagtaatgaaagtgcatgtcgataaagtaaaataaataattaaatggcaccatcaaacaagattggacaatgaataaatcataggtataatggttaattgaaatatacaatatgtaatcataatctacatgatccaattctcttaacttaactcctatgtaatcattatctacataatccaatgctctcaacttggccctaataaacatctttacgtattagcttagtcaataggggagggggggagggatttttaaccatgaatcaagtagaaatatgttcctatgtaaccatgtctcatataaactaatatttaagattgatgtgtttggttcaactatgatacttgggggggtctttgacataggctaaagtttccatgctatcacaataaatagtagtatgctcaaaagaacaagaaatattgtgaaaaatatgcatgaacatcataaactagtcactttcctaaacgacaagtaatgtactcccaactccatgcatgttagacaatgttatacatgactattttctatttcaccaatatatgctaacatcatagagcatatataaaattataaccatatgtggatttggggtcatttatgatgctacctcaattatcattgtcatagctaatcaagtccaaattcaatcctcaatagcaaattatatagcctatggtgactttgaggtatgaaatcatccggttcattgcttttttgtaagcaaggtttagatctaattggaagctactaacctaattatataacaaatattagttcatgtacacatcattggatactttaagctactaacaatgctagcatataggaaccttgagtgatcttttcttattcatctaaagtcttatgacacatgttaaagcttaaggtcttatctttctctatatgaatgccaatagattttcaattttacatctagaattttttcaagaatattcattgtgtatgatttgtaaaacaaaccaaaaagtcttcttgattgattgattaggatcataactttgaacacatagtttgctttaagcatgttgttcattttaaaagttgacgaccaccacactttagagacaaccatctcattatcatccctaaccaacatttcattcgtatacaaaaaatagaatatagaatctacctttacaccatttaacaaacatgcaatagtgttcttagaccatcataaacccattagtgtaatataccattgtttagatgattattgtaagttataaatggacctttgtagttgttaactttgcctttctatttagtttccataaaacaagtcagttgatctatatagatcttcttatttagttctccattgagaaaaacaatttgaatgtttatttgatataattttaaatccaaagatgtgataatgggttgaataaggagagttgaggcaaacctcacttctcatgagaagttctttttcatttttatttttatactctacactctcattttggttttattaagatattaagatagaagattgaatggatgaaaagtactaagcctgaaaccctttaaggagtttttataggcttacctcttagcttgagtgacttgagctcatcttacgtttgggttacttaatctaactcattgagtcctaattaactaatttgttctattgagttccaattaattaattatccgaatctaaaaaggctatatatatgtactagtgcaaccttccgtatttatcaaaatgctcttatacacacatataaataaagaatccaactattcctcaaatatttttttaccaaggaatatgagtttgagtggaaaccactaggacccgtagggaagtgttggctcccctaaaatcaaattttaaagttgactcaaaatctaactataaagagtcaactacactttagtatccttatgatattagatcgagatagaaaacttcagtctgcgacctactaacaattgcatgcaagctccccatgaattggtattcataatttaacaagatgaatgttatcaacctctcaagactacctctacaatccttgagtcttagatcctcctattatgtgatcaattgacatactatatctctctaagagcatacatcaaattccacttaaggaattattatggccacaattttcatgatcacatgtccttaggatcacctaaggggacataatgtctcaaacccctaagatatcatggtgcttatcttgagaatacctattatcacatgcctcaatcgtagtgacccaatctatagagaatatatgaccactttagggtctcactcatgggttaaatccattgaagaccttagcactagatcaatattctctcaaggttgggagcttatacaacatagcagcttggtgaagtcaagactacctaatgaccaatgtttgactcaccgtaaatcctatttaatgtgtaaactattagaattgagtcctaaaaagagtgacatgatgtaacaaatagagatttatttataaatttattatttatattttttactttctctttattatctcattgacatgaattgattaattaaatgaccctatatggttaaccaatcaattaggacccattttagacaagattaagtgacccaagccttagagggctcaagtcatttaagcctagtagggcaacgctataaataccctctaagggttggggttccaatcactttttgagagacaatcgtcttctacatctagagagagagcctaggattcctcttttccaaagcccacattttggagtgccaagatcatggatcaagtcatcaagcaaaagatttttggtgtatgagacctctagactctttaggctttcatcttcatttagtagaattgatttgagaaccattcaaatcaaaggtaaggtttgttagcccaagggttttcctaatcgcgttttgatgataacaaaccatggttaagttgttaattggtttgatataaagaatttaggtattagtttggaaattaatcaaaggacccaatggatgcaagatcaagacaattagaagaccctttaataataggaaacatatgtaagatgaatgcatggtgcacttaggatttcatatattttcatgctctttaaaaactcagtttaggcattaaagttacatttccgtcaaaaccctagttttagcaaataaaccttaggcaaattgtttcaaaagtggcatattaatttacctaaataccttgcctaagtgttataagagaaaagaataaaaaaaaaaaaaaaaaaaagaggtttttaggccaaaaatggtgaactggtcaaggcactggtcaatcggctcaactggttagggcaccgggcaatcgattacaccttcttgatcaaggtccgattgagaaatgcaaaaaatattctctcttcttgtagctttgcattcttggtcgagggatatgccttctcggtcgagatctgatcgaggtttggtcaaggatcggtcaaggcataatggtcgcctaccatgcatttattgtctaatggctagtaaaccggttgaccctcaactcaactgatcaatactactttttggcattttcggctcccgaggctagaaacctataaattgagaactccacttcatttatgaggtagagaacacctgcatttatttgtctacctacttgttcttgcctcaaaagctctcattgtttccttagtgcattaaatctccatttgcatattccttagtgcacctttgtgattcttcctaacatttaagttgtatttgagcccttgttgagctaggttgagagattcgaacttattatttgagtgttaaaagcttcaagtgagttaagacttgaaggggttgtgtaatagactattgaagttggaatccaagtataaaggtgattaaaagcttggttgaagcttcaagtatagtggaaccttcacttagttaggaggttgaggagagtggacgtaggcaaacaagtgttgaaccactataaaatctgagtttactctttctaaccttatctctttatatttgtgtttcctttgcttgaatttgttgtgtttgaaaaatattttttaaaacccaattcacccccctcccctcttgggtgttttctctattaagattagccttttattttctcaaagtttttaataacttttctctagattatagaatgttaaaattttgatttttgcttctattacataggatttagagccctagggtattttgcatgcacatatacaatctagggttataggaatggagagatctaggtttcccaacataactaaacacactagtacactcaccatgggaaacccatcctaatgactagggcaagtcattcctcaaatggattattgaagtccatgaaccaattgtgaatgagttattaacttgcaaggaatctatgacttagattttccatgtaactcctaattcactcaagtcatgtacatgcaagtgatgtaggtttgaatccttaacatacataattcataaataggatagtaaatagaaaattgaaatcataatgtaagtattaatgaactccatttctggttacatcatatcacgcttttaaagaatctatcctaacatcatgatcttatgatgcaaacatgaaagcttcaccttaatgcccataattacaatgatcagatagctccaagtttttcgccacacacatctaaatccagtgacttaatatgtaatggtaaaatcacacttagtggcataatctagtaggtggcaagtcactactcaaagttactatcttgtcgagtcactcatatccttagcaagatctttaacatctataacaactcactcccaatcaagtagatattgtttactctgaactcaaagggaccttagagatttaaaacacgttttcatggctaagaagagctcttacatatataattctaagaacttttttccctattcaatgtaggatatcataatcacccccatgaagacataaagtcctcatttgtgtcccataggattacaggaccaaacaaactaactctcataccatggttgaggatacactttgataccatttgtaacaactcactcccaaccatgtaaatatatattatcgactttgggctcaaagagccctcataacattaaaatgtgtctaaatagttaagagaagctcatatatatatatatatatatatatataatgtcaagaactttttcccttattcgatatgagatatcatagtattttcctttggtttaattgcctcaaataaactgagactcatgttcaatgctcctttactcaaaatatcatcctataagaaattatattcatattacttaatttcaattatactcccattgagttgttcactaagcatcacacaacctttgatttattagaatatctaatgaaagtgcacttgttttctttatagcacaatatctatgagaatttacatgaactaaacctgctaatccttaggattacaagtgagttatgtttggcttcttaactatatggatttgaagtaattgatgttgagggcattctattcaagatttaagttgcaatcaaaatagtaaccctcctttcccaccccgaaagatgttagatagttggcttgtgcctttttgagtgaaccatatccaaaagtttatggttacttttttcagttcattgttctttggatttccttttcatcatagtgatttttaaaactcttcaatggatactcatgtccatgatttatccttaatgttgtaatagttttttcttttcaatttttttacaatattcatataacatctaaatcaaagcaattctttggacttctagatataaccatccgtaaatgtgatgaagtagtaggcaccatgcttgggtctcatgttcattagtccttgtacttttgaatgcatgggatacaaaggacaagatacctttctggcttgcttaagagacttcctaattaattttccttccaaatagtgttcacaagggggtaggcaaatttatgagagttagcttaataaattttgatgatttttcccttaaacttattttataaaaaaatttgatattattatatagtaatacgttctacaaatattataaaatattaatggagtttaattcagcttagattgttgaagcattggtctgaactcagcccaaaattgagctcaaccaaaattaacttttggtcgagaaactcgaccaaatcctaacttgagtactaaaaatggtttctcaacttcactgagattcgagttaagtcaaaccaatttgccaaattgcactcagtagagaaatgctaatttgttgaattcgaggtcctcacaattttaatttgtcctcagaaaattgtcttcattttttatccttttaagttagagtaatggatttgaaatcagctctacaatcaaattccaatggataatactctactactcagagatttatgcaggatacacaattttcattgctctgatagattttgtgaatatcttgtcacctgatgctcctggttaattaataagaagtcgagtaattgagcttgtaccaagtttcattaggcttcttcattctagcctttaaattcaagtgtgacggtttaagggaaatatatgaaacctattgaatccccaaaaaactttacaccagccaatatgagttggcaacttctcacgatcactttaatttagattagtgtttaattggtacttgattcaaggttgcttttttgttttttctcctgttagtcctgcttttgcatctgaactgcttcaattttacgttgcacacagcttgccaaaaggcgaatgcaatattctgggaactgattggatggttaggtaagggacacaacaaaactaccactaaagcatgcaaaagtcttgaattcaatgttatgttgtccttaatataattttaattgcagtaccacccatcaagcatatccaagaaacaaaaacaatgcatactctgactcttcaattgcttaaccacctatgtactgaagttttgaaagtatcaagagcgaagaaaatatttagacaatcattcattaatggggcaaaatatgggattcccgagattctggaagagattataaagtcatatccttatgcactcgagtatctggatgaggatgtattcaaattggcagtattaaatcgttatgaaaagattttcaacctcatctgcgaaaccggtatgcatagacaacttataatacgaaccgaagatgattcaaataacatcttgcatttggctggaaaattggcccctccgcaccggctcagtctcgtttctggtgcagctctacaaatgcaacgcgagttacattggtttaaggtaataatttttgttttgaaggggaattaattttcttatacatatccactctttttctgtatcttagaaacattttgatttttacacaggaaattgaaaaatatgccccgagagccttcagtgaatctgagaacaataacgaagataaaccgaaaacggtatttataaaggaacatgaaaagttgataaaagaaggggagaaatggatgaaaggcacagcaaaatgttacgcattagcagcagcgcttattgctactgtagtgtttgcagcagcaattaccatcccgggtggcaaccatgatgatactggcataccaaatttctccaaagaaaaggccttcaaagtttttgcagcttcgg

SEQ ID NO: 13437 - DNA, 18827 bp, Vitis vinifera
  Intron number 4 from transcript GSVIVT01010054001 (locus G SVIVG01010054001) derived from phytozome v7.0 (chr-ID chr1 8; pos 13870281 to 13889107 reverse strand)
ctctccggcccaatcccggaagatttagagaggatgtatttgaagatcttgatttttttctttcaatgacttggaaggaccagttcaaagaaaaggtgtcttcatgaaccttactttttattttatatgtaattgttttttcattatatttattatatatctgcatataattgtttcttgcattcaaatagtttaattctttctaaaaaagagaccatcaccctattaaacgaccccccaccctcctcccaactcccctctaggatgattaccttaggttaatgtagataaaatcctaacagattgtttaaacatgagagaagcctagacaacattgcataagcattaaagcttttctgctgcacttgtgagacatattagctcaattattgtgcctgattttatttaatttatgaattgaaaagttgggatcatttttctttcatggaaatttctaattcggaacattttagatatatggatcaactgagtcttgatatgatgtttattgacccacttgtccagaactgtttgaaaatgtaagaaagcatctgtggcctctccatgaatgtacattttaaaaccaaacaacaatctggttggggttagaaactgactcgcacacttaaattctgttgaaaactagagcgtaaaccctttagattgaaaaagtggtaaatctatccctgcccttcacagttatcaactccatcatatgatactaattacccaatcagtggttccaaaaattgactgatcataacagtttaagccatactatacctgataaacatggcataccacatattaatccagtttttttttaaccctacactttcaagttctctacaaaatattctttatgggatcttaaccagactagctccaacactcaaatatgcaatgaacagaagaaaacatttgccctaaacatagcgcataaagaaatataaagtaagcagagtacttcaactgcaataagaccaacccaacagcatagcgcataaagattgaattagcaaaaaacttaagacccacttactataaatattatcagcttatgattacctcataaaagattcatctgccaccagaaaacacctcgtctgctgaaacccctgaaacctttcatttcaatgtccttgccagaaacggagaaaccacaacgacgtcgttgtgtgaaagcccttgcacccaccccatccttcgaatggaattcacaacagaacccaacgatgacccacaaaattaatctattagaaagcgtaaaacgccaaaccccatgttcaaatgggcatctcagtccatgacaatcttcatcttcattcgaagaactcaactgccctttgaagacctaaacacaaggctccagcctccatcaatgattgagcaacacaaacataatgttgtaagcttcatttttttaatctaattttgatttgcattacgagtatcgaataatttggaagtcggccacagtggagaacggtttgcgctaatccaagacacaggacagaagatgagctcaaattcagcactgaaactgtatttgattcatttattttttttaaatactactgaaaacacgtttactaacatgattgaaagttgtttcgagaaattttccttcagaatagtacttctcgaatatttttattttttaaacatggattgaattgattaaaaattgtgcatattcatattacattctcttaaatccctatggaagggaaataaaaagaaacaaaagcaatctctagagaattgattattttggttattttgttacttcggaagttcatgatcaacctagcttcaccaatgttagagctcacgatcctatagtgtcctcgggaacctacctagagtgtcctttgtgcaggtagggccaacacgtagaggagatcgcgagctctagcagcggtgaagccaagcagaccaccaagttcagtagcaacacattctatctaaataacctttttaataatactatgtttgaacatgccccaaagaaaccaaatgttatttttaaagttgactaaggttatttttggtttctgaaaaaattttgaaagaaaatacttggaaaataataaaaagaaaaaatataataaaagaaaaaaaaatttaaatagaaaaatagatttaaagtcattaaattatttttatataatcctcatactcatttcacttttacaactcattgatataaaaaaattaaataatttgaaaacatacaaatttataattaattttaattatatttagttttcttggtattttcataatacaatttccttgatacttttcaagattcaacataacctaaaaattttaaaattgtttaaaaattttaattggaaattctttgagtctaaaaggcacaaaaaaaaaattcattttcaatatactgagttttgccaaaaaaaaaataggacatttaaaaaaaatccataaagtaaacttgtttcataaataatgtccaatctaatacatctgtgtcacgtaggcctccacatcgtaaaatcataattggtcactatggatttgttgttttaaaaatgatcaaaaccatagtcatcaaccatgactttaactttaagcttaaaatcatagttgatgactatgactttggtcatttttaaaaataattaagaccgtagtcaccaactatggttttaaacttaaagttaaagttactattgatgagtatagttttgaatttttttaaaaattgtcaaagtcatagtaaccaactacgactttaacttaaatttatatatatataattatgttgtttcatttgaaatgtttaactttaatttttttaaataaaaatattatattattttgatttgtatatttattaaaatatgtggttgataaatttatttgattatttaaaaaatatatgtgaaattaaataattgatatttttaatttgatataaaaatatttttgtttaattttattaaaacaattggcactatatttaatataaatataattagttaattatactaaaatataataaattatatttatttaaaataaataaattatgaaagcctatttagaaaaaaaaattataaattattatattaattaattattttttatatactataatgtaagtggtatataatatcatatgcatataagttcaatttaagtttaaaatttatcatattttcatttaaatatataataatttcttcataataaaaaagtaaacaatgtaataaatgaaaataaacacaaaaacaaaaaattgggaaaaaaaaaatcctcaatgagtgccacatgatggggccttcctatttcttcacggatgcctacaatacaaagacatatttgtcgaatctatctatgcaatctaccatgtctccatatgtgtaggttgagatggagcttatggaggcaaacttaacgtctacatggaccacgacatcatctaggcgggcatacatctacttgtgtaacatgtgtaagggtatgatgcatggtagtctttataggaagaggtggtggtagatggtgggacaattcaagtacaatgatatctaatatggtagcatctaggagaggtgatataggagatggtagaatgacatctagtatggtggtctctggtgtaataacatctaatatagtggctttgaggacggaagatataggtgatgatgatgaggtgacatgtggtgtagtggtctcctcgacagaaggtagaggtgatggtagattagtagatggcagggaggtctccggtatagtgacataagatatagtggcctctatgggaggaaatacagttgatgttagggtgttttttgatacgacatgctctaagggagaaggtctaagtgaaggttatggtaggagtgaaggagtgaagggagaagtgtggaagccttaagtgcaaatggggtagatgatatggatggttctaacatagtctcgggtggatgcatatatcgttgaggttgtcaaccaactcgcccaccatctcgcttaccacatttccttctacctcgaataggttgcatcctaactatagtggctgacacaagtggtctcatggatgggtctaatgatataaacgactcacagactaaatgtatgcgatgttcttctccaataacgtgcaaaatatcaatgacaatccaatgaatgtcacctaatgctcctgaagtagtcctaacaatcgactagcaaccttagtcataccaatgatctaaaaaaaaaagtgaaacatttgaagataattttctattaattataatttaacaaaccatttctaacttaaaaaatcttaccaccaagttaaaaaatcttcacttatccacgaaatgtaggtcatgctctatcgaacaaaatagatgtatcatttgttagaggctaaactgtcgcaacactcgctttgactaatgccactcgacaatgtcaaagaaaataagagatgaaatcatttgccaaatttcttggtctgctaaagatatcattggaagatgggcaactaagtctctcatgtaagactcccataaaacctataaatatcgacatttgacatcaataatgttaatgcttatatggttaacaataacacattacatcttatatttacctggtcatgggtttgtgcatctaattggtctcgataaaatgttaacacatgcgatgggatataagcccatgataaaggtactctccacctacatcctagcggatcaacgagtaaagtctcgtctaataatgtctcaccctataattcttggtcctcatccaataatccctgatgtactctaataagacccttaacaagtaaatcatcagttgcatcataatctaaatgttgagctactagaggggctaatggtcgacccatgtggagtatctcccaataccacaattggataaaatataatattaataattttacttaaattataaacttgaaaaaactagaaatggtaatctaatgtgaacaattaattatacctacaatagtatgacacatttagtaatatcaatggctccatcgaaacttgcccgacacaactccctatataggtgtgctaagactgcactgccccaactatacatagatgtttgagtcaagtctctaagcaatgggagataacacatatggacatccgtatcctttttgtctataaatagtgttgaatctaatagtgctaatatgaaagctccgacataccactctaatgtggcatcatccgaatctattggtggatgagagaatggatggcatagccatcatgttgatatcactaaccctctaatctcatatgtagggagggtcacacctgaaagctcataaaacagcagtaaccaatctatgtcacatgtgccaatgatgggaggcccgtgaatagaaagtcctaagatgacaacaacatcttgtaaagtaatggtcgtcttctcaataggtaggtgaaatgtgtgtgtcttaagacatcatctcttaactagactagtgatcaatccccaatctagtgtaatgtgttcaatacggtatacatcgtaaaaaccagatcaaatagcataaaggcaaatatgaggatccacctctcactcctacataaatctagatatatgttattgacaagtcaagaccaaagtaagttgccaaaatacaaataaattaattagataataaacttcaatttttgtcattttttaaagagatattatgtgctttcatatgcatacctagttagagtcaactaaatgagacctatgtctatcttgtagaactaaaacaaacctatctaatggatctagatcaaaactatgtcctctatacttcatattgtaacaaattgtgaaaataaataaacaatacctcttatttttaaataaaaaaatatttataatagaaaagttttaaatttttatagagtttcccctatattatgaatattatctaatatatgaataacatgattaaacacatcaatttgacaaatttaagtggatcaattcatttatgaccaataaacaactcattctagtctaaattaaaattagagatacaaatttaatggaccattttgttaatatttctaatagaaaatttcaaaattttgatagagtttcccctatagtatggacattatcccaaattcatataacttgattatgcaaataatatcattatttataatcaaaccagatccaatgattgtgtaaagatagtatcatagtagcttacattacaatatcaaagaaaattacatacatacatcacatggtctaatcaactctattcatattttgacaagagcaacaattgtggccactttgtttgcacaacccaaatgtaataaaagtcttaccctctttaacatccatttcattatgcaaatgacttgatttaggtcggccacttgatacacatttcatcaactcaaaaggcatgataatcagaccatcataaggatgtcactcatatacattgaagatgggatagaaaaagggtgtccaagtattatagtatgattgtgtactatagtagtgttgaacaattgatcaaaaatcaaatgaacaaaaatgacatgctgctataatatggctgcatgggaatccatatatgagtgttttaccacatttgcatgcatgctcatgtaagttgatgtgatatgtttgaccaccacttgagttactcttagtacttctactagttttcacatggaattgtccttgaatgtgatcatataaaacaattttttgagatcccatcttaaccatatttgccttcatcttagcattaacatatggaatgtattcctcacccaaagcgagttgattagcaccttgtttctttctcacaacaaaataactatttacttgaaacaatgtcaattgaaccaaggcagttatgggtaagctatgagtccttttaagtacgctattgaacacttctgacatgtttgtaatcataatatcatattttcgacctctatcatgagagaacacctatttctcaaaaaggattgccttcaactattattatgcttctgcattaatccttacaattatgttcatatttttattgaatttttcatccatagttgctatggctactttggataccaaatttttcaatattttatccttgaatcgagtcatataatttctaataagatgatgcatacaaaccttatgattagtgtatgactcataccaaccaagataagcatcgctcattatagccataatgtctagatgtcgatctgatataacacaaagtcctctcctttaagttactccaattctaatacatatcaaaaatcatccctaactatcattattctcacctcttgttaggtcaaaagctagtgagaataactgattatttccatcacaacccataacaatcattaaagtgtttttatctttccatacaaatgtgtgccatcaatactgagtaccgagtgataatgcttgaaacctttaatagattgatggaatgcctaaaaaaacatgttgaaatatctttgtatccatatattactaggaaatgttttcaaaattacaacacatcttggatttgtctgctctaagccaatgaaaaaacatggtagctttacttatgacttataaaaatcaccaaataagttagtatgtgctttaagcttcactttagatgtcttcttgtatgatatttggtatcgaatttctccacaatacttgcttgaatggtagccactgacattgtgaattgtgtcttaatcattcattagatatgagcagcaatcaagttggaatttaattgttgatggtcccgattcaaacaaagattgacacatttgtgtggaccattgtattttttaattacaaataaagatgtacttttcacaaccataacacaaagtttccatagacattgagactgctcagccttcttgcatcttaagactaacaactttttagttgatgaaacaaaacgtactcttggtgtgcactaatagagtacaactttgtaggatgttgtaaatttatttttgaattaaaaatttggccaaccatgaactctccacctaagtttccaatattagcatttttctaggagtccaatcacttgaaataggattacaaatgttttctatattttcaaattgaaaatatggtgtcgagtgatactgaacagaagaaaactccactaggtccttaagatctgagttatttgacacatcacaacctttcccatccatagagacatatctcccttgttcactttccattacttcatgaagagctaagaaagatgaaacaacattaacattattttctttcttatccataaattcaaatgccttatggtcatcatgttgaacatctttaactccattcactttaaccatcaccttcttaggattcacattattcctcgtcttaatctgctttacacccataagccattgcaactagggcgctactaggcctatagccatagttcaattcctcaacattatcattttctccaagtaataaatgtgtaaagttaaccaagaattctcttctcactcatggctttaccggcacttgtttaatatacaattcaatttcatcaattccaaatatgttaaccaatttcaacatttgggataaactattatcatcccatattggacaaagttgggacctattttcactttttaaaggatacctactattgaggactaattgaaaatgttttttgtcaatgtcaatcctcaaatatatcaatagttaacaaatgttcaaatgttgaactaacatgcacatccaaaggcataattacaactttatctcctacatactttgtatatatatttgtcctcaacatttgtccattacaaaagcatattacatgaacaagagattcagacatgatttacctacaaaaaatacaatatcaaatggtttcataatcaatgaaaataatagcaaggtcttcgtgttttgaacttaacatacttgtttataaatacattaaaaaaacacacatataagcatgttcaagagaaattgcatatgatcttttaacacatgaatacaaaattatataataaaataccctcttgcacattagtgaaaaaaaaaactctatttcttcgacctactatttatcatttgtttttaaccacaaacaaattagttaataaaattctaaatccaatattaattcaagatatagattttactaatcaaaaaattttataaataatttctaactaccataaaaggcattgataatgacttctcaaattacttatagctaatgacgaacccaaataatttagtgaggaggggcaaagtaaaatattggttgattatgataaatatagataaattttcatattttagaaatggatcctcaacatccttctattcaatttttttttttttaaaaaaaaaatagtatcatttaataaaataagtaattattggcattaactacaaaagaaaagaagattttataatctatcaaattaaatcacaaaaaaaactaaatagtttatattttattaaaagtttatcaaaaaatttaaataatgctataaaaaaaagtctttaaataaagtgagaactatgactataacatttttaataagttttagaaattttttgctatgaaactttttaaaataattcaataatttcactaataatttttcttttatttttttaaataattaaatataaatcacttgataataacataatttttatttaaaaagttatctatgatataaatatattcatagataaatgtttgataaaatttttatttaaaacttagatagtcagttacaaatcaataaatatttagctaaacctaaaaagctaaacaatgataagaatcccaaaattaaataaaaaataactcaccaataaaaaggaatatttgataaaatatcaaatatttaaattaaattaaattttatcaaccattaaataatatataatttaaataattatgtagttattcataaatcacttaactaaaattaaaaatgaaaacaaacaaacattttataaatctatttaatattagttttttattttacatttttacattttagcgaggacaaatttgcatttttttttacatttttaacttttcaaaattcttaaaaaaataaaacaaaattttttatttttaaaatttgatgggggcatgtgcctcccttaagtctaaggtggatccgcccttatttacgacacaaatttttgtaggcttatgagctaaaattatgaataacttaatctttcctattttataaagtgaaaaaatgaagaaaatcttattaacataaaaatgattttatttttcatatatttctccattaaattatgaaaatccaaaaaagctttaaagaactcctccattatataaatagagggaaataaataatagacacatatgcatattattttgggtggaaatcatataaatgaattagatgtggagatagggttgaatgtgaaagagtcaaatgggaaaaaaatgattttttttttttttgctttattttttctcaaacaaattcgcttatgattttttttcttttttcttttctaaaaaaagaaaaaaaaattggttagaagattgataaccctttgatctagaactatttttgaaaaaatatgtatccaatggctccaaatcaacccaacactccaaatcaatagttccaataaaaattttagaaatattttaattgtgttgatatcatatttcattatctttgaagatatgagtattaattggagaagaaagtagatggatttaatgtagttgcaagttttcgaaaataaaataaaaaacaaaacaaaaaggccataaccaaaattatttcaacaaaaatctatttcatttttgggggtcttaacaacaaccagtatgatcccctccatttttgggatctttaacaaaaaatccatggtggtcctttctttccacctttgttttctttaacaaagacaaaaccatttttgtctcttccaagctcaagaagaaaataaaatatacttaaaccaaacaagtttacaagaagaaaatcgaatacacttaaaccaaatagatttacaataagaaaataaaatatacttaaactaaaaaactcataaatcttacttgcaccaatgacagatgaaataagatgaaaatatggataaacagaacccaagccaaggatgagtaagagaaaacgggaagaatggacaacagacaaaaaccctcaaaggtaagaaatttaaatgaaaaggtaaaaacttaagtagatttgaagtcatagttggttactatggttttgattgattaaaaaaaattcaaaactgtagtcaccaactatggttttatgatatggaattttacatggctaaggcgcactagattgagtattagtttgaattcaaatttagtttatggatttaatatacacacataaataagtgtcgaattcaagccaaccctaagtaaacctaagaaaacttgaatttaccttttaagtttatttatttaataaattaaattacattttttaaaataaaaatgatgtagacctattgtgtattggctcaaaatttatgggcaggcttgagctagactttgcttcttttggccaagaatttacatcttactttggagaagttatataagtttttttaacatatatatagatagataaatatataatatcaattttattttatgttataattatggtttaacttaatcttgaatcgaaatgatataaaaaaataaaggttatcatgaaggtcaaaaaaacaaagaaatcagagaaataaatgagaagtagtaaattcgtttatttaaggatataattgttttttatctagggctatggaaagagtaaaacagaaagttgttatatctacataacaatttaacttctctaacactctccctcaaattgatgttgggtttttaactatctccttcacatttctttttattaactcagttgtgcagttgttcaatgcgctatttaaattattttcattatcaactatagtgttgttgtatttctccattaatagtctaaatattttcttattcatccactgaactcaatctccatacagccactgaaatccatttcttatattaaaatatctcatagctattcatcaattttccaccatgtagctaccaaaattaccaattatcaacatcaaattttagctataaagtctttgaaattttagctaaccatagttgttgggaaggagactattaataagtctttcaaagaattgagacgagaaaggctttgtgagtatgtttgcaacttggtcaatagaaggaatatgattgacaaccaatttcttttgcaacaccttttctcgaacaaagtataaatctagttccatgtgtttagttcttgagtgaataataggattagctgacaaagttagaatgttgaggttgtcacaacacatagttggagtactttgcttgattttcaattttgtaagaaggcaccaaatccacatcaattcaaaagcaatattttccaaactcttatatttgactttaatggtggatcttgaaattgtatgctacttcttggagcaccaatacattatgttattaccgagaaagatacacaaactagtagttgatctacaatcatcgatatcatttccctagtccgcatcagaaaaacaagtgagattgaaagtatttggcctcctaaagataattatttggtctatggttccatttaaatatcttaaaatccttttgacaactttccaatgtgtatccgatggtttttgcataaattgacatactttgttaacactaaaagtaatttatggtctagtgacagtgatgtattagagagctcctaccacactcctatacttatgagcattctctataggatcaaatcacccttttgagatgaaagttggagaccactaaccattggcgtaggcagaggataaccattattcatcttcattttcttaaggaggtcattgatatattttctttgagataagtggaacccttctgcaacttgctacacttcaataccaaggaagtagtttaactctacaagatctttaatagaaaatgacatatttagatgaaaaatgagttactctaactctttatttctactccctataatgataatatcgtctacgtaaattaggataaagacatatgagctagttgtgatctttaagaaaatatacccatttgctttagatgaggtgaacacaagtgaagatagagaatattttaatttctctagccaagctcttgagcctacttaagatcgtaaagagctttatgtaacttgcaaattagatctttcccctacttaaaccctaatgcttggtccatatatacttcctcttgaagacttccatttaaaaatatgttgttaacaatgaatcttacttgccatccatgagctaaagttatagtcaagataattctaatagatgtagtttccacaataggtgagaatgtttcgatgaaatcaaaaccaggagtttagagatatccttttgcaataaggcatgccttgtatctattgatcgaaccatctagattttttttaagcttaaaaacccgtttacaacccactaatttcctatttggaggtaaagacactaatgaccaggatttatttttcaaaaaggcctcattttcttcaatcattgttttcttcgaattttagatttggaaggcttttgtgaaacaagaagggtcttgtatagaaaggtcaataactagggctagagccttgggtttaaaaatgtcattcttggattttgtgaccataggataggaatttaatataggtacaggagcaggtttagtcatacccataatattagtattagttataggttaggatgatataaaaggagaagaattaggttgaatgtgttcattgtggagtggattatactatccaacaagtgcatgacctattacaaaattatcttatggtaaaagttcagatagatttgaattgataggaactactggtggattaccaaaagttgtaggttgtaaatgatgtaggattgggatgtgtggaattgcaacattttttattatagaaaaggattttgttgagttctttttctcgacgtatggaaaaataaattcattaaacacaatatgtcttaagataggaagtttccatttatcatcaaggcatttgcaacccttatgatttgggccatagctaagaaatgtacaagaaagggacctggaataaagtttgttaatgttgaaaggtcaaagataaaggaagcaaagacaaccaaatactttaagggtggaaaaatctagtttaactttatagagtacctcaattggagatttcagcatcaggactagtattggcaacttgtttattaaaaagacaacagtagagaatgaatttagccaaaacttgagaggaagtgaagcttgagctaacaaggtaagtcctaactctacaatatgtttatgtttacttttaactatcccattttgttctaaagtatgggggcaggaaactcgatgaatgatgccataataatctaaaaaaagtgtgagagttctaaattctccatcccaatctgactaaaaaaatcttaagcttggaatttaattgattttcaacttgagttttgaagtatacaaatgattcatgagcttgagatttgtttttaagaaaataaatccaagtaaatctagagtatacatcaacaaagttcacataatacttgtaaccatagtatgaaaatataggagaaggaccccaaagatcagacttaaccaattgtaattgttctctataggtagtattagaatttagaaatgacaaattatgatttttttcccccaatagataggctatgcaaaagaaagaagtcttatttgatgaatatggtacgttatattggtttaggatctaatttacaatttttaaagaaggatgacccaatcgttggtgccatacatcaaaaaatgaattaaaagattctaaagatacattgctaacaaaataaagaaatgaaggtgataagatcccaatctttgcagcttctattacaaaaatgttggatgaatgatcaaaggcattactagtctactactttgttagattgaattgataaagtcccttatgtagattttcccacaatagtatatttatggtgactcgatccttcacaaaacaaagaatcatagtgaaactcaaagaatacattgttatctttagaaaattatgaaacacttacgagatttttagtaattgaaggggcatgtaaaagttttttaagatataagactcaagaagaaaatgattgagaagaaaaaattgaatcaccaatatgtgatatgttaagacctttttcgttacccatgtggattttgttgtttccatggtattcagtgccaaatgtcatattgttgaggtcacttgtgacatgatttataactcttgagcccaggtactaataggcgttattaacgtcctccgaagaaactatcattgctatcatagataggttgtcttgtagatcttgatttccatattgagtaagattagtaagaggaaatgtgaaagagatagtcagagacccaacatcaatttgaaggaaagagttaaaggttgacttgttaggataagctgttaaagaggctaagttgttatgtagatagaacaactttctcttttattctttccacaacccgatataaagagcaattgtatacctaaacaaactaatctactatttctcatcaataatttctttctctatttcttattctctactttctttgtttttttgacatggtatcaaagccttttctcttaaagatcccatccttcccatggcagcaactagtgattccacaaaaccaacaattttagcaattgaaagaatgtcagttccagcatttgtcgaggattcttcaaaattagtcatcacttgtctcaatcaacttataagcattcgacttgaagaaagtaactttcttttatggagatttcaagttgaaaacactaataaaggttttggtcttgaagagttcatatacaagactaatcaagttcccctaaagtttcttgttggtctaaataatgcaattgttccaaatccaacatatattacctataaacgtatttcttggcttcttgcctcgataggttccaattttttgctacaactcattgaatgttccactactcaagaggtttggtctcccatttctcaactattcaattcacaatcaattgcaaaagttatgcactataagcatcaaatgcaggtcttgaagaataataatctttctatgagagaatatctaataaaaatgaagacatgcttgttgttgttggtcataaaatattagaaacaaatcaaattattgccatcttgttgttgatggtccaaaatatgagtccatcacaattgttatctcttctcatgaaattccttactcaatacaagctatgaatgttctactactttctcatgaaggaagaatcctaaacaggaatgcctctttagaaatgtctacaaatctcactactcaaaaaaataaacttcaatagggggaacaataactttcaaagaaacaatcaagaaggaaaccaaaatggaagaggatatcatagaactcatggaagaggtcaattaggaaggccttcaaatggaaataggtcgtaatgcaaactccatggaaataatagaacaaaaagttgttatttctacataacaactcaactcctcttaacaacttatactaacaactcaacctctctactctgaatgaccaccttcccacacaaagataaacaatttatgaaaaatgataaccggatgtatcgtaattggtgtcatctaattaagaaattattttgatgtaatatatgtgattaaattatacttaaataatctcttaaaaaaccattctaaaataaattctaaaatttaaaattgttcgtccacatataacaactttctacttaatttccaaaagtgaattagttttaggaatatgttttttacactgatttttttttttcaaaatatttaatatatattgcatttgaaaaaaaaatctcttaatattggttggaaatttaatagatttgaatttaacttaaatcttaataaaattaaatctcattaaatactttggttgtttattttttatattagatctatttatttttccttatattaaatatatatgtataatcattatatttctttatacttttatttgaaataataataataatttaaatatttccaaatatcctaaaatagcacaatttattaccataataaaaaaaatttataatcagtagaaaattgataattggataataattaaaaaaatttaattatgaatggttgctaaaaaaattcaaaaattttaagttaactcttattgttatatgatacattttcatatttatgattttgtaattgaaatgcatttttgagattaatttattaatttttatatttttaaactgagaaacattatcaaattctaattttttatttttaaaaattaattgaaatagttaatttcaatggataattagatgattatgaattatgctttaaagttttaattttaaaaaaatcattttatcgtgcaataaggagtcaaatttgtaataaatttgtttagaatttaaattttataatttttagcgttgtttatttttatttttaaataaaaaattataatcatttataaaatttaattatattgagaatttaataaattatgagacaaaataatgtctgcatggattgaaattaacagactttgggattatgggttgttactaaaaagagaaactaaaaacatacaaatcacttaatttggataaatccaccaacaatgccctaatctcaatccaggccacatgtggggccaccgtcactggaatcaccaccaaaggtccgcccttaactaatgggtggcaactcatgggcttaaacaagaaccattccatcaattatttaatgcctcctaccaactgtgttgaggaacctctttttttcttttttcttttcttttttaatttttaaaaatatttgttttaaaaaaatataagttaaataaaatgtattattatttttaggggttaatttcattctcctctcacaaatttttaattattattcttttgaaattttatcgtgtatttttttttattttattcaaaggaaatgtaaatgaaattaacaaataaaaaggacaaataaaatacttaatgaaaattgaaattaatcataattaaatatattaagtctaaaccttaaaaaaaatgaatgaaattaactctcttttaattttaaagataatttttttttctttttttctttttaactttttaagataataactttacaattccttaacaaatctagagatgttatgatcttttttttctttttttttcattttcctttttatatggaaaaagcatgaaaaatgcgcatcatcacatgctatttgcaagcttttttgctaaatgtcaagtgttttgtaggcttctttgctaaatgccaaagtgacaacgcggtttgtaaggacgacatcacatcaccgatggccaagtcatgtacttggcttgacctgaaggtagtgaatcatggaggtacccccttctcaacatgtttagcgacagattaacctcttttagggtatctcattttggtagcacaacatttaaattaacaaagatcctatcttttaacaccatagagcttggaacacttacaagaatattgtaattccattt

SEQ ID NO: 13438 - DNA, 3486 bp, Vitis vinifera
  Intron number 2 from transcript GSVIVT01016200001 (locus G SVIVG01016200001) derived from phytozome v7.0 (chr-ID chr1 3; pos 6686260 to 6689745 reverse strand)
cattcttgtgcttaggactcgcaagttctaccggagtgacatttacaagaagttccgagaatagaattgttaattgcaattattaggctcatgatctatttatttatgaagggatgaggatgagaagccttggagtattgtgactaggaattgatattaaagaaataagaggacagagtagaaaattatttgtattgcaatgtatgataattgaagtttggttttattcaggtgtataaaattgaacatattcatttgagaattcctctttgcccatgtttatttttatttttgtatttttttcacagccatagatttgattatgcatatgatttaattgattttttaaataggattgtacttggacaaaaaattatctaaagatttgaaagagataatgtaatttggagttgtacaagtataaatgcaagctaatgaccaaatagaatgattgttacaaaattttgataagcatatttagtcaagttctccataatggttcaacaagtcatcattgcatcatggacgtgttttctatcttactagcacaatacttaagccaattcaagatttttttagtatatatggttggaaaaattgtctttccatacattgtaataatgcccttaacataccctcaaacactttcgattggtgatccaacttggaaaagccacgtgagcaaggtccaagtcaatcgtccacttaagctgatgatatgactcatgtacatgtcaccatccaaccaacaatccacatggatttgttttttttttttttttaaatattttccaaaaaagaacaaaacagaattgagatttacctcaaatccatcttctttcttcaaccaaacctaactctaaaaaatctattttctttcttagtttggttcatttttgaaaaatatttttttaaaagaaccaatctatgtggattgtctggttggatggtgacatgtacatgagccatgtcatcagcctaagtagatagttgactttgagcttgctcacacggcttttccaagttggtgatccaattgaaagtgttaatgggtgtgttgagagcatttttaaaagctctcaaaatcactattatagtgtatgaacccctccccccaaatgacaccaaacttgaaaagcaaaaagtaaaattcccaaaagataaattttccccccaatgtatggttgcataaatttccctaaaattaactagctaatctaaataatgtcacatatcaccaagggtggaatgagtaaaagaagtcatgcttatcatttgcaagaatgaatagagatgattcaatttaagaacatccagatcataggtatgacttaaaagttccatgtttatgctttactatgatttttgttgtcatgttttttcactgtattagatttagagtgtttggatatagcctttaaaagtatgacatgatataataaaatttggaattcattatttaataatattttaatttcacttttatttatccttattttatatattacacttcatgagtattcttatttgcatcttttgcattgtacctgatttgagtgcattataagttacacgtaagatccaagttatgagttctttgtaaataaatgacttgttcacaaccagtttatgggtctaggcatccattagatcctgtaatgcgtcaccacataattggagggatggttggtcttggctattgggatgaatttttcataataagtgcactagtgcgtgtagttgcatattaaacaagacctatagtgaattatgacttaaaactatcaagtagtcatgacctcatgaagttatttcattgtattgtctttcaatcttaagagaatattgagtttgtacttaaaattaacagtaactttaacctatgagtgagatcgtaagctaattatatatatcctatggattagatcactgttaatgaaaattgatagtagcagatattctgagacaccatgatattttatggaattgagacaatacgttcccttgggtgatcttaaggtagtatgttcatggaaactatggttatagtagttccctaaatgaaacttgacatagattctttgagagttaagacatgttaattaaatacacaataaaaagatctgtaactttaagaatagtagagatagttttgaaagactaatagctttcgtcttgttagattatagacgttagttaattgaaagactattttatgtaaaaaaaaaaattattaaaaaaacgattttgcaactttattaaaaaaaaaagagttttccaattttgcttaaaaaaagagttttacaattttgtttaagaaatatcgcttagttttattaaaagaaaatatttttttttacaattttatttataaaaagaatattcttatttttatttaaataagagattttatgattttatttaaaaacattttatgattttaagatacaaaattaggaaatcaagaaaaagacgaaaaaaccacaagcaacaaaccaatatttgcaaacaagtatttacaaccatcgtgcgtacaatgaagcccatgtaaaacacaagcctcattttctatctcaaaagaatgcccctcagtcaacagtgaagcccatgtaaaacaaaagcccaaatccgattaaaaattaagtcaaaacaaaacaagcacatgaaatctgtgttagcgttctaattaagtcaaatccgaattgatgccctcatgtaataactgaaaataacgcacttaaatcaacaatccaattcatatgcacggcgattcaaacaacccaaacaaagcccaataacataaacaacaactacagaaatcaaggagagaaaatacctcatttgttaagcccaagaatggagaatggaggcagcatgaagtgtgtagggacggctgtgagtgtgtcgaagatgcaggttgctgctggtgatggtagcagtggagacatggcggacaagggagatgatgccggccgtggctggtggtggagatgatagagagaaaaataaaaggaaaaaaaaagaaagaaaatgaaagatgaagaggagaagaagtgggtggttgtgagtgggatgtggtggatatgagagaaggggtaaaggtgggaagagtagggcagtgagtgggaagagagaaaaaaagaaaagaggaagcaaagacatggaaggctgacagagagaaaagagaaagaatcattctgaggaactctgcaatggttaaaagtaatttttaatggaatacctgtccacctttaaactttaccttttaattataaagctgccttctatgagacatttcacacattaggctctctataaaatcaagattctagtttcccccccactctaaattcccttttccatcagaaaattttcttaatttctgcatgtgatccaagttcaagaggtgtccttcccccaaccctgaagccagcaatgaagcttttgccggagtaaacaactaaattttgtggtaagccagaggaa

SEQ ID NO: 13439 - DNA, 10902 bp, Vitis vinifera
  Intron number 5 from transcript GSVIVT01021053001 (locus G SVIVG01021053001) derived from phytozome v7.0 (chr-ID chr5 ; pos 14531946 to 14542847 reverse strand)
gaacccaggtaccccatcactcttgaacttttcattaggatattttgaactcatacccttgttgatgatgatgattatgttgttgctgtgctgtattttattttaaagttttaggcaccctcttgtctgaaataggcattattttccgtctttgaaacaactggtgtattgattatgggaaacactactcttttattgtttctctttttcttgagaaatatgtgtttgtgtgtatgtgtgttgttggtgcacttcaataaatgacaatgacacttacttcaagggtttaaccaaaggggtagaattactaatgtcaaaaggatggaatgtttggtgttcaagagtgaggaaatgtgaagttggaatacaattatggcaccccgttcagggaagaacttatcctctacacataaatttctaggtgtattggaaatgagaaaatttttctctcatttagattgattttttcccctcttttcttcataggcaaatggtatttttacatacaaggcatctaacaaaatgtagtacacctctgtgttacagggtgtatacaaaaggcactaaagaacacacccattcaaaaaaacagcaaacttataaccttttatccacaatttagattatcaaaaaagtaaaaaagtgtgtgattatccaaccctagcaggatcctagactagtctaaaaagacctttatgagtgtctccttcagcttttgatatgacttctcttcttcattgagagttaagttatactctctccaaatgcaccaaattaagcatagggaaatcaagcctaggtgttttcaacgccggataggcagacttgtgtcttgggtgtctaactattatccataatgcattctagagttttgttttaccataaccataaaatactaaatctgtaaggctgagatttgataacagaagtgaaggtggaactgaaggcagacttaagggatgaacttgaaatcagacctacaaattctaacccttgtgtgtgtgtgtgtgtctatatatatgtatgtatggatatatattaggttgggtaacaaattgctactcaatggggctagagttttaagaacaggaacaattgactgacctgagaaactccatcaaaatctgactgcttgcaaatcatcttcctttggttcttttacttctctctagtttctctctttaggtttttctactcttggatttctgattcaagtttcatttggttctcgatttctctcgtctacattgttctgtaatgtggatagagattgagcaacagagtagccaatgtttaaaaaatgggactggattagtgggttcatccagttgaactgtcaaccagacacctctctcatccatttctcacttttggacagtttacatgctaaaccagtggagaactgcttgaaccaacggtcgaaccgttggcctgcacaaagtggcaagttgtgtgaacacgtttggcttgggcatattttaaaatcagcccaaaacaagcacaggtggggctagcccaaagtgtctcttatatggttggtggtggggcaggccagagtgtctcttatatggttgctgggctgtgttgattgtaagcccatttcacagctttttcaatttgaggacctctttgatttcttaattttccaatattgggtagctttagaaaatgttacagaaatgcccaaatttttttttattgcagcagcaggattgaaacactagttgcatttgtgcttgaagaaggggaaccactggtctaatttaggatgttgttaaaaatgtttgttgcaaatagactaattatttatttatttatttattttaaattatcattagttaaaactcttaaataaacataaatatttaacttcatatttatttttataataataagtattttttttgatgggtaatttttataataataaataaatatgaaaataatttaatattttttaaaattataaaataatagaatatataacttttgatctacaaataaaattaaataatagaattgtttctatcttaaatattatacatattttctttaataaaattaaaaatattgatgtatttatatgaatcctcatcataatttaattaaatattaaaggtaaaaaatgaaacatgattaaggtttttaattagttaaatatattttcaatttcttataattatttttaattttaataaatatattcatgatgtcattctaacatcagggttcgaccgtggttaaaccattgatttgaccagtaagtcataaactagtaacttttctaatttaatgacgggtttggttctaaaaacattagagtaacacaagtagaattcaatgaaaagcatgcctattctcacaaaggtttctattcacccttaaagatattcaattgctgtgaaagatatttaagcacttggaacttttagattcttaagtttgtttgatattgattggttttttgttttctctagttatttctttctaccatttatctaatgtttcatcaatgattcatagttgctcaatgagcatctccattttattttaacacgacttttataatttgttatttttctttctatatgggttccacttgatcattatttttttttatatgttttgattagaactattaacttattctttttctctttctcatccaaacaattgtaactgtcaattccaaaagagatgaaaattggaattaaaattctaaagtcccatgtccactttttcaattatactctacatgtcagtcaaattttagaagttgggataaagctttggtgagttgaatgttgacttatggacttgaatcaaaatttagaatgcttcttctaacaaatgaaatggtaggacttacatgtcagaaagtaaataaaataagtacctatatttactggatggtgagcaacaaaaggttgaatggtgacttatgggcttgaatcaaaatttagaatgcttcttctaacaaatgaaatggcaggactcacatgtcagaaagtaaataaaataagtaataaacttatctaacctccgctatatactgaagttataatgcaagacaacaataattgtgttggtcttggtttgtggattacctatctatagtatcattaaaagattacaagaaaaatgtgtaatagaatatttcacattttgtttccttgtttcactgaggaaattgcaacttcttgttctggccaaacaagaaaatgtttgaagtttagattccctgcacaagtatgtatattattgtgtttcttaatcttgaatcttatattcatttgttgctcaatcaaatttgatatggagtggatcatataataggggcaattcttaatattcgaagttcctctcaaacatgacgtctatgagtgtggttccaaggtacttgctatcagtcatctaaccaacaagcatgtttgatgtagaggagaaattttttaaattaaatgaaaccttactgagttgtttatttatttatttattcttatttgtatagaaacgaaaatttattgatgtaaaagaatttacaaagtgataatgtaaaatcattccataaaattactttctgtgtgctttacaaaagaacagataaatggagaggaaagactaataaacatcttacttactattgagcccaaaaggtaatgcttgttagtgcttctttcttagctagtctaatcttctaaactcttacctactcatccacctaacgctcaattctagagaaatgagtaatccaacatacgggaggtccctaggatccatcatcatccttatcctcaactagcttattgcaattgagaagtttcctttatgattaaattacctaaccctaaagtagcatcttctccaagacttttcatggtcttacactctttagaatctttttgtgttataacatagccctttgctacccatctcaagctatctggaagtttctccctcagttggatttgtaaaagttcttttattattcccattgacttggattatcaaactagcatccatcaggttcagcttgaaggcactggggtggagcatggagtggcgtgtggtgtaagtgggacagttcttagcaagctcatagccttcacactcaatactttgttcagattaatcaaactacaattaaacatggtaatagcaagaggaatgccctcagacctagatgcttgatctaaagactctgaagagttttttcagcccttctagcttggtggttctcacactgattgactttcttgcctgatattaactataccagagccttgattttaagggtgcttgcaaggaaattttctggatgaacaactttaaggtgatgatctttagaaatgttttgggaaaaaggatttggaagagaagattccattacttttcaacaacaaaagactcttatgaagtgaattcaaagggaacgcttaatccccaagggagtgaaggaagttggaggggtttaggccatgtttggtaactgtttttgaaaacaattttctattttccaaaacaaaaaaaaaataggaaaactcgtttaacaatcagaaaacataaatcaattttcttttcttaatagaaaatagggtgtttttcgagaatatcttttagttgttttaaaaaataatcatacaaatatgaagaataattaaaagtaaaacactacataaaaaagttatttttaaaacatagaaaacaagttaaaaacatttcaagttccaaatagacatttgttttacaaaacattagagaacatttctaaaaatttgttcttaaaacctatttttcagaattgttttggagaaacggttaccaaacatggccttagcttcctttcaatgaattttgcatttctgttgtgagagatatagtttatctccaagatgagaaggaggatggtgagttctaacttcatttcaatcaatttttggtttttggtgtgtgtgtgtgtgagggagagagagggagtgagagagggtgagcttcttttatgtttcagtagtttttttgcattgtcctttctggacaaggaagagagagatgggcttcttctatgttttaatagtttttgtagtggttttgtgttgtctttttttttttctagattagtaaaagagggacaggcttcttatgtttgattatatacatatatatatatatatatagagagagagagagagagagagagagagccctcttgctaatggataagtaaaggagcagatgtttgacatctgcatgcatataagatgtatagcctgtattctatagtgaatcatagagtgcagtctatatcatgtaattttcctgtttcattagggtcttttttttttttttttttgataagtaaaggatatgcattaaaaaaggcagaacaccacaaagcatacagggagtatacaaggcggctagggcctcaaaaaacaaagacaaaaagaatcacctccctttaggtgggtgctatccactccaggaagcctataagggagaacgcctcctcacctacatacaatttggcccaactccacaaattacagacaaaaaaattctttaacttctgaatattcaacacaccccccctaaaggctaatctattcctctccttccacaccattagggtctttttttaaaatttatataactttatgtatggcataattgactttgaattgaagatgagtcatgtagcctttctttcaatcacaaagtggtgccctagggttggctaatcctagtattttttagcttcatgatgctttcttactgttgattgatgttgtgcttgaattgagcaaggtgttagtttggacaaataaggtttagattctgttcctatcaactttaggtattggagcctaaatcctattggtttaatttataatacccctaggtaggttagcattaataaaatccccaatggacttaggtttcagccttttaggatttggggtggtgaatggggattagggtttatggtagtggaaaaaaagtaaaattgaagaagaagaaaaatatacggaaaaatggaaaagtctaactcttactaaggtcttttaggagtcttacttaggaaaaaaaaaagtaaagagagtttaatcattaaaggacataagaacttgcaaaagttgttaccattcattttgttttcactttcctctcccccccccccccaccattttttttgggtgttaggtgctttttaattgaatttatcctctttccctattaaaaagaagaaaaaaaaaatcatcttttgacggaagcttgtttttttttttttgatagacaacaaaagcatgtatttaagaagtgaaaaaaagagggggtcacccgatgtatactggcagtatacacaaaatatcacaagacaagcaccaaacatatgcaaggttagcttactaaaaaagccaaactatccacaaggaagagcatctaagaaatcttaaatagaggggtacttcatttccagtgaagcatgggaccaatgtaatattgatttaataaagaattccttcaatctttgatccaagagttcttcatcatcaaaagttctttggttactctttccaaataccccaaaatgagtaaattggagctatgtgccaaacaattcttcccttcttatctaaccccttaaatttccattcaaggaggaggtttctcattgaaaccagaaacacccatttcaagccagactgctaatagaaaagtccatagcacctgtcttatcataatgaatcaagatgtgagcaactgattctttgttgtatttacaaaggctttatttgttgaccatgaaccatcctatcttcactaacatatctagagttaagatcttctcccgaacagcttcccatgcaaaaagaaatacgttctaaggggagcttgggatccccaaatctctttggctggaaatactaaattactcttagaacttaaggatttgttgtacaactcgacattgaaatttccctcttatcacctttccaaagtaaagcattctctccttacactttcaaagggaaaataagctctaaaaattgggtcacctcctttatctcccaatattggaagagtcttttaaattgaacctcccaatggctaccaccacttcccttgccatcccataaatatgctgttgtagcatttttggagaaagctattctaaaaagcgaagggaatgcatcttttaactgaaactcccccgcccatctataccatcaaaatcttgtacgtctaccatttctaattcggatagctaatttgatgtctttccttaggctcatccccaaaggatcctttacccctcaagtagtagtctatcccatccatctccctaaattttccatgtatccacaagctcttctactcaaaagataacgtccacaatcatttgcctagcaaggcttgattaaggccctccaatcttagacccaaccctccgtacttcttatccttaaaaacatctaaccaatttaccaaatggatttttcctctttccctggcatctccccacaaaagtctccttgaattttctttatatgatcctcacttttttgggaattgcaaagagggacataatcctaatttataggcttgaagaaaatcttaaagttcaacaaaaccataacaaaaaagccaacatatatggtaatctagaactcttaatttttcaaaacttttaaatcttccaaataatggaattaaaaacataaaataggaatttttttagaaattagaaaggttaaaaaaaatatatataagaacttgaagaaattttcatcatatgactttaatttataaagaagctgaactgtaaatagaacaacctaccacggcctttcaaattaccaaacttcttggttccatcaactttgccttttttgttcctttttgttaataaaccttcagaagctcattgcatcatggttggacatggttgagcttccatagaactaaggtatataatttaagatttgtggtgagctgtgcaaatgcttctgcaccggaaatattaggggctcatatagagactcaagaaggcaaccattaccttttggacatattgaaagatagtcttgaggatgaaaattttggtagagataatccaatagattgattacgattccccaacaatctatgatgttcttgatgagggtaatttaagtgagttgtattattcacttttataatgaagttatcatatattcatatgatcgtaaagtgtttgacgaatgatgtaagtgtgacctttaataatagttaatgatcgatatgtaattgttgactaagaagcctcacttatgttcattgaatgtccaaagggagaaagtttgaacatgacgaagttaccttctatacatgatgggtacttggatgatattgatgttcctatgattggtataaagttagagcatggagagttctattacaattgtaataagaaggtgaaatttgaccacttttgggaagttttatagaaagagattatttagtagagattacaaaggtgcaaggatggaactaattccatttcttgaaatagcctttgtgatagagacatgccatgctttgtgtgggcctctggatggcaatgagaggagttttgtgtgggcttgtggagaggcttttgtatttcttttgagtctaaaccggttggctaggtcttcttgtgttgtggaagatttagccattttttatcagctttttgtaactatggggaggactcctcatccttctcatgtgcttttattcatttttaatgcagttctaaaaaaaaatagaaaaaaaaaaaatagtcatgtcatgttgttggcatatgccttaaaaaaaaattgttcataaggccattgaaaggggaacaaacccatgtctgatgtgcaagatttatctcatgagaactaaggctaatgtgtagtcaattcatccacttaggatttcaaaggagtggaaggtattgtttgggatttcagtagacctggaaagtaatataaattcaaggtcgagtttctttcaaccttgggggactggtgctgtagctttttgagtcatccagaatggttaacggctgcatagataagctggacagcatgttttattttgcatactggagtgttgctatgtagtgtgatagttgttttcaaatcttttattttagagagacgttgaataaaccaagattagaacattttaatgcttagatttactgattttaggtaacagctatcaactctctttattagtgactataagttgtttggcatatttaattctgaatggaagattgcttgcatcttcattctttcaaacattggtgcttgaggattctctactttagtatcttcaatctgcttgattctttggtatggttgacattaaatatattaattttttattttattttattttatttatttatttttatggtgtgggtggaatgattaggcatggtttatctggatggcattagtccaaattctggtcttcctttcaaaccttgtatggctatattcattttctaaactggggaaactcaatgaacacacatttcatggcattgggataaagtttactagtagattgatcattgatacgaggaaaaaaaaaagtaatggagtttctttctgcttgtttgttttggggagtatcaatgcaagttgtctgatatagaatgcaattattgaagaaggaagaacctatatccttgtacatattctccattgttatccaattaaagaattctgatgtttagtattaaatttagtggaaattatgtgatcaaggttcttaaaacaataaaagacatcactcttttatctgtaataaatgcatgtcacttaaatagtcatccatatatgtaaaaatcacttgtaatcatatagctaaaacaagcctatcaaaaagacccacttgtaattaaacaaaaacaaagtgctagagagatgccaatcacaattatcaacaatggcgaggggaacttttattcgtgctatgacaatgagagaatttacaatgtttaggaaacttagacccctttctttcaaaacaactgagctaaactaaaagatccttgaagtgaataaactgaaggatggcacaattttttatgccataaaaataatatactggtaatggtggaccttggtggtatgatctgccttatggggaaagtttagaccttcctagaagacttgaggtgtcacattatagatgggccatagccattcaatgagaaaacttcttggcttagagggggattcggttttaaagaccttcaagagatttttagccccttcaattggtggctattgttgtatcattttttttcccttgtgtttttatcttgatatttactaacaatttactttcaaggttcattcattaattaattcttctcgctcttttttagtgttagttttttttttttttccattataacaagccattattggctcggtttttttttttttttttcaaattccattgtgatatcttctttcctttgtctatgaggtaataatatccgctattaatttttctagctttttaataaagaaatgaaatagaacagtatatgtaaaagatggtaaaaaagaattgtctcaatattctattgaagtgttctttaattatctagtggtattattgatatcctgaaaatatgttgaaaaacttgtaacagcttgaacacctctgagatataaatcagcattttgtcatcaatgtcatggacatatcaaggattgtttcatataatgtatcaagtgataaatcatcagtagaaatttatggtatttctttgtatgcaactggtttatgaatgacagaaagtggtgtataaaatgaggattcatcttgagcatatatgttgcaggtgtgtagagaaaggaaaat

SEQ ID NO: 13440 - DNA, 6303 bp, Vitis vinifera
  Intron number 1 from transcript GSVIVT01032097001 (locus G SVIVG01032097001) derived from phytozome v7.0 (chr-ID chr1 3; pos 22741419 to 22747721 reverse strand)
ttatctcattatttatcttatacgagggttgaatcgatataataaattatgagatatattatttttttttatataaaatatattaatttgatatgagatatgtacataaatttatttttttattttttatataattcattttgtaaaataaattttttttattattaactaaatttatagtaaaaaaattataaaataacattaatatataaattatttgtatatattaaataacataacatgaaaaattatttataaaatttaaatattttagttacgaatattattaaatatgagataaattcattttttaaaatagaaaatattggaatatgatataattttatttcacatattaaaaataatatatatttcatattatttttatttattttataaattaaatattaatataatataatgtatctcatttgatatacttccttaaaatatcatgttcataagatatattaccttaaattatcttatttgaaatgaattttctatcaaacgaaatatgatatttatcttatcttatcccataaatcaaatataattcaggggtttaataaacacttgagatgattacgagattcaatagacggacatatttttcgatatcaaacaaactcctacaatacagacaatgatagattctaatatgcatcatctcgtgtagatattagtcattcaataaattcgcacatattaaaatatttttatataattaaaaaaattatacatatataatactataaatatttttttttccttattgaagatacgattttacaaatcaccttcaacttttcgacattaaaaaaaatgattttaaaattaagagaaaattacgaaagaatcactttcgtaaatatggatatattctaaagcaaaagaactttcatttttgtttactatatgatataagattcattacttcacacacccatgaattgctttttaatttgaaatttgaagaatggataggttggtccatgcaaggcttcaagtaattgagctgatatttagaaatccttcacccattctataatgcaatgagctgtttgatgttgacttcttccttttgcttcttgtctttttcttccaccacaaatgcagtgtccgttggtttattgtcttgcctaaaaaacccatctcctatagatgagccaaacagggcataacatgtctagctaaaatattaaagtaaaaaaaaaaaaaaaaccattataggaagttggtcattgtgacattcatattttcttactatcctatagttactttaataagatgtatatatatatatatagttaattaatttaagtagtttagtttggttcaaatgtcacattcatatggtctattctactcaatggatacattcaatttattatttcattaattatatttgacaagtccatttaaatcacttttagtattttataaaaaaatacctgaacggtgattctaataaaaatatttaaaaaaaaatatttttattagaaacactttaagatcaaactcactctaataatgaatatggattaatcggtgtcgtgttacatcttgataatgaaaatgctcgtatattatttcatctaccaaaacctcaaaacaattttttattgcgtatttctagattgaattcaataaattcataattgcaatttttgctatgaaatgtttttttttttttaagggtcaagttagatttaattttttttgggtgtgggacataaaagtgaagcattagggttggaaaatattgaatattatttggtgggtggttgacatttggtcatgtgggtaatgtgtatttttattttagataatttgaatttgtcggcagcaccctcattgccttatcagcctctttttttttcctttcaattattattctgggtatgagattttgagagctccatttcaccaagacatctttctttctaatttgaaaagatttgagtaaatacttaaagaaaaaagaaaaaaaaaggaggtggggtgggggggtgttattttctaatctcaaacacactttacaaattttttgaaatggaaatttgtattatagacataataaatttttagaatacatgtttttagattttttttagagtattttgggtaataattataaatatagaaaagaaagataaattaagttaaagaaaaatcaagaagatggagaaaaatcttaaagagaaagtcaatcaaaaccattcatttaggatttctatgtaaggttgtttatacattctatttttgcttgaatacctaaacttatctgagtgtcaaattattttaaagtttttttattttattttataaaatgaattattttatattttcgattaaaaccttaagttaagtgatttttaaacttgttttaaaatgttttaaaaagctatgcacgtgttgatgaaagttttcaacctcaaacaaagtcaatttaaatacttttcaatgtaaccggttaaaagcattaagaatcgattcaaatggttttctctctttcaatagcggtagagtgtaaccgattgaaacaaaatttggatcgatcaaatactacttctatcgattactcaaccaattgagggtttaactcaatgatcacttgttaatgcataatggatcataattagtttaactagtcgattctagattatgcataatgactaatttggattttttatctcttatatataaaagcttaattaagcatattgtttttgtagaagtgatagttcaaaatcttttgttgaatttatttcaaaattaagggaatgtttttttatagcaccttactttaaattgtgcatatccattagtgcaccttaatcctagtttgtcttatgtcatttgatattaaatttgtaagatcaaatctctatcatttcatgtaacttttgtgaggtgagctcaagcgtggattatcacctaaataaaaatctaaatgtgaggtatcgcttaatttttgccatgtgtgaggtaaggtcgtttgagagtgatacaactcttaagaaaatttgtaagtgcttattgaaattgattaatctaattgtaaaactcgaaggtttgtgttaaaaaccttgttagtgaacctctcattcgattggaactagaggagagtaaatgtagactgggatgacatcgaaccattataaaaatcaatatttacaatttatctttcctactccttttattttatatgcatgttttttcattatatatatatattatataattgcatataaaatattcatcaatctactcattcctcccaccttctccccctgtagggtgattactctaggttggtataattaaaatcctaacacatatataaggaaaaaagacacggttcttgatagtcttcatattaggagtgcaactcacatgggttaggttaaatcaatagttaacctaatggtagactgcatttacttgaagtccaatacaacttcatctgtaacccaagttggcaataatggagagatgggtagagctctcgcaaaggtgaaggttaagtctcaacctacacttcatttggtttgggtttaattttggttttagtttatatttacttattttgggttaagttatctttttttttttctctttaaacgggaacatggcatgtagaggtagagtctaacatggtagcagggttatgtaacacctagtaacatggtgtcagccccttagcctcttgacttaaccatggaggaaaaagtcacatgggtaggccttgcaccatgagagcctaggcaaaaagcaaggaaagcttggaggtttggtggttcaaactccaggggctaagtgaagaggtcgtgggtgagccagatttgcatcgcgggcgagccagacgtgcaccacgggcgagccagactcgcacggtgggcgagtcagacgtgcaccgcgagtgggccagacacgcattgtgagtgagccagacgcgcattgtgagcgagccagacgcgcattgtgagcgagccagacgcgcaccgcaggcgagctagacatgtactgcgcgcgcaccaaacttaggtggtgcagatgaaggctgagggacttttgaaattttaatttatatttatttattattccattatgtttcctcatacatattgatgtctcctccataaataatgaaaacggctcgtattgctctctaatggggggggggaaggtgactcaaagaagggagcaccaagggaagccttgaccacaccaagggggcaccatggcacgaccttgggcatgcctaggacacacggacaagactcgagcatgcacacatgggctccacgacatgtgtggtgtgcaccccgtgaccacaacgacacggggcctggtacgacttaccttttccccatgcatgcacgagggtgcctaaactttgtgtggtgagccagctgaggaagccatgggcgcaatgctatggtctgatggggcaccagacaatagctgactcgcaccatgatgcctatgcacagcacaggggcacaatgccttgtgcaccaagagggatcaaccatgggtgcaatgccatgactcgttgctatggagctggacctgacaggggaagtaagcaacacgcccaagccatgggcacctagacatggcacgggctcacacatcagtgtggggaaggcacactgatgcaccagacacttggtcagctggttggtgcacgctgcctagctcaaaaggccttgatcaaagacatgctgatgggcacccggtcacaagaggcaccttgcggggaaggagacagcttgttagtgggactctttagcagcttgatgggcaaggcttgaggaggtggcagctagctcagacagcaagtgaccaagtcaagcagtcaattgacttgcagttggctgagggctgatgactggtgcaagtgggtggttcatgtgtaggccactatctgggtggtgggtggttatgcaaggcagttatgggcggttctggccagttgcataaccaccagattggctccaagtttttgaatttggaaattaaaaaatgtaactgtaggccaagtcttttaaaagggctcctgcagccttgaaatagagagagagagagtgggatagggttcttctcgtaatgattgggtgtgagcattgtattctaacttagggaaacaattttgtcttatagagtaaattaatacaagttgggaaaggtttcctgtaaacgtttgtgtccctgttactttactgttgctgtgcttttactctgtttatctacgagctgggaaggaaggttggctaaggaaggatccttagcaccgtacactcgtgaaaaatttaaagtgatcttcaggggtgtgacacatagcatagtatgatgtgtgtgaccaatcttaaagttggagggtattcttggacatttcgcaccatttaatattccggtgcatgttttggggattattttccttttacttgctcaaaaatacacattcttagcttatgcttggttctcataaagtttgaaggaaaatgcaagagaaataaaataaagaagaaaattataaaaaaagaaaaaatgaagaaaaataaaaattaggtttaaagtccataaattattttgatatattacttcaaaccttttttcatttatataactcttatatataaagattaaataattaaaaaatataatttttttttaataatttgaatttatttcttattttttataacaaaaccaaacatgagaaactaattttttttaacattttttttttatttccttagtactttatgggaaccaaacatagcattaggttcacaaacgatccattattttcaagtcatgcacatttacatgattcattgaataatattcataagtgacatgtatttgtccagatgattacaaaataataagaattaagaatgataactttaattgagtcaaaaaccgatattaattgcattgaagaaggaattatttcaactcaatattatgaaaaaaaattatacaacaattatatggagccaattctcaaaagctaaaaataaatcacaagattacaaaaacttatatttgcaataaaaatatttgtttcaaaataatctttgatagcaagtggattaaatcttactatgtgagtccaaccaaataagtttgacggtctgattagatggcccatatttgacccaggcccaaaaggccgccaaggcctagtgagctctagggcaacatttgtccattcgcagactataaaagcaagagaagcagctgtttttagggtttgtgcttcgtctacctccagctctctttctc

SEQ ID NO: 13441 - DNA, 2761 bp, Vitis vinifera
  Intron number 1 from transcript GSVIVT01031673001 (locus G SVIVG01031673001) derived from phytozome v7.0 (chr-ID chr5 ; pos 19967845 to 19970605)
tcagctttcttccctcgaatccgactctctcactggttctttcctcctctcctttctctttagtattctttttgcacttttttttcatatttaattttcgtttcagtttaaatgcacgacaatgaagataaacgcatttgcatattcttttgagcttccgtttggatgttggagagtatgagagattgaaaagagatgaactaggaagaaatttcaaattttcttatttggattgttgtggcaattagaaagaaaactgaaatatgatgataattaacatatcaaagttcttaagtcaaattggattcgggtggagaaattttgtgttgagctcaatggagatattctaagtaggtttatgcaaaggagaggatttttttttctaatgtataacataattttaaaatttaaaacatctttttggaaacccgtttgtaaaatcatccctcccagctttactgaaaagagattctaagcattcacaaaaatctcatgcaatgtgcttatgcttatatggagaaaaatttggctaatgttatgtgcttggctaatagagatattgctagccatctttttttaaaacgggttaatgtcattcacctcccctgatttgaattcacttagtccttattggtttgaaaattcatcaaatatctctcttattttgagtcagagggtttgaaaatttgtcaaatacctcctttattttgagttaaaggggaggtgaatgaaaataacaaatgagaggtaagtgaggtgtttgatgaaatttcaagctaatgggagctaggtttatttagccaaaacccttttttaaaactgttcactagcttcagacctctggcatgaactattcagacctgttaaaattgagtgccctccccacataaagtgcgatagagatagttatatcctttagaatttttaggggtctttttagaggttgggttctatggtatatgactagtctcaatgtaatttagattgtggttagagaggaatgctaaaatttcctaggacggagatctatagaagctctttagggcttggtttatctctatacttctttgtggcccttgtcacaaatgcattttgttgtacccatttgagcttttaatgctaaattgaattcgcatatgtagatccaagaagttaaatggagattcaaccaacatggtttccaccttcaatgggttctataaagtttgtttttgatgattgtcccttggaaaaacaaagggtaactttggattgaaggagcatttacattttccaaagcggagggagagggtatacctattgcgatagagattcagtctattttagagggtttgtcatatcctaaagttctgagattttagcattatgtgttgagggtgattccgctattctcttttgttggatatataagagggaaagaggtccatggaagtattggatccatcaaattattgatgttgcaaatgatttaagatgttctttttctcaagctccaagtgtgttgctaaccaagaaacaaagcatttagccaagtgagggataaacacttgatatcctttattagagactttttacttctttgagatgtatagtgcaatcttgggtcatagtgtgtttttcttacatttggaggtacattatatacttttccttttcgataagtgttttataaatcttggaagaaattatcttccttcactgcacctccaagttcaatgcaacgaattatgttgtttctgacagagaaaatgttatatggacacttcaaagcctgagaattacccattttggaaacaccaagacatggatttgggtatagaatgtgtctgacattgcctattgataaggtgcatccagcagtgtgtctaacgaagaagaattacaaatttttattttgatatatcactaattttagactgatgttggacattgtatcttatatgattaatttgtctgcagagattgaaccaaagaaaagtgaaattagattatttggctctattttgcgtcttaaaatctgggtattgaatgaatctaacactgactcataccagccttggactgatgtaatttactccatgtaacataggagaaaggccaaaaaggatgaggttagaggcactaagaaacaacatgatctgtaaggatctaataaaggatttcagcttctaaaaaggatttataaaacggatttcaagtggttggaactaagactgtgttgactgaatctaaaggtcataattctattctttggaagatgaaataaaattgtgtatcatttttaggccccatcattgggttataaatctagcttctccattctgtgataataaagagactgaatattttctagctcttagataaatgcaaatttaaagagtagtataacagatgtcttagtgctaatccattcaacgctaaaaaagaatattctatacatcatctaatcgaactatcaaagagaggtgtgtaggttattacttgatttctggggatcacatggaaattcatttcatcagattttcttgttcattttagttgccatattgcttaacattgctgttagtctcattgctaactgcatagctgacaaaacccttttctgttagttgaattgtgattagtgatgcatatgcattgggttcatgaaaacttgttgatgtaaagattttacatttttgtttctctctagaaaggatgtataagcttacatgtgtctctgtatggctgttttttttcttccctcgaaatatgcagaagc

SEQ ID NO: 13442 - DNA, 4373 bp, Vitis vinifera
  Intron number 6 from transcript GSVIVT01035267001 (locus G SVIVG01035267001) derived from phytozome v7.0 (chr-ID chr4 ; pos 11650908 to 11655280)
aaataggtatttaattttctttccttctgaatggtacagtagcataatgttggctgctataattggtttgaactttgtgatatgcactgtgtggttgcaattctttattttctccttttccactatgattatatttccttcattgttatagaaggaagtttgttttcttttctctatttttgaatttgcttgtcttatattgtgaaattttaccctcattgctaatagtttggcattggctttttcaacttctaattttttagtttgctgttttcttcataatggttctctttgaaggacagttcttccccaactcccaacacacatgcacatccacaaataatgagctgtactgagcatccatcctgtctagttcacatctttgaaatctgatttatatcacctgatgccatagctctagtgatacgacttttaggtatattacccactttccatttaggtgatcctttcttaattgcttccatttcttatttgagtgatgagccatacaaagaaaaaggaaaaaaaaggaaaaagcagtagaggaaaaaaaaaaaaaaaaattcggagaaggaataaggcattgtgtaggaaggagagagagagagattttaaaattggttaaaaaaaaggaggtggctgtttcgaaggagctccatgcataatgtccatagaaaaacaaaagaatagaagtgtgttagattagatactgatgaaaaaattagtgacacttgttgccttgttagaaaagtgtatgatttctttagaataatgaaaactataattggtttttctaatttcagaaaagggattttgtgggggatgggtaatcatccaaaatttgaaatttaaaacaaaataattaaatcttaattaatgattgaagtcctttgtatgaaattcaatctaccatctagatgaaagtacttcagaaataaagaagacttttgaatcttcattaactgatgaagtcttctataaaaattcaatccctatcttaaagaggtttctccagttttataagtattataggtctgatggagattgttcatattttcatatttaaattttggaaaaatagtcttaggaagagttagccatttttgggtattatcatctattgggcatattggtggatgtccaactgcaatttcagttaaaggaacaaaagagttctatgggttttattggatattctaaaactaagaatgcctcttatctatagaactgacgcatggaaaaggcttttcttcctaatttaaatccattttcagttgaatgaagtaaagaatgcttcaattttgtgggttctatgagactcatagtcaattttccagaattcaaacttaaaatccctttttcttgaaaagaaaaaaaattgcaaaaaggattaattttaaatttcctaaaatttatgagttctatgggtttataagacttataactaattttaaaaatcatttttctttaaacatattagaaaggattagtttcacaaacttagtagaaaggataattttttttttgaccagagtaggaaggattattttcaggtccctaaaattttataggttctatggggtccacacccaattaaaaaaaatcaaatttaagaattattattgttattattattattatttggtaaaatcaacataaaagattattttgtaataatcattgtgcgttgtcaactaaggatttttttttttggggtctaaatctttattatcaatgatcgacttttgagacatttaaatctcaaaacttgattttgatcttaaatgaagcatagctaaaacaaaacaatgaaacgacataataatttgataaaataaaacctctaaacatacacgtgtgcatatgtatttgttacaatttatttgaggtgatgtgttgtaaattcaaataaataaataaatattcttccaatcttgaattggattgatatctggcatagggtatgtagtataggagattaaactaaggcggggaggttttgggttgtggggaatggaccacaactttcagtgaaatgtttatctcatttgaataagtaggccttacatgatttatagttttaaaaaatcccgctttgtaagaagggattctaattaagaactataatattttcaacatatttgaaaacattatgattattatgccaaaatggttgttaggtggacaatttgatgcccttgaaaggttattacacttgttttaccttgattacctgttttatttgtttctctatgggggggatagcttgaaaattcatttttaagaaaataattggcagggcaagctatctcttagtttccagtttctaaccatctttagggctataagaactagagattttttttttttttaaatttaatttaatttaatttataatttatttcttttatcttaggcctttcctcttgcccttcttcatagaattttaatttctgccacaacttctatgatcaggaatttaaggagctagtgatgggtgtcttatattctcactactatatttgtctttattttttttttatttatatatttttttttatgataactaaggaaccttccatggccaagcccttaggactcttcacaaggaccaaaatctcggggtgctgatcgtcctgacaacaactagcaccgggcaaatttaggatatcatcagtggtaggattcaaaccctagaccatgtgccacttattgggaccacactccctagtgttcgccctgaccaattgggctaccttgacgggtttatattctcactactatgtgcatctttcacttactttttcagatgtcggttctatggcatgtgtctagtgtcattgtgatccagattatttgccgaaaaagaaatgccaggattttttaagatagatggagatctatggaggctttttgaagcttggttttacttctttgtggacctcgaggattgtatttacttgtaccctttgagtttgttaatgctagattgaaatttcagttgtagatctaagaatttaggtgggaagtctcaacgcatatggattctttttgcagtgggttatttctagtttaattgtgacaaatgttccttgggtaaccttggatgactagggattgaatgagtgtttagagaactagaccactttccaaactagtaagagagtgtctaattgttgaagctgaaattcaagcacctttaaaggttttgttgtagatcaaagttttaagatttttacattaataggtgagggtgacttcgttatcgtcatttcgtgggtgttcaagtgagaaagaagtccatggaagtattatgcgtggatctatcaaattgttgatgttgcaattgggctttatgtgttgctaaccaagaagtgtatcatttagcctagtgaagggctaaacacttagtatcctttattggggactttttatgcccttgacatgtgcaatgtggtcatgtttgtacattgttttggtttcatttttaagatgtgtagtttgttttgctttcttttggaggtataaatgtaccttcctttttataagtctttaaatctttgaagaatttctcatctttcatcatatttaccgaacttatcaagttcaacacaatgaattatttgttcttgataaagttttaaaaaaattattatttattgtttaggtgtcgtttggatacacatcttgttttctatttttcttttaaagctagtaataattctgtcataagaactcttagagacttatcttaaaaagataatgatttttaaaaattattttaccatcttaaattttaaaatttttaatagtgatttttaagagtataagatacatccatactttgtgtaagagttcttacatttatatacaatttagtactattttttgtttttaaaaacaaaaaaagggtagggtatctaaacaagcacttagttatttacttttttcaacaagtctggcctacaaactaataaaatcttgtacctattgtgggtataagagaaattaattgtgttgggtggaagttattacatttttgttgaacacatataacaagggctataggagattgatccctcggaaaattaagggcttatttggttgttgttttcaagaattgttttctattcttgaaaataaaaaacactaaaaacttatttgatagaggaagtagtttttgtttttattgttccccgtgttctcaaaatggctccttttagaaaacaaagaaaatgttgttttccttgttttttgactgtttaaagaacaaaagaagatattagagaacattttgttctctgtgtttttcttctccctgttctcacctttccttagtggtttctcctgtggtttctcagctaccaaataga

SEQ ID NO: 13443 - DNA, 11646 bp, Vitis vinifera
  Intron number 2 from transcript GSVIVT01038360001 (locus G SVIVG01038360001) derived from phytozome v7.0 (chr-ID chr7 ; pos 13617915 to 13629560 reverse strand)
gctttggtcccaactcttccaacagcagagtggaggttagtttgatacagcagtttgctttctttttcttaatttcgagttcatgataaatcatggaaaatagctctgggtgtgaatttttgaccaaataatgttaatggccacaaaaaaaacataatacaactgggttgttgacctactctgataccatgaatgcagtgaaggaaaaaatgtttcctctctaatttttcagtataagttggtcctgggtatttaacacaaaagagttgacaaaaaaattgataaataaggaagatattcctagcctaattacagattttatagcctaattgtagacctgtttttaatcaattaaacaactatatagatagttgttacatgcacaactattcaattgtgaaattttgaattattcttattcacaaaaatcaagagatagacggtaattcaaatcaattcaaatcttctagcatctaatttacaattgtacatgaagagtcctacaagaagaaaaattcgaactaatttacagctgtataagaggagtcctaaaaggagaaaagtcctaactaatttacaattgtgtaagaagagtcctaaaaggagaaaaatcctaaattataggacccaaactttcagcactacccctcaagctggtgaatagagattcctcattcctagctttcctataattccttgaaatgtggtattagccaaccctttagtttaaacatatgcaagttggccacttgtcccaatatatggattgcaaataagaccactataaagttttttctttatgaaatgtcgatctacctccatatacttttttcagtcatgctagatgttgattgtagacttattatcacaatagagtctcatagggcatgtgcacttgattttaagatcatctaaaataatcttaagccataacaattctcaaattccatgacttattgcctagaactttgccttgacacttgatcttgctaccactggttgctttgtacttcactaagtaactatatcctctaagaaaagttcaatactccaagtgttgtgcatggagacacttgaagacacataacctttggatctaacggttatgtgtatgaatgtgaacaaatgacacacaccaaaaaccttcagactcaatgtatagaaggtatgacaattaggaaagaattttgcaaacacttccttgagacttttgaatcctaagactctagatgaaacctagtttataaaatgggcaacaattaaaacaacttccccccaataagatttgtgttgctgtttttcaaacaataatgcctgagtaacactaagaagatgaccatttttcctttcagcaagctcgttttgtttgggtgtatcaataaaagatgactcataaatcatcccctctttttaaagtatgaggacaaaacttgattgaagtagtcccttgtattatcagttgtaaccctttttatacaaaccccaaattgatttttaaccatgggatgaaatatgggaaatatattgttcactttagacttttgtttccatgttacccttgtataatcattattaaatgacacaaaccatttagcaccagaaacatttgaaactcaagatggacccaaatatcactatgcaccaaagcaaatgtagggaagttttggtactaaaggaaaacaaaacatattgatgcttggcaaattcacatatgtcacaatgggaactgtttacatccattgatttaaataacaaaagaaatatagtttgaagaactctaaatgaggaatgcctaagatgaagtgaaatctcgcctttattgaaaggtgtagtttcggtcaagaaggatagaaaagactgttttcttttttttttttgccaacacactgactggttttttcaaggtagtaaatcccatcctttgccctagcatgcccaaatgtcttccccttagtggtttcgaaacacgctataattttggaaaaaggttacacaacaatttagatctttggttaatttattgattgacactaggttaaccaaaagtttaggtacatgtaatgcaccttgtaaaacaatagattgggtgagattcatttttcattgactagcagtcatgggaaaggaaccttcgacaatagaaatatttttgttactaggcaaggacaatttgaagagaaacagagagaagattgggtcatgtgctttgtggctcttaagtcattgacccaagagtcagtgaaggacaaatctgaggtccttaaagtatgagaaatggaaggcttgcctgtttgtgccaaagaatacatagccgattgtttatcaagaatgcctaaaaaatttctcagtttttctatcttttccttgtttccctctccaaattcttcactgttgaaactcgatttttcttgagggcctccttcacaatttgtcatatttgcttgactgtgttgctgccatgctttattttccccattccaatattgattctgagattttccatggagtttccaatacttctctttggtgtgtcgaggcttcttgcaatagatacatcaaagttcttcatggttgggattctttgaaccatcagaatgcccagtttctctaacaagatcaggctgaatttgtttgcctttgtagcaaccatgacagaactgtcaatagaagatagtttgagcatcacacctcttcaactttcttcagcacaaacgttgaagttgacttcattcatggatagaagttcctctttcctaggacttggacttgcacttgattgaacaccatattgagcctataagaaattcaaaaattcgttctctttctacaatttttttgagaattattgcatcttcaatgcatttcatttgaatgttctagtagtagtcaatttcctgccacaaattcttcatgatattgacatatttggttacagatctagttccttgttttgtgtccgaaacattcaccttgatttcgaaaatttaagcaaaatctcatacccttgaataggtttgtcagatagcttcccaaatgtacctagtcattgtaaaaaacgtacatggtccactaatttcaagggtcattgaattccataactaagacatgatatggaatcctcttcatcctagttgtgaaattttggagctctgggctttggtcttgtgccgattaaatgactcaaatttcctctaccctttaggaaggttcgcaccaattgagacctttgaagataattcttctcgataaggtagtaagtagcttggaggttatgtagtttggcttaatggcgctttgaatgttgtcttggtagaattggtggtaggactatggtttgaatcagaaaaaaaattgacaatgaagggtgaggaatcaaacacaacaatgaaggctgagaaatcaaaacaccaccaaaatatatatatatatatatcaaataaggacaatttttttttttttttgattggaaacgacatagagatatatagatagaaaaaaagaagtacaataagaaggatgaaaaatcctcccgccaaagaaaactaaactacaagaaattacactgtaaaacaagagaactctctataatggaccaatccttatggagtacacaccgctaaccagtcaagttgtaacacattaaggggagtccccttaaaaaccttggaacagaaagcccaaagagaagcaaggaaaacaatagagtcccaaagatactctgaattccttgctttatcctcaaagatctccgagtttctttcccatcacacaacccgaattagagagttgctcgtagtttgccacaagactatctccctcttagatgaaccaaaaccattaaaaaaaaattgatggatatcatgtcaaagatgctcctcagggggacccaatccgtcttggctaactgaaataatctgtgccacaacccaatcgtcaaggaacaatgaaggaaaaggtgatctactgattccccatgcttcatgcacagaatacaaatatcaggactaagggctttgtagggtcttctcacttgtagcatgtcattagtattcaccttcttgtgtgccactaaccagacaaaggacttcactttgatagggacttgagaattccaaacgaacttagaagggaaaacctgaggagatccagaaaattgagataatgctagaaataaagatttgactgaaaaaaaccctgaagaagataatggccaaaatctggcatctggaactgaaggagatagatgcaatccatcaagttaccgcatgaggccttctaaatcctctatctcaaaatctgaaaggttacgactgaaattaaaattccaagagaaaggacgagtaaaaccaagaactgaagaaataagaatatttttatccaagactactctaaatagtcttggatattgggttcccaaaggttggtccccccaccacaaatcttcccagaaccgaattctttccccatttcctaccacaaattgagtaaacaaggaaaactcctgaaatacttgtgcaatagccttccaaggacagtgatgtgaccatctgacaaataaggacaattagtattcaaggttttcaacaaatacactaatcacctagagttggcgttgataccatgtaaaattctgaattattctttttcacaaaaatcaagagatacaccagaatatatatataataggaaagtataattcttgatatatatagtaattcaaatctcctcataactcatttgggtcctactaggaaaaaaatcccaactaatttacagctaaacaagaggagtcctaaaaggagaaaaatcccaactaatttacagttgtacaagaagagtcttaaaaggagaaaagtcgtaaattccaaactttcaacacaaataaccatacaagagtaattatagaaagaaatatgtgtgattaggcccatattcagtcacaagtcttccaacattttattttgactgttgtcagcatacaagacgcatggaagattcaaatgagtaattatttatgcttaggaatggatttagaatagtttgtgaattcaaaggggatagagatttttacattagcaacatgtgaaatgagtttaattgacaaaacccaactttagttttatcaagttctgcttgaaattaacaaaattgctcaggctctcttccagctctttaacttttctattccattgcctgggcatattttatcatgtaattttgttgccagctcatcagaaccactcaaccacagaccataatttcttataatgagacaccagcaagaataatacacactggtcttgacatttgacattacatccaaagcatggctagacacgaactttcagatgcacctagaactctttgcttggtcatggtctgaacttgatgaatggggcggatactgtgtcataatcatattctcacttactcgctattgttaactgtaacatcatcactagtcatttggagtattgattggataagcatgatcaactcgatattgattcttcctatgcacactacattcagtttttagtagtgataatttattagatgattatcatctaatgattatttttgttttgataacaagccttcccataggcaattgtctctcgttttacagttcctatggatgttcagatggattgcatcatgtacataacatagaaagaagagagaagcttagggttctatctccagttctatatgtttatatcgaaaggaatctgtctacacagtaaagaacaaaaaaaccactggtaaaagaaaatgatggtggtggcattcccctttaaactggtgtgtatgtcatgaataccctggttgccatgaataatatgaaaattagcccttttactcctttgtcaaaacatcagcaagttgatcgtaggtccaagccagaatttaacttcattatgaagtgcctattaaactcaatatgtttagttttgttatgctgagcagggttatttgcaatattgatggcaactttattatcataacaaaacctcgtaggaattatattcaggatgtgcagagtgttttctaaaaggtatttgaggtacacaccttgaggcccgcctcaaggggaggcactgagttgtagctttgagtcataggcttaaggcaatgttttaaaaggctaaagtggtcttgaggtgagatgtaagccttgagctaaaacaagacataagcatcaacttaaacataaaaagaagagataacagtaataacaatagagaagaaaaatgtcaaaaatgataacattctaatgtaaattaagaatagaataataagaaagctacaaaattcataataataaagttaattgttgtaattttttatatttctaagttggatcctctttctcttttccaaaatcccaccctttttcattgcaccatcaaatagtagcgtttttaaaaccggactggactggacaggaccgaccggttgaattggtcagaccgtcaaccggaccttgatccggtctggtgcatgcttcgtctggttccggttttcttttgttgcaaaaatggatttaaagtgtgcaacaggaggacttgaaccttaggactaaaggttcaaggtaatatagaactaccattctgctacttatctaatgatgttaaaattgtgaaactaaagaatacaatatgtatgttatttcagaaattcaatacaagtaaaataatctaatctcttttaaacataaaataatatctatctatctatctatctatctatctatatatatatatatatattttcttcaatattcaacctacattttcatatttaaatattatgcatattttatttaataaaatttaaattattactatgtttatataaaagatgaaaaaaataaatatcattgatttttatatatatatatatatacatattaattttttaaaattatttttaattttaataaaatataaattatgcatttgtgatatcatcaattcgatttcggtttaaccaccggtccgactagtaaaccgtgaactgggaactttttcggttcaatgactggtccggtttttagaacattgtcaaatagtcttcaaaactaccatcatcatccctaatacgattctctaacatatctttatcttatttgattgctctactatcattgatacgaccttattgaagtgtgcttcctcaaatatgcaatgttttagtgtgttttgtactttgaaatgtctgtcttgggtcttggttaaaccctttgaaaaataactgatgagctatctttcattcaacccgttgaagaaggaaaaagaaaataattgaaaagaagaagaagaagatggggaaaaaaataataattaagaagaaacagaggtgctgttggagaagaggagctgttggactttgctgcagcttgcttggattgacattgatgtggagaatgatagaactgattctttggaggatcctactactagtgatagtgataatggtgctgaaggctatttgatggagccattagacagagttggactgtgggagacagaaagggactaaattagaaaatattggaaagagaaagtggttaattttcttgttatgggtttagttgttttcttattattataatttttatgtcattttattagtatttttatcctttttagattatttatatttatttattgtttaagttgagacttacacctcattgctcgaggcttatgcctcactttttatgggcaaaacatgtcaaggccacctctagccttttaaaacatcagatgcatatccccctaataaacttcccatacacaacatatcacttgctccatctctcattgctctaaactttgcctttgcactacagtgaacaaagaggactttcttactttggtgatgtattaggtgacctccaacaaaaattcaataactaaagaagatctgcaatcagttactgcatctgcctaatttgcgtctgtttatgattctactgttaaatgaacttacttacaaaatgagagattgatggggatgaacctttcaaggtttccttcgtcggccatttggaaagtttatgtgcagcctagagtgagtttttttgggtgggaagcaacgtgggaaaagggtcttaccttggatcaacttcaaaagagaggatggcctttagcgaacagatgttacctttgtcaaaggcacgaagaatcaatagatcacattcttctccactgcgccatggcaaggactctttgggcgttgctttgctctctttttggggtgcagtgggtgctgccagccactgttaaggcgacgcttctgggatgggatgggtcttttgtgggaaaaaaaggaagggagtttggagagcaagccctttgtgtcttttttggacggtttggaagacaaggaacaaagttgcctttgaggaagaagagctgtcaatccaaagacttaagaattcttttgtatatttcctttggtcggagatgaaactgtttataaaatatggtactttgattttagttgattttattgattgggtgggaacccgttgagggtggggttcaggctgcacctacgtccttggcatccagctagggagtggggggtgtttttttctttgtaatctttaagccgctgctttggcgggtttttaatacaattttatcctttacgtatcaaaaaaaaaaaaaaaacctttcaaggtttcctcacaagagggaaagggaacaaagaaatcctaaattggctaagtcaagggtagaactctgttcatttgggttttttggagtcaaagtttctggtagttggttatatgagtcttatttagatttagaaagttttctttgatggaattttcttacaatgagtttttttctatattttgaggcttatagaatagattgatgataatgcatactttgcaagatttacttatgtaactctattatcttctcttttgaatgaggctcctaaaaggtgtttgtagaactttaaggtttattcattcttttttttctctaggtgaggcttttaaaaggctttggtgaaattttaaggtttttattttctgttttaatttttgaaaatctatttcttcttcttaattttcttttttctttgttgttgcttagttccctcattcccttccttaaattctaaaaaaggtgaaactctagctcgcccttatttgattgaagtaaccactttaggattatcctacatcgtaggccttttttaatagatattagcgaccctttttttaaaactcaaggacacaaaggcaggagagaagtttacaggctgttgaattcagatatcgtgaacttctatacgatacctcaatatatgcacctcttttgttacacataaatttcctaatcatagcgagatagatcaactttttattaaggtaaaatccctatttacgagaccaataacacataaaaacagaaaatacacaagatttatagtggttcactcaatgtgagagctacatctattttgctgttgcaaaatttccactatgatcagaaagccaaatacaagatgatcttaggcctagtaccactcctctattatcacacacccctaccctaaaaagggtcatcctaataatcccttatataatgagaaagttagggcaaacaaatacatgtctagaattactaaaataccctttaaataaaaattagacttcacacaacttaacccttttccatgagcctctagcattgtcttgaattatcaagaggttatctctatgccttcatacaaatggtaattgtaaatgatcctgttattgaaaggcatgcatcttagcatattcgtgcccactttttaagtgtctaatagaaaatttgtgcacaagacaaatatgtctttcttagaccctttaaccttcttgagtaagtataaaaaacttcccatatccttaatctcaaacttcttggtcaatttcccatttcaacatcatcattctctacataacaatgtcatccacattcatgataagagtagtaatcttccatgcaaagcactcacagacagggcataatctgcttgactctacttataccctgacttcatattgccttgcccaagaacattgttgtggactgttgatgttgttagctaacaacataattcctgtaaaaagccgccttccaaaaggaaagatataaactgactcaaagaaatatacacccatagatgctactttcagttaggagcaggctgattgcatttatagtctttttgagttggagaggaactaataaatggattttctagacagtactttctccgcaaatgtttggctaacttctcacaaacacccaaaatacaatcatgataaaagcacgcactaccaaataactagtaaggcatcaagaaaccaagcttccacaccaaaaaaaaaaaaagaaaaaagaaaaggaaaaaaaaaagaaaaaacattaaaaccaatgtctttaatcagcaaaagatccataaaaccatcttcctcctccaaaaagaaaacataaggaatgatgggatttgggcaaacatctctctgtgttgattggatccagaagaacctctggaagggctgaatcaagagattgcttagagtgactccattactcctagccaaagaagaacctgactagaagaacttgaatcagtgagatccatgcaggaagacgaatccagtggtttttgggggatcggtttggggaattaggactgcagtagcttacatcagttacatggatgctgacttcagcaaccatatcaacttgttttggctcaatgtttttgatatctgattaatggttcttacagatcgcaagttggatttataagtgattagttttagtaagaaactggaggagagagaagatgtgaggacgggctacaaaagataaagttttctctctctccagatccttagatttatgctagaagatattcaaaatggaaaaagtatgattatgctgtctggacaattataacaataaaactaaaggtcaaaaaacctactatgaacagaaggttgtaatgatcttgaatataatctctagcccatatttttgagtcataatgtaaggcttttcatttttagttgagttgaattctgatgatttatggattattaactgtactcagaagcagaggctcagagccgaagaaatccttttaggttttggataaaacatgtccttgaggcttggctttggtggcaaaggagttggtggggtttgacataaactaaaacaaagttacctataagaatagggtcttggatgaaaaatatttcaaattgtgtaaagttttactctccctttgaatactctctctcccggtttcctgttaaggatagtaagaaacaacatttctagtgcttgtcatcttatctatgttgtggattgcataaccctgcaaatgcaacatgaggattttggcaagccttttgatacttcaagcttaatggatttcggtatttttgcatttatttagattaataatgttagattcatttattttattgcaattttatagaccctatggatgtaccttagtttaactttcattgtcaattttcatcatcatctcattttcctagatcattgaaaagaatatttcataaatctctgaatgtcctcgagcaggtaa

SEQ ID NO: 13444 - DNA, 5038 bp, Vitis vinifera
  Intron number 8 from transcript GSVIVT01027825001 (locus G SVIVG01027825001) derived from phytozome v7.0 (chr-ID chr5 ; pos 8222334 to 8227371)
ccgagaggcgaggtgtaagcctcgagcgcttaggcgtaagtacgatgactgttgaattgtttaaagtaaaaatagaattataaaaattaagagaattactgaagcatgacaaattggataacttattgaagaaaaacattgatacctttgtttttctcatatagtaaagctcagaaacagaagcaaattggtttaactaaaaatagaatcataaaagtgaagaaagttgcagaagcatgataaatgggtgggaggaaggggagtgaagaaaattaaagaagcatgaaaaaatggataactcatttaataaaaacctttggaagagggagggagggagggagtgttgaaaattaaagaagcataacaaattggataactcatttagcataaacttttgggtagggagagatggaggcaagaaaattgaagcatggaaaagtagataactcatttaagaaaaattttagatagatagggtgatgggcgcaggaaaattgaagaagcatgacaatgtagataattgatttaagaaaaactttagattgatggatggatggatcgatagatatttagataactgatttagcaaaaactttttggatagggagagatggtggtaggaaaagtgaagaaacataacaaagtagattactcattaagaaaaactttaggtagttaggcaaataaatagatagataactcatttaacaaaaaacattttgggtagggaaagggaataagcatcacaaaggagataactcatttaaggaaaactttagatagataggtagatagatagatggatgttccattgacttgtaaacccctcaaatatttgttattgaatctattattctagaatagatcccccaaggttttaaacatagtgtaaaccatgaaatattagttttcaatttatgttaacaagtaaatgccatctattctaattaatgttcgtgcatttcatctaaaataggatttgagtctttatggctgcatattcaaagttaaaatctgtcatcaatgttacgaaaggctattgaggctatagtttttaaaaggtgcacttaaagcgtgtctaggcctaagatgcaaccactccctagttacaacacctcacttgctaaggcatgtgccttgttgaagaggagagcagtgtgcctcatctacttgacttttcttttttcaatacttttatccttataatttctaattgtatattgaaatttgtataattttacgttgaatgtttattttaaatgtttggaatcttaaatttttattagttggattagattttggatcatattttataaaattgatatgcatcctaggtaacgtttcactttgctaaggcgtgtgtgccttgtgttgcgccttgcacctaagctatgggagatttttgcgctttaggtgtgccttgtgctttttaaaactatgattgaggcttgactcaaggcaagactttgcaaattagccttgaagctaaagcctcaattagggtaattgaggcttaagcctcaccttgttgaggcttacaactttgacgatatattgtcaaggctattaaggtttaagcctcaaatatccaaagggttttaatgggtttcttgctttgtttttttggtatatattttataaaggcttaagcctcaatattcaatgagttttagtggattctatgcttttgtgggcttttgctagagattttagaagttttgtattgggtcctaacttaagttaaatctgttaagaaataagagttttgttgacttctagttaaccctttaaatggaagggaaaaagagagattgagaaggaagaacaggggaattgttggctatcctagctactaatctcatatataatcattatcttattattgatagataaggaaaaatagattgcaattggtggatgatggagaagaataggtggatgttaatattgataggaaagacaataatgacaaggtggtttggaaagacaataagaaggaattgttttctgtcaaatctttcattgaggttttggatgtgaggagggtgatcatatttccaaagaacattatttggaatccatggttaccatccaaagccaactttttttgcatgagaaggtagttggggaagagttctaactttagataatcttcagaagagagggcgacctttggaaaatagatgttatctatgtaagcaagagggggagtctattgatcatttgcttcttcattcatctaaagcaaggcttctatagcacatattgttttccttatttagggtggcctaggcgatctcttcttcagtgagggtatgctcttaagttagcaaggctcttttgttgggaagaaaaggaaaaaggtgtggaacgttgctccactttgcattttttggacaatgtagaggaaacaggatcaaatagctttagaaaataaggaatagaatgaccaatgattaaaacttttgtttctttgtaatctctcttcttgggttagcatgtacataagggaagactcaatgcccttgtttgatgttgtagagtgtgtggggtgggcttgggtgttttttgtgctctttttggagggcttgctttaggtgctccttgtatacgtcctgtgcacgttggtgtacttggcttcttttttaaatttttatatacatttctttacctatcaaaaaaaaaaaaaaacattgatgggaaggttgatatagcaattagatatgattatattccttggaggtccctattagtgacattagcattaaaaattatttgatgaagccatgagagagagctaaattttcgtacagagaaaaaggaactaaattagaaactaatgataaataattattattatgaagtttatgcctttttttgttcaattttcttgtgactttattagtattttaatgattttttgagatttattattatttagttatttaagttgaggcttacacctcattttgccttgaggctttgcctcatttcggcaaaatgtctcaagacttacctttagccttctaaaacatggtttgtcatctaaatttgactacattataataatataatctaaattctaacaagaatgggtaagtaccatataaaaactaaggataaaaatattggttttcataaaaatgcccgtgattagattttatggatatatcaggatatatcgggaaatattaatagaagttttgacaaaaaatatcaatggggtgaaaattaatcaaaacttatagaaatattagggaaaactccaaaaatgataagatgaaacaataatacgcatgttgaagaaattaatatatgtatgatataatttgtaatattcaacaaaaatttatagaatttgaaaatacacttaatattaaaatgacgatttatttactttgtattgaatgatgatatatacataactattttttctgtttaaaaatatttataatttcattacaaatttatatattttgtatttaataacttgtacaagactcatgatttttgtattttcaataataaattaaatgaaatttgaaaataagataattaaaatttattatttattaaaatttcattttatttattttatattctgtaaatatattaaagatttaagagtaaatatggtatattatttttgataggtaagagcaaacatagtatatataatatgtagtcacatatataaaacaaagggcatagttgcccaagtggagcaggctcaattttgcacctggaggaaccaggtttaagtgccacccccccatgcccccacaatatccttatttttgggctttgaccgcgcaatgggctttgaccaaccacattaactgcacccaaccatgttgaccgctgtgaggcattaagaaaatcccgaaaaaatgctgataaatgggtaaaaatgagtaaatttcgacccatagttttaaaaggcatgctttaaatgtgccttggctcaaggcgcaaccactccctagttatagctccttgctagccaagacatgctccttattgaagaggcgcatctttactcttcctttataaacatttttattcttgaaatttttaattgtatattgaaatttatataatttcattacttttttattgaatgcttcttttaaatatttggaatctttaattttttattgattggattagattttgaatcatattttataaaattgatatgcatcctatgtcacatttcacttcactcaagtgtgccttgtgctacaacttgtgcctaagctataggagacttttgcgccttgcaccttttaaaactatgtttcgacctttggatattccctagtcatatgttgtatcaagttccattgacacctgatatagtgttgatgttttgcagacttttgaccacattttcattactgttaaaaactacactctgccatttacttgtgattccatcaacatatgctgtgaaatcctttcatgtggatagatctgcaaatctttgaagcgtatttaaatggtgtgaagatgaaatttttgttgttagtttgtgttaaggaataaaaactcttatcatgattcatacacaaaacataagatgaaactctaggcatgaggtatatgccttatggctgcctcactctgtcatccacaatatttagaattggagcattgatggctgctttcaaatgtttcctttggcattgctttgagatgtcccgaggcagaaaacctgtgtacgttctaaatgatacagtcatgtataaaacctgtgaaagttagcaatgaaacatagaggaattggacttatattaaacatttgcccctaattccatttggaataggcttaccatttttttttctttaaacatttcttttatttctttatgtctaggaaaaaatttctatgatcttaattttgtgctttggttgacaatctttatatttttatttttattctcaaatggaaatgtaagttctacatgttgtaatgctcttgaaattgtttttctttacagagacccagattaaacttgcacctgagaaaaaaagc

SEQ ID NO: 13445 - DNA, 1715 bp, Vitis vinifera
  Intron number 13 from transcript GSVIVT01025385001 (locus GSVIVG01025385001) derived from phytozome v7.0 (chr-ID chr 6; pos 1195970 to 1197684)
tccaaaggttggtctttatttgtttactttgtgattggatggattaacctctattgttttcaattataaaaaaacataatttagattattcttgctagaatttttagaagggacgtttttggaaatagacatatttgtgcttcttattcttgaattttcaacatgttcaatgtttggtagtagcctcatattttgttaaatttgtaagaataaaatttaggtctggaaatattctcataattttttgtttacttgttaaaatgtgaaatgagactgagggttacatgttgagttgatgcttcattctgcaagaatcatgatgaatgatgctctatcttgagatttgccccactttctgggccggaagatatttatttttctgaatgagtgggattaatatcttcatcgatcgtgttcatatgttataatttttatccttctgtttgtaggtaaaatagtattattgatggaaaaccaagtgttgtatggcatgtagaactgaaaatactgcatttagtgttcacagggtagaaactaagaacaattacatttgaaatgatattgttatttggcccaaaataatagtttcatttggaccaataaaaacttatggaggaagtaggcgattttatttactgttgaactctctacctggagtcttccattctctagaacctttaaatacactctctactggatactctttaggtcggccatgcatttaattttgtaccatttcagaacccaattttgatgggagtgtcaacaagtaaacaaactcatggtctgttccttatgtggaaaggcgctcatgtagaaagttctttctattgataaattatgagcatgtttgcaaggatcagtgatattgatcaaatgcatgtgcgctcgctgggtggggactgtatgctatttttattctttcattttgtgttcctatagtgatgaaaataagggcctatccgtgaagcttagaaaattgatgagcatagtctggtagtttttggcagactttctgtatagggaggtttattttttagctttttgggagctgtaatataaagctctgagtttcaaagttaatgttgagctgattttgtcttgtattggtcagccaggatctttgtggacctgaccggtcaacttcctgcaactcctaaacagttctgaatttgaacatttgttaacataggaatagtcctttctgcttgatgcataagcattgtgattgggcaattgaaacattagcattgtgattgggcaattgaaacattagcattgtgattaggcagttgagaaattctcctattgctattatgagctagacattagcctgcattttcccttgctgaagctcttcatttttgggaatcttaactgatgctgcttagttgttaatgttgatcaaatgtttatttttttgcattaattaaatttggatatttgactagtgttatttggtcagttactgtgtatttttggtgccttatgctttgttttggttttcattttgttaacaaagctcgtcttttggtcctgtgtgattttctgcattaatggatgcttgccattcttatgctacctatttacatgaagacactgattatgagtccccagttgctaatttatggtagttattttcagccactttatcatttgaccataaccaaatatctgcaggcacacaatatactcaacagtcttacaaagtaagc

SEQ ID NO: 13446 - DNA, 8829 bp, Vitis vinifera
  Intron number 1 from transcript GSVIVT01026291001 (locus G SVIVG01026291001) derived from phytozome v7.0 (chr-ID chr4 ; pos 12797992 to 12806820)
ctcctggaagcttgtgttgggcttgcttttacattgtaagtgttttttctattttttttcctccttttttcctcttcttatgagtagtttattgtgtagcttgtggttcttaaaagacacatgtccgctgttagaaactcagggactgcaggtccagctgtcgagaatcaaagaatctgtgtgagattagttctgacaatcccaatattcatctgaatacagttaaagtagatgaggcaaattacttgatttagggtgtcagcatgtttgtcttttatgggagaggagagtttggctatgtaaatggacaaatcaaagaagctcagtctaatggtactatttgtgggaaatgcgaaacagataccacatgatttagtggtgtggctgtggatcaacaaatgatccccttccgctgatttgcaaagagacagcagttagagaggatgcacctctccttagctggatgatcatcaaaatcttctctgaaattgttgtccaagtcacaagaaccatctctcaaggagcaatcttcttcatttctatctttgagaacccttacccctctcgagttctcaactgcaatatatgatttaatggagacatatttatacttagaaagcccccatgccttgtcatctgtatcactacatttgctcacattttgaattaaggtacaagaaagcatccatcaatttcaactcgtagtagttgaaatatcctgtatactttggattgcaacaagccccccattgaatgtgaccagctccaataacctacaattgaagctttcttttagcatcggtttggtggaggtctggaaactggtgccagaaacacaggtttacaccatcccccactaagagcaataaacttcattaactttaagaagctctcatagccttgccaagcacttttctaacaaaatcattttcctagtggggctttgttttgtagctttaaacttctgactcggaaccccttctctctcttagtgagcacatcacccccgtgtaagcaaatgcattttttttcccctcttctaatccacctcactagtaatcattttgcaattgccctaatttgttcctgattgaaacatggatgagagaggttgacaagaataatcttgcaaacatgacaccacttttgatgtgaattagtcttctccttttgacaaataatgcatctttaattcagctcttttcaccattcttttaactactggcaactgctaactgggttacgtttttgagaggcctcccgtggtaaacccagttagattgaggtgatttctcgcacctggaagattaagttatctaacacattaacattctctactggatccattgggtcatcctcactcttttcttggtggaccttaagacatgacactgcttcaagcacaaaaaaggcataaatgagatatcaccaattggtccatattcaccccataaaagcaaatagtgtcatgcacattcaacaaaagcaagatcaaacctgaagttgtgtatgaaccctctctgcttccttagctaccaatttgctaagcattttcacaacaaaaataaatagaaggtagatccttctgctttaaccccctggcacttgtgaagaaacgtatcaggctaccattctgaagaatgtatatagatgcaccgtgaccaggatttttagtgcttgaacttgtacttcttactagtttacttcattggggcaaaccaagtaaactagcaacactcaggtctttggtcaattgagtatgtgaagtttagaacaatgactaatgaagttcatgagatactttcattgagaattttgcttggctaatattcttggaactgaggagtctatgatggaactatgcatatggagggtgatcaacacttcacagagggaggttgaactgtggtttgatttgcacttgttattggggatcaacttgctgatggcttgacgaaggagtttcaaagtgtgaatttgaattcattttagctaattgggcatgcataacatgtatgtgctagcttgagctgagattggtagtgtgaatatacacagcaatacaattttcaattcttggttttcttgccctttattatgcaggcaacagtgaggatattgttctcatttgtattcctcttttggtataaacataggaagctgcggtgtgaagcctaatctcctttctcttctctttatttctccttcgcttattctttgtttctacacaaaattgggaactaacaaatgcaaatctctcattatcttggtgatgagcctgtttctagccttttcccctccttttggtttattgggaacagaaaattcattgaaatgaattaaattctgcaattaaatacaagaatccctttgaaacttacaggtttgattctagcttttgtgaatatggataaatttgaaatttgtaatcaaggttattttgataaattactggacgtgttggttagttggttatgggtcttgtcaatttgtattattgtttggttttggtttgcttttattttgatataaggaagtagtaaattccttgttttagtagttctttgacgatccatagaagcacaatttggcataatggcaacattttttcctgtgtgaaagtgaggcctatgtaagtctaagatttattatctttttccaagcctagggtatggtcaaaattttcttttatttaaataatcaattaattttgttttctacaagtctcttgttttgagaagttagatatatatttgagttaaagggatttagtaactgttcttctatataaggaagaggtattggggcatttgaatataagatgccaatagacaataagtattggtagactctactctttgttggtggtgagactccatgagtgagcttccgtggtttttgtctttgatcacaaccataagactaactttcaacaatactaattttttttttttggtcctgagaccaccccaacaaggatttcacaaaagtctcattcaatctctaatctagtagcttttcctcacagaagatcctttgattacactttatcctcatgcaccaatataaacataggggagccatgtgccatatcttccttcttttctgcatccacttgacattccaccctaggagaaaatcattcacttcaatccaaaaatttctaaaataagattccataaatttttttgtcacatcacaatggattagaatgtttcttaactatctttacaaatgctacatctattcaccattgtccactctcttctcacaaggatatcgatggttagagcttccatggaaaacaaaaaaagggttctcaaaggaccatgagatctccaaatttctttagcttggaacattctctactcccaccatataaagaactataatataggacttgatacaaaagtttcctttcctattttctttccattataagctatcaatccctgctccttgcactcttattgaatttatgagcttgaaaatttgaaccattgcattcatattcccatcctgaaagtgcctctgaactgcacagaccaatggcctcaattccttccaccttcctcacaaattctgctactgtagcatcattgtcagatgctaaattgagatataagaggaaaattactttcaagggactcttacctacctagctgtcccatcataatttagtacttataacatttctaaaagaatggctgtcttaattttaaaatcatcctatcctcttataatggttttccataggcatacaccaattaccaaaagacctttcacctctggtgtcctctaacccacatccatttctccatatttggcttggatgagctttctccacatactattgtgctcattggcaaacctccatacccatttgcctagtaaggttagtttaaagcatttcacctcctaattcccaatccaacatacttcttatgtttccaaacaattctccaactcattaaatgcattttccttccttctaggtggctaccccacagaaaatcttcccccctttgcacccctcccccccacattttttttttaattttttttatttcgttaaatctaatcctcactcttctgggaattggaaaaaaaaaggacatgaagtaagttggaggactcaataaggcactctttaagagatttaatccactacccctctcttttccttaaacatattgcttctttcaagggtccactcttttttttgaatctctccaataccaagtccagcacaacatgggaatgaattgcccctcgaggcaaagcaagatatgaggtaggaagactcctaaccttgcatccgaatagagcagccatttgtccacccccaccacctcttccataggcatgatctcacttttttgtaagtttaccttcaagtttggtacaagctttaaatagacaacgatccatctctagtatatctcatggttgcaaaaaataagtatgtcatctgcaaacagtaaatcacagctattcatctgttctccctctctgccctcttaacttaaaaaacctcttttgaatctaccttgctttagtttggcaatgaggcaattgagggcctccatgattagcacaaacagataaagaagggaggataaccttgtttcaacacttcaaaactctaaaagaaatatgtgggagtgtcattaactaggaccaacaatctcacaattttttttttattagaaacaaaatttaatgattagtattttgaagtaatgtgaagggtgagaaatccttcccacaaatacaaacttttgatcaaaagaacaggtaaatgtgatctcttatataccacccaaaactgtattgagcatatgtggttttgttgctcttttaaccctttatttatatactgaattccaatttagctgaataacagtaagaggagtgcccttgaaagctgaaattattgaggcccaaaaagaggaataaaggtggattaagttccatatggtctctgtacttctccatttattctaaatgatccttgcatttcttgcactctatactacccaaatcaatggatatgtagaaatgagcccacttgctccatctataactaaaacccatcttttctttaacatgtgaccctttttgttattcctatgctggacctgtgagactgaaaaaaaatcaaaaatatttcctatggggataaggggcttaagagaaaaagtctcatctagtgacttggctaacgattagcaaggataaaaagagggggttggggggggggtctaggcattaaggatttgtgcttctttgttttgtcacttgtatacttctagtgtactatgcttgccttttcttcactggtgcctttaatatgtttttattcttatatgcctataaaaaaatgctttttccatatcaaacctccaaattaggcctgaacttgaacttcttttcctcaagtcaatgaccttaatagcaatcaaagcaacatctaggatttgtctccctcctaaaaggcattctaatacttggacactacctttttcagtctatttgctagaactttcactagaagtttataaagatggcctactagactaattggctgaaatttcttaatgtcgtcaacctcgcctttcttaggaataaagatacataaacatagcatttaggctgtgttcaacatattcctttgaatgcaattcctcaaaaagttgtataactccctttctactataggtcaacacaacttctaaaaagccatagtgaaatcattaaggtcaggtgctttatcacctctcatctctgataaagcagttaccaccttctcctttgaaaatgggatctctaacctttctctgtttgagctaacaacgcacctaaaggaatcctctgcaacatccagtctcctaatatgaggattctcaaacatagacttaaaataacaagaaaatccaacatttaatcatgtcttctcagcatgccagtctccattaactttgggtctgctaatataattgcaattctagtgtgcattagccatatcataaacgaatattgcattgttatccccttcctttagccaaagagcccttgatttttgcctccaggaaacttcttccaaaatggttaagtggttgtatgcatccttagccattttttgtttctttgtgtccttctatgataaaggtcccttcctttctcaactatctgaacatcttgtcttctccaatgtagcttctttcctaacaaatacattgccacagacctcttttccattttttaggtccgtcttcaaggcttgcagtttttttgagagcaggaaactaggagtgcacccaatttcatatttttccaccaatccttgatcatctccccaaacccttccacttttaactacatgtttcaaatctgaacaaagccttacctttcccaattcccccgaagtccaagaagattggagggtgatctgacaccagcctaggcattaatttctaggatacatgagaaaaatgctcttcccaattaccagaaaataggaaccgatccagctgagacttagaactgccatcctgaccactccaacaagtggcaagtccatgaactcgaaactcctatataaatccaaagaatcccttcatagctggacaaatccgactgcagttcctcttttcaatgggatagtgcacaacattaaagtcccctgcatatgcaccaaggctcttcccaaagccctttgacagagccttactcctcccacatctcccttctctccttttcacttagtgggccataaatattggagaacacccaactaaaacccatcttcacaatttctaaagaaagaggaaataaaataaaccccactgtgaatctgagacatttaagaaccctaaaatcccacatcaataaaacccctcctactgttccttagcatcatgagaaacctaatttaaacccttaacccacccctaagattcttattatcctagtagccattgcactgatcttagtgtcctaaaaataaactaggttctgcttcttcaccctgacaaaggatttgatcaccctccttttatctggatcatgtgagcctcttacattccaagatagaatatgaaacttcatttagaaatctctatcttagaccaaccttccacatccctgcttctttccctccattacccccatatttgacagggctaaacaattttctgagttccctttccttgaactggttttgccttcctcttcattgattaaattgagttactagactagagtcccttctttcctcaatctccattaggattcttagaatctctttttcatgttcttccacagagactcccacgttcttacaaaacaagagcattttttgttcagccatatggcaccagagcccctgacttcctttgccacttccaatgtcccctcggaagctgcctccccatcaagaaagactggtagctaaagaacatctgagtgagcttcccttgaaaaacctttatcacttttccttgggttgggtggttgtgttgggtttgaaatacaagtctttgttgtcaccaagcatccaaaataattctgatttttttttttttctgaatttttaggatttatttgcagtatttgggatatttatgaattatttgcaggctactggatcctcttttttatttatttatttattttttatttttttattttaaaaaaaaaagaaaaaaaaagaagaagaaaaactaggaaatgcaccttttttatttttctaatgaaaaagagaaatgggatacaaattagagttatccttcaagcagaaggagaggaaagagtaggaatgatgggatctccaaagccttgtgcactctacaatcatttgaaaaggttgaaaatcccctataaaagctcctaatgggaggttcaactcttttgctagctgatctgctaccctgttggcttttctaggcctctagtgaacaggaactctggtttgccagggtaaatccaaattttgtgtatttgagcattccatctccctctgatccttctgtatttggtgccacacatgattcaagttctcaatctcattttattcaaaatgatttagaaactataagttcttgcttaatgttgctaatttccttccttctgtgatcactttcacgataaaacctactgatttagctagtccctgcccttttgaagtgatttttatcgaagaaattcaaacaggtgtaaacttcgaagtagttgatatatctaaaagacatgacatgcaaaggttgcaaatatctgcatcatctacttgttggtgcgataccaaaaattttgtagatatatctatcatgcattaagatatttggttaatgtatttggagatgtacatatttgcatggtcaacctaataacacaaatttgttgctcctactccttccttactctgtcctgctcctgagcaagtttgaatcactacaggtgcttaaacttgggagaaaaaaaaacaaaaaaagtatgaataattgcagtttagtaatagttcatctgttatgtggaaatgttgtattcattttggaatgttgttttaccaggttggcaattatttagttgtatttttggaagtttttgttcagataaaccagaatttaacagttgtgatatggaggcactgtatcagagactgccaaaaatgtgacagttttcttctttcaatttctaaaactattgcctaactgagagttataactctggatcttatatgatcatgtcatagaactctctgaatgatgcccttttgttattcgttcttatttttcctgatgcagggggcacaacttagaaagcacattg

SEQ ID NO: 13447 - DNA, 3138 bp, Vitis vinifera
  Intron number 2 from transcript GSVIVT01023998001 (locus G SVIVG01023998001) derived from phytozome v7.0 (chr-ID chr3 ; pos 1831487 to 1834624 reverse strand)
aattcttctcgagagctggcaaggtctgtacttgttttaatattgggtgacatggcttgtgatcttcaatatttatttcacagttagtactaggcttcatcccctttggatgcagtaatatacatactctagtacttatgtcattaattatttgccttactcttaatttatatacgtgtttgtgtattatgaattaatttcacaatgcagttggactcaaaaagaaatccctaaattttggaatgtcttcagagtactggagcttcatatatgaatttgatactctcattcatgattcagattatttgtatcagactaggttctttgttggtatttatgaatgtgagccctggtagtgtggttcagtttcaggtaaaaaacttagacatggagcaaataatgctagaatgctccctaaaaatcataggaaaaccaaaaaattaattgtgaatttataaaattaataaaacgccacatgtgtttcagaatgccattttcgagtgatttatgatcctattacatgtcatcatctggtattatatagccaatttgattaacaaatacaattaatagtatgtgtctttttagcctttgaggtctacctcaaatggtaaggagttgggctggggatttaggaggggttcaaggattgggtcccaatagggaccaaaaagatttttttttagtattggacattaagttgcaaaacatttatagaaagtaacaaaatgacgaagaacattacaaagcatggaattacaattatttcatactacatacccgatatacatcctttcttgtgtctacatcctgtatacataaggtgcatccccttttcttggcgctcttttaatagattgcttggtttgctttccaaaaaaacagccgctcttgcaaatgctacttaatatttaagaattaactgcaagacatgataccaaaagacaactataagcatgaaatatattttttttgattagtaaatgagatttgtattaaaaagtgccaaaaagggcgcaccaaagtacacacgatgtatacaatggcagccagctataaacatgaaatatattaataaatccatgcaaataaaccaagcgcaaacacttaagtaccaaaaaaagcaaatgctgaatgtagtcccaaaatacagctataagcatgaagctgccgatcaccctctcgtccacagtcctagagtgatcagcatttgaaatctagatgtgaaaatatattttgtacttatgtctgcaatagatgatttatgcatctgttatgtacaaagtttacatgacgtttaagtaatgaactaatgaataattatcctaccataaatttttttattacctatcaaaaaataaaaaataaaaactagaattagctttttaatagtggcctagtggggattaaaaaccaaaaatagtaacttaactactgaacatagtgttgaagacaacacttgtgatagagaggaaggttaagtaacaatcaagatttgaagaatgaccaactctacaggactagccccatgttgagtggcaatggagctggacatctggattgttaccactggttcaacttctgtggctgtagaaggttgaaaatagagaacattagcaaaaaattataactatatatttatatatatttttcaatccttagaatattatcctgtggaaaaaattgccattatcatgtccaacatatgaatttatagaaatcaggtggtatttaggaagaaccatcccaacttctttcttgttaatgagaaagctatgattaacttccaaaatctgcaaggttgtttgattgattcttttattcagaatgaaggacgtagtgtccttcgagtggttgaaaaatggattcgatggattcctccaatagatgaaaaatttaagctaaattttgatgaattaaagatgggaaataaaagtgcttccagaggagtgatcaacgctctaatggaattattaaagtaactgcaaatgggcatctaggcagtgcatcaataactgttgtagaatgtatgacttcaagagatgagatgctagccactagaaacaatggatcccttaatctgaatattcaaggtgattataaaatagtgatagattgctatgatagaaaggataacattcccaattctagtaagatattaactgggggtctttggaagttaactcaagagttaaatatttataaatgttatcatagttatagggaagcgaatagaacaacagattttttagctaataaaggtatttgcaaagtagtatctatgatttagaagtcatatttccctagggatgttataaaatttggatttgaaggttgctttggatctccttttgattttttttgatagataaaaaggtaaatatcttaaaaagggctgccaaaagagtgactcaaggtatacaaatcatttacaccaaccgccaagcggcagcaccaaaagccatagctacaatataggaatggctaaaacaacgccactctccctcaacaagatcccaaccaatcatagaagctaatgagagttgaaggagcatcatttataaacatcttagttgaaagagcttatattgtgtttattttaaattttatttttgggtaagaaaaatggggtagagaactctttttctcgttggagctttactatatgagatgaggctgaataatggcaaagaaaggaagacaaggttgcaaactagttttttaaaagaccttgggaatatgtacaaacaaaatatgtgttgtgatgcattcagcttgttggtgctgttcaactctgaagagacgaatcatgtacattccttgaaaccactgaagtgttttcttgttgtcagatcaaagctgagaacaggaattttggctgatttttcaattgtatattttctagatcatatcaacttttcatgcaatttgttttgcatgaacatgcatgcatgtgtactaatgcctgggtgcatgtccaacctgcctgttctggtgcaattgcaatgatgatatagtacctttcatggaggatcatttttctgcaagctgattctttttgtttccccccctccaaaacttactatgatttttcattaattttgctaacacctttcaatcacaaagttcaggtacgag

SEQ ID NO: 13448 - DNA, 26271 bp, Vitis vinifera
  Intron number 7 from transcript GSVIVT01030782001 (locus G SVIVG01030782001) derived from phytozome v7.0 (chr-ID chr1 4; pos 16043517 to 16069787 reverse strand)
aaggcactccagaggaggtagcttcttcagatcctgtttttaaattcgttagaagattgaatgagactttttttttccttgggaggatttctcatcctttttttttccttgcttttccttttgctaatgaattctttctgctccttatcttagaaaatcctttaccaaagcaaaaagtaaataaataaataaataaataaataaataaataaataaataaataaataatataaacaaaagaaaaatctctaaattgttgtactcctaacaattacagaggatgaaatctgctcttcaataaatggaagggttattgccttgtggatcttctgtagctgtgggctgcttctttgcatggagatccatgttaggtaactaggatgcagtggatgtaagagggaagcctattctggtgtgttagggggtttcttacctcttgagttattatccagtcttgtgagaggttttacttgtttatttaattaattattttttatgggatctgattccttcagtgttgcttcttttccttcttccatatttttgtatctcttggaaggatctctcttctttctctgtgctttttcatctctattagtaaacttttgttttctataaaagaaaaataaaaatgaaatataatataacaggctgggtgcccataactttatctttgaagttgggcccccgtggttttcatatctgttgacccatcttagtatgtggataaaacttgcaagtttcagcatgtgtttccaaagtgagaagattagcgggaaggtagagaagaaaatataaagagaagggaaatgaagaagagcaaaaaattgtgaagcttgcctagtttcacatgggttggaaccttgggttctgttgagggcttgcttttctgcttgggaagctgcatgagtaaggatcttgatgttggaccaactcaaaaagggggatgaaagttgctgaatagatgctgtgtaagggagaattaatcacatcttgcttctttgtacgaaagcagtgatcttgtggtggttgttttacgtcctatttggcataaagtgggtgatgcattccttggtaagaagtgccattttgaggttgcatatggatcctttgttggaaagaagaggaagcaagctttgagagaaatttgtagtttgaaaggtgtgagatagtaaggagaggttacttggaaggaaattagtcaactactagagctatgggttgttttttgtatattctcatatggtactttattattgtatagatttacatagtacttcggatgctttagcatactttttgattactttgttgtattttggggggattcctcatccttcttttgtatttctttatccttaatttaatacatctaattgtttatgataaaataaaaaagcttggagacaaaattctttgtgcttgcttaggaccatttggaaggagaggaataggaaaacatctgaaaatactaaaaaaacagatcaagcaatcaaacaatcccttatgtataatttctttggagtcggttaaagtgtacataggagattctataatgtctggtggatttaattgattggctgagctctaaatagagagagggagttgttcttgtgtctctcacctctttgtttggtttcttggtgcttttgtatacgctacgtcttcttttgcatgcgctattgttaggcacttttaatatttttgatctttgcctatcagaaaaaaaaaagaagcttttgtattattctcactatgtttattctcattgtgatcccaatttagatttcgtttctcaatacgagcagattttaccttcaaggtctaaaatcattagaggagagtatacccaaactaaatcgagtcccaaactttctcactttgcatcctaaggagaactttcattttaagtttctagtgagtataattgtttcctctgaaagcaagtggatgtgctatagatgtgccttcttgttgagattccattttaagacataatttggattaattttaaaattagatttgaaaatcagttttgagaaataaagctactctaatttcaaattgaaaaaccttgtattatctcttgtgataaaccttactaagatctccaatgcaaaattagtttatatgcccattaacctgggacagagcaactttaattacaccaattcaggtcttaacacagctagcaaatccactatagtctaagattgaattgtatcaatcatcttaccaaatctgagtctggagatcatcactgataatcacactccttgtgttgtatctctctgcaactgatcttgatggaaggatatttgatgtcttaacaaacccatctgaaatcacaccaaacctgaaccggtatctctccaatatagaagcgtctcactttggattctgagctgatctcacattaaccaatcctcctctgaattatttccggtagccaattctgatatctctttgaaattccttaaaatgatgggaagaagcaccagcctttaaccttttaaaataaggaagaaaacatagcagaaacgcttttctggttttaagtacgctagtagtgaactcctatgttctgtagtggtgaactggactccagagagatactaaaaaaatcaaccttctgtttcagggttggttggtagtggactatgctgcagacaatctactctctttgccaatattgctgatagcgcgccccactctagaggctttattcctatttttaagttggctggttgtgaattgtcattttggctagtagtgaaggttcacctagagttcaattttgacacttttcacgacgtttgacctatagatcaagacacttggactaccttggggctttttaaaggctctctctaaagtctctaaaatggtgaaccaaagcaatctggtattgttttaagtcttgggacaaaaccaactcttaattttggctttgttatcaatgtgatgaacttgtgttttgactgatcatcgagagtttggtcttcatgtgatgatataatcatatgattgatcttgaggagtcataatgatgaaacattatcctaaaagcttacattgtaaatgaatgttgttatcatgaaattgccgacagatgatattgaaagctgaaagctagaattaggattttgaataattcatctacattgatttcattgatttacaacctatttatacaagtacagtgaaggaaaaaaggaaatatgctaaggaaataacaacaaataaaggaaataggtaaaggaaataaaaacaaattcctgcataccacaagtatacaaatctgatttgattttctattcacatgattttagtccataatcaaaagaaatattctcgactttccaacactccccctcaagctggtgcataaatattattcattcccagcttgtctattataggattaaacatggtgttttacgagtctttttgtgaagacatcttctagttgttgtttagtagacacaaaaagagttacaatctatccggtctcaattttctcccttatgaagtgcctgtccacctccacatgcttagtcctatcttgttggatttggttgtgagcaacatagatagcagccttattgtcacaatggatagttgctggccctttaggctccaatcatagctttttaagccataatacttcacaaattccttgggctaatgcacgaaattcagctttagcgcttgcttgtgttacaataggttgcttcttgcttcttcaagtaacaaagttacctcccacaaaagtacaatagcctgtcgtcaatctttgtcggttgattgaaccgacctaatttgcatccatgtaagcttccacaagaagatgatcattcttcttaaaaaatagacccttacttggggtggctttaaggtagcttagaatccttttaactgctttcagatgagactttagtggagagtgcatatattggctaacaacactaattgcataggctattatcaagttgaaaagatatttttttattcaacctgatttttccactccatacaactctaatttatagagttacaagatacgtaaaacagaagccagagataacctcttagctgacttgaaatataggaatggaaaaataaatttaaaaataatcaacctaattagataagatagtttcctaacaaacaaatctaatttgattttttagtaaataacacaaatttaaactaactaaaaaatgtactctttcaacactccccctcacgttggtgaatagatatctatcattcccaacttgtttatcaaatcttcaaaactttgtctggatagtcctttggtgagtatatctcctatttgttgcgtggttggtacataagtcatgcagatcactccattttcaatcttttccttgatgaaatgcttatccacctctacatgctttgtgcggtcatggtgaactcgattgtgggcgatgccaatcacaactttgttatcacaaaaaagcttcataggtttcacacttagtatcttgagttcttccaacagtctttgaagccagattagctcacatgttccttgtgctagtgctctatattcaacttttgcactacttcgggtcacaacattttgcttcttgctcctccatgtgattaggtttccccatacaaaagtgcaatatcctattgttgactttctatcattaacataacctgtccagtttgtatttgtataagcctccacaccccttttctcatgtcatgcatatactaactaactaaactcactgcaaaagctatgttaggtcttgtgtgagcaaagtatattagttttccaaccaatctctggtatctccccctatctattggattacctatctttattcttagcttaccatcccattctataggtgtctcagatggtttgcaaccaagcatgcttgtttccttcaataagtcaattatgtatttcttttgggatatagaaatcccctttttttgttctaaccacttccatgcctaagaagtaccatagttgacctagatccttgatctcaaattcttgtgctaaaaatccttttagtcgtgctaattcctccaagtcatctcctgtaaggatattatcatctacatacactattagaataaccactttcccattttaagagtgcttgaagaataatgtattatttgtctggcactagttgtatccatatttctttacaaactttgtgaagcgatcaaaccaagctcttggtgactgcttcaacccatagagagattttctcaacctacatacttttctaccttcataacccccatcaaatcccgagggtaagtccatatacacttcctcatcaagttccccattaaggaaaacattcttcatgtccatttgatgaagtggccaatcgaggtttgtagctagtgataacagtactcttaacggtattgagcttagcaactggagtgaaggtcattgtaatccacaccaaaggtttgggtcaaacctttggccactagtcgagccttgtatctttctatattgccatctgatttgtacttgatggtgaacacccatttgcagcccactaggtatttcccttttggtagctccacaatgtcccaagtatcattcttttttaaggcttacatctcttccataattgcaactttccactttggaatttttagagcttcatgaatgcttataggtacttctacatttgtaattttttcacttagagcccaatatgatgaagataggttgctgtaggacacatggttggatattggatgcttcgtgcatgatctgatacctttcctgactgcaattggcatgtccaagtcattttgttgttgcaatatatcttcttgttgactgcttgggaaacctgagattctttcacatttgggatttctttctagttcagtctcttgacaatgctcttgaagtgtgacaacaggtacttcttgaggagcctgatgctttgctttttgtgaataaacacagaggttaggttggtgattaagcctaggcagatctcctcatgtttccaactttggttctatatttttcataattgttagtgacataattgacttagctggaggtttggacagatttggtgactcgcttgagaccggaagaggaatagttgagaaatcccaaagacaatcttcacttaagttctccccctgaagagaaggatttggatagtatggttggttctcaaagaaagtagcattcctggtaacaaacagttttctagttttaggacagtagcagttgtattctttttggcatggtgaatatccgaggaaaaggcattttgtggcttggggatcaagcttggtattagtggaggcatgagcaaagacaatgcaaccaaaggtttttatgggaagattttggattaatagtgtgtgaggatgggtttggagtaggatttgtaagggagtttgacattggagaaccctagatggaagacaatttataagataagaggcagtgacgatgacttctccccaaaataacttagggacattatttgtgaacattatgacacatacaacttctagtaaatgtctattttttcatttagctatgccattctgttgttgggttttgacacaagtgctttgatgaacaattccattatttttaaggtaggtcccaaggatagagttaaagtattcacgacttgacatcatatttttccttaagtaggaagacccaacataggcatgtgtgataatctataaaggtgatgaaccatctagcccctgtgatattatttacttttgaaggtccccaaatgtcactatgaatcattgaaaacggtttggacattctataaggtcgaatgggatatataacttgtgtatactttgctaattgacatatctcacactaaaataaatttggatctttattttgaaataacgagggaaatagtctttttagataagagaagctaggatgccctagtcttttatgccataacataatcttatttgaaacagaaatggaaatcggaacaaatccactacctagagtttgagtttgtttattcacgacttgtttgtgatcctctaagtggtacaaaccatcacattccttggcacttccaatcatcctccccaaatgcaaatcctgaaactcacaataagaagggaaaaatttcaccacacactgcaaatccctagttaatttgctaattgaaaccaaattacaactgagattaggaacatggagaactgagtgtagtgttctattaggtgaaatggacactattcctttgctaaccacagatgacatggagccatcaacaattcgaatcttaaaagtcctagggcatagtgcataattagtgaacaattgctgattttgtggttagggcagataataagctaccttttcgggttatggaacaagagggagtaggactaggttaagtattgtgttgttggaattgtgccagcatgaaaagttgttgcagttctaccatctgcacagtggttaaaacagaatttccttgtggcttgttgtcctctactgtggcttggtatcctcaaccatcaccttgctgccttggttgccaattttctagtttcccatgtaatttccagcaattttcttgactatggttagattgttgacaatgatcacaccatacacgattattctgttggcctccacaatggtcaggagttgaacaccgctaaccagaatttaaatgctactctccataatttggacgttgctctctataggctgaactactatgttttgtgacaagagtagagttttgtagcaaggatttggctaatggatccttgaaggttttaagcattactcgctttctactttcttcccgtctaattttagcaaaggcatcttgaatccctggcaagggctttgttcccaaaatacgtccacggaccttatctaggtctttgttaagaccatggagaaaaagcaaccaacatttctttctctagtttcttggtatatcttacactataatcagggcaaaccctagtgttttcatcaaacaaatccaaaatccaactcctgccataaaccaatcaaggtattgtaataatctattaccgtggaatcaccttgcttcttctccttgagttcagattgtagttcaaagagttgagagacattgccaagatccgagtacataaccttggcagtgtcccaaatctctttcgtcgtcctgtaagagagataataccgccttattttaggttccatcgagttgactagccaaaccatcaccatggaattcttggattcccatgtgagatagccatgttcagttgctgctggtttttgagagtctcctattaagtagcctagctgtcccttaccgcgaatgacgagaaggacagattaggacctgtccaaataattggtcccatttaatttatgttgggttatctgtagggtgtgagattcatcaatattgctgggagaaacaaagttggatggttgggtaattgtctcagaggatacttcagaggttccgtcacaagcatggccagtcattgctgttttaaccatggataataattttttttttaggaaattaaagagtgctttgataccatgttgagttgaaaagatgtttttttattcaacctgatttttccactacataaaactctaatttatagagttacaagatacttaaaacagaagccgaagataacctcttggcttacctgaaatctaagaacagaaaaataaattttaaaataaacaacctgatcagataagatagttgcctaacaaacaaatgacttgataacttgctgaataaatattctcatatatctctaggggtatttatacaaaatagacaaggctatttaggatagccaactatacaaaataatcaacaactatatagaataaatcacaactatttgacaactatttttttttttttttgatagataaatcatagaaaatttattagaagaagggagcaagaaggcaacccaaagcatacaaggagtatacacgagaaacccctcgacagaaaaacacaaaaaagcaaacactcaccaaccctcaattagaacccaaccaatcaacaaagttaattatggaacggggtaatccatctaaacaagacttagaccaagagaaaagattacaaacaaaggagtttttcaatctttggattgacaaagcctcattataaaaaactatcttatttctttctttccaaatcgtccaaaataaacagacaggagctgcccgccaagtctttccacgcttcttgtccacaaaggaagcggaccaaccaaggagagtgtctctaaccataagcggaaggactcaattaacaccaaacaacgaaaacacaagattccacaataccctcgccttggggcagtgaataaggatgtggtttattgtctcctcttcatcacaacacaagaagcacctgtttgctaaaatccagcccctccttttgagttgatcttgggttagaaccttcccccaagaagcttcccaagcaaaaaaacccacctttgtaggcacacaagggctccaaatgattctccaaggaaacgggactacaccactagaatcaagagtattgtaaagggattttacagagaaaatcccattcttagaagcattccacaacactctatcctccatcccaacaaaaagcctctttccttaaaggaacgaaaggagactcaccaccgcctccatctcccaatcattaaagggtctagagaaacaaggataccatccccccgcatcccccatagagtcccaacaatccgctacccacgcattttgagagaccgcaaaggcaaacaaagaaggaaaagcctcacaaaggggaatgtttccacaccaaatgtccttccaaaatttcacccttctaccatcccctacagtgaaagaaacgtttttaaacatcaggacgccttcctttctaatttccttccaaaaccccaccccatagccctccctaacctcacgagaaatccaccctccaccttcttccccatacttcctactgataataagcttccaaaaggactctctttcagccacaaagcgccaattccatttacacaacagggccctattgagaatagaaaaatttctaatccctaaaccacccttcattttatgagaaatacaaacggttgtatacaactgtacatcatagttggacataactgtattgacaattggacgcaattgtatcgacaattggacgcaattgtatcgacaattggacgcaattgtatcgacaattggatgcaactgtatcgacaattggacgcaattgtattgacaaccgactctcctcctcaagttggtgcatagatatcacacatgcccaacttgaataatgatacataaaatggaccactagtaacaacatgagttatcatatataccaactgatctgcactcttgatgtagtgaacctttatcatgctagactctaggttatccttgatgtaattcttatcaagttcaaaatgcttagtttgattgtgttgtaccagattatttgcaatatcaatagttgttgtgttatcacaaaagagcaccataggtttctttggagcaaacccaagctcgcttaagaggattcttagccaagtaagtttcgtagttgcatgatgaagcgcatggtattcaacttctgcactagacaatgaaaccacattttgtttcttactcctccaaatcaccaaatttccttttacaaatgaaacatatcctaaaatagactttctattcaatttagatccgaaaaagttagagtttgcgtaatcctcaatatctagatgtttgtgtttggagaacataatactcaatgatgaaaatgtcggtgattacggatatatcggtacttcgattttacggatatgtcaaagatatattgacggatattttagaaaatttttttgataggcctaaatttgattaaaacttgtgaaaatattgagaaaaatctaaaaatgatatgataaacaataataaacattttaaagttgttttataaaaaaaatgatatatgcatatgatataattaatcatatttaataataatatcgtatgcatcgataaaaaatatgaaatatatatatattattaaattacattaaatattattcgacaataatattatgatatttgattataatatatctaattttaaaattataatccatttaatttcaattgtattaaatgatataaaataaatgatgatatatgtataaatttttttagtatttatatttaattaatatataaatgatataaaaaaattgttaagaaaattataatgacattttttatatttttagtaattaattaaatgaaatttaaaaataaaataattagaattaatttgtttattaaactattcttttaatattttgttttatgatagttttattatatatttatctggtgctcatatattaacaaatgacaagttagccaagtggtcgattggggttgtttggttttggtttgggctcaagtttgagccctagcgcctgcaccgcaatttgatattttggagggttcgaccgtttgacggcttgttgaccaggccactgcgtgttgactgaactgaaatatcggtaaaaacgccgataaatcaataaaaatctgatatttcagcgattttcaccaattttttccgatattttttccccttttttgcaccgtccctcgccgaaacatgaaattttggcaattttttttcgaaattttcatccatgataataccttcgattggagaggacttcagataggccaggatacgatttactacattcatgtgtcggtcacttggatcatgtatgaattgacttacaacactaactgcatatgacaagtcaggtctagtgtgggtcaaatagattaatttccccactagtctttgatatctttgtttgtttgttggaatctgattagggtagatggacaaactatgatttatctcaatgagagtatctacaaatttgcaagcggagttaccggtttcaaccaagagatttaatgtatacttccgttgtgagaggaagagtctttgcttggtccgagataccttaatacccaagaaatattttagaggacccaagtccttcatttcaaattccttcgctagatagctttgaagcttctctatttttgtagagttactacttgtaacaatcatgtcatcaacataaacaataaacaaagtaatatcatcaccatctctcttatagaatagagtgtgatctgccatcgcctgtttgaaaccatactccttcatcgagtagcttaacttgccaaaccatgcccttggtgactgcttcaatccatacaaagccttttttagtttgcataccttgcctccttttggtgtaaacctcggaggggggtccatgtacaccttctctaatagatcaccatggagaaagacattttttacatcaaattgtcttaatggctagtccaaattgaccgtaagagaaagtatgactttaatggtgttcatcttggccataggggcaaaggtctcttggtaatcaattccataagtcctggtgtatcccttgacaacccgtctagctttgcacctatcaattatcccatctgatttgtactttattgaaaacacccacttacatcccactatcttctttccttgagggagctcgaccatctccctagcagagtcttttggagaggcttcatttcttctaccatagcaaacttccacttaggatcttcaaaggcttcttgaaaatgattaggaatggacatagaggacaactgaagagcaaaagcaaggtgagtcttagatagacgatgataggagacataatcagaaatgggatagacaatattagaagatgattttgagaaacccaacttattaggttctttaagatcatgaagaggatatctcctaccttgctcgccaacttgtggattcaaggtggcattgtctaatgttaaaggtgaagaagcatgtatctcaggattagtcttggaggagtcatctaatggcatggcaatatcattaagaggagtattggagtctagagggggtacgacattagcaactttgcccacccttgtataaacttgttggaataatctggttggtctttcatcccttctttcctcatattcaaattcaagatcctcctccttaccctaagtcagttgaatcctacccctggcctgaaatccatacccttttctcttctaaccataacttttcctcttccttactattaatctccctctaaagaggaaccaaagacacattccctgaaaaataagactccccttcacagaattgaacatccatggaggcatagtatttgcctatgggaggatgaaagcatttatagcccttttgggaattagattaagcaagaaaaatacatttaagagcacaaggatctagcttatccctttgatgagagtgtatatgagcataacgtacacaaccaaaaactttaggacaaagattcaaagtagaaggaatagagttaaaccgtgataacattcacaaaggagtttgataatcaatgacacgagcagacattcggttgatgagaaagacaacagtcatgacaacctcaacccaaaaacgttttggaacatgcatagaaaagcataaagctcgggctaccaaaaaaatgtggcggtttttacactctactatgctgttctgttgtggcgtgtttgtacatgttgtttggtggaggattccattttatttgagaaaaatcagcaagggattgattcacaaactcacaaccattgtcagagtgaaaggccttaacctgggtattaaattgtgtgataatcattttggaaaatcgaggaatgacatatagaacatcattcttagacttaagcagatttacccaactcaccctagtacagtcatcaataaaagacacaaagtatttatgatccaaagcagaaagagtagaaaaaggaccccaaacatttgtaaaaacatggataaaaggaattggacttttattgagacttgttttgaaaggcacatgatgattcttagcataaatgcattgattgacaatgccataaaagaattttttctttattagacgtctcttttgccacttgaaaaacacggttagattcaaattgtaactgccttgccccctccaattagtaaagacctcccctttcctcaacaatgtcaatcgtcatcttcgtaagattgtcctaaaacacatagtgagtagaattgaaggttacagaacaattaagatgtttggtaatcctgctaatggaaagaagactattagagagattaggcacaagatagaggacatggtgagtgtggaggaaagtgagacattcccggctcttgaattcggcatcagagtcccatgagcaatttgaacaaacttaataggtgagggcattagagagtcaaataaggaaagaataactagtcatatgatcagtgacccttgaatcaataacccaagtgttaaaggcaacaaaaataagggcgaaatcagaattaccttcttgagaagataatcaagaaacctaagaagtagaagcaggaggagtagtgtcagtaatagcaacctgagctgattgttctttctttcatcttgcttaagcttgtaccactccggaaccatgcttcttctagcaaacatctgctatatgtttggtgctgttgcagtgagtgcagaagcgagaagaggagtcagtaggagtaaaagatgttggccgtgtgctattcttatggatggccattgcggaagcctcagagtgatattctgttctcatggtgacctgcctttgtgcttcatgacggactaatgaataggcttcctttagacttggtaaagcagaggtggccaaaatacaaccactaacttgatccaaactgtgatcaagacctgcatgaaatatgtaaacctgatccttagcagcatgcttcctttgtttctcaatattagctacatgtcatatcattgggcctttgataatcaaacttcatgaatattgagtttaactcattgtggtattttgtaagaggacaatcaccttagtgtgattgaaaggatttcatatacttgagaagagtcaaagacatcaagatagctcctcttgactgcatcccaaacctccttagccgttccacattgcataaagtgtgacatcagctggtcagtcatggaattaatgagccaagactggactaaagcgtcttcggcgttccattcatcatagtttgaatcatcctctacgggtgcaacatttcttcttgtgatatgtcccttcttctttctgccagcaatatgcatctccaaaatttgagaccaaacacgataattagtaccatccaacttaatataaattgttggagaggcagtctcatgaatggtcatcatggatgaattcttgctattagaaatacctgctttttctattagaaatacctacttttgctattagaaatacctacttttgctattagaaatacctacttttgtttttgtagacattatatggtaacgaagaaggtgaaaagaaggaagaagttttgaataggcagcaaccgaaattctctactttcactctgataccaacttgataaattgatgaatgaatattattatatatctctaggggtatttatataggatacacaaggctattttaggatagccaactatacaaaataatcgacaactatacaaaataaatcacaactatttgacaactatacaaacggttgtacacagctgtacatcacaactggacacagttgtacatagctgtaccgacagctggacgcaattgtaccaacaattgactttgatcttttattaaataacacgaatttaaactaattaaaaaacataatatttcaacaactataattagccaagtatgggataaataaataagccttccaacaagtctttagtacctacctttatcaattggatctcccttaatctataggtgtaatagcaggtttgcatcctgtcatcccagtttcttctaagagatcaagtacatactttatctagcagacaactatgtcatgcttggttcttgttccttccatgttgagaaaatatctcaaagtccccaaatcttttatctcaatctcttttgccaaaagcatctttaaactttgggtttcctccaaatcatcacctgtgacaattatatcattagtatggacaatgagaatggtcattttcatgagtggtgggcatttaaaaatagtgtggtctccttggctttgtgaaaaggcatatttttttaatgacttagtaaatcgctcaaatcaggccctaggggattgtttaagaccatataatgaattgtttagtttgcacaccctcttattgttggatatcacttcaaatccaggtggaaaatccatatacacttcctctaggtttccatgcaaaaaggcatttttaacattgaattggaataagttccaattaagattagctactagagataaaagtattctaaccaaattcatcttagccactggagcaaatgtttcttggtaatcaatatgaagggtttgtgtgtatcccctagttgctaatctcgccttgtatctctcaatggagccattagctttatatttgatcgtgaaacccatttgcatcccacaaatttctttccactagggaaatcaaccattcctaagtttcattcttatggagtgctctcatttcctcaaacacgacatccctccatttaggatttcctagaatttctattatattttttgggatgatttctgatgacaaggcagtggtaaaggctttatggttatggccaagatgatggtaggagacaaaataggctaggagatatttagtgcaggctctaacacctttcctattggcaatggagttgaaggattgagaataatacctttctctagagatggggattgacaatagggaagagaggtaggatttataacattctcccttcttcttcttgagtaaactaagtgagttttttgaattccaacaacttctcattcatttcgttattgctattattctatggagtcacaggctcaattttagggttagtgatgagatcatatatggtagggtaaactggactaggtagggataaagacgatgataagtcctcaactcctaaattccccccggaagagttgtttgagaaaactagggaaggttttcaaaaacattgacatccattgtgatttattttttcttgattggtggatgaaaacacttaaaacctttttgagttggagaattacccaagaaaagacacttaagagctcttggatccaatttgggcctctctctactgtgaacatgaacataagcaacatacttaaatatttttagtggaaacattgtttttagcaaatcaattggagccttcatatcaagaattttttaaggcatgcaattgatcaaatatgtggctgttagaacaacatcactctaatagatttttgggacattttttgtgaacgttagagctcttcccacttctaaaagatgtctattctttctctcggccaccccattttgttgaggtgtgtcattacacgaagaaaaatgaacaatgccattttcaagaagataagtccctaaaattgaattgaaatactcttttccattatcaattatgagagcttgtacttttgcttgaaaatgagtttcaatcattttatgaaatttttttaataaggggttaactttagattttccttttagcaagtaaatccatgtggttcttgtgcaatcatcaataaaacttacaaaccatttaaaatcggaataggatggagttgtggggaaccccaaacatcattatgaatgatagcaaaatgaacttttgatcttttattactcaaaggatgtggaacacaatgactcttggacatctcgtaaatttgtcattgaaaatatgaaggttcatttccaacaaatagtttggaaacattaatttaagagacattaaatttggatgtccaaaccgaaactgcagcaaccatatctctgcttttttattttcaaaagctttagaaaccaaaacccttgcattctatttcactttttttttgataggaaacgacaaagagatatattgatagaaaaaaagaagtacaagagaaggatgaaaaatctttccaccaaagaaaactaaactacaagaatacaaaaacaagaaagtacacaacaaaacaagctaacactctagattagaccaatccttaggaattacacaccgctgaccagtcaagttgtaacacattaaggggactctccttaaaaaccttggaatagaaagcccaaagagaagcaaggaaaaaaaatagaatcccaaagatactctgaattccttgctttatcctaaaaaatcctcgtgtttttttcccgccacacaacccaaattaaagcgatgctcgtagcttgccacaaaactatccccttcttagatgaaccaaaaccattaaatttgatggacattatgtcaaagatgctcctcggggggacccagtccattttggctaattgaaataatctgtgccacaaccccatcgttaaagagcaatgtaggaaaagatgatctgttgattccccatgcttcatgcacagaatacatatattacgactaagagctttgtagggtcttctcaattgtagcatgtcattagtatttaccttcttgtgtgccactaactagacaaaggacttcactttgaaagggacttgagaattccaaacgaatttaaaaggaaaaatcggaggagaaccagaaaattgggataaggttagaaagaaagatttgactgaaaaaagccctgaagaagataaaggccaggatttggcatttgaaaccgaaggtgatagatgcaaaccatcaagtgaccccatgaagtcttctaaatcttctatctcagaatctgaaaggttacggcgaaaattaaagttccaagagaaaggacgagtagaaccgagaattgaaaaaataagaatatttttatccaagactactctaaatagtcttggatattgggatcccaaagattggtccctcccaccacaaatcttcccagaatcgaattttttccccatttcctaccacaaactgagtaaacatggaaaactcctgaaagactcatgcaatagcctttcaaggacaacaatgtgaccatctgactaaagtgttagcatcccaaccattagagtgtgatccataaatgcttcagatgacctgatgccatagagctgaaccctctctagggtacctccacaaccatttccctaagagagtgagattccttagagaaatcttcccaaatcccaatcccccttttgcctttggattacacactacatcccaactaactaaatgatctcttttaccttccccaatccctgaccataaaaaaatccctttgcaacctctcaatttttgcattctatttcagtttgggagttatgtaataaagtcctttctcctcaacattgccaatcttcttccccgtaatcaggtcttgaaaaacacaatgagttggataaaactttacacaacaattgagggattttgtgattttactgactaacaaaagattacaagcaatttttggaacatgaagaactaaattaagagtaattgatggagaacctgaaatggaaccttctccactaataggaataaatgaaccattaactaaaaaaccttaccatcatttgagtatagactataagaaaagaaatactttgactcattcatcatatgattagaggctcttgaatcaatgatccagggattagacgaaatatttttagatgcatgtaatgcataatcaatattagttgacttggcaaaataagaggaaatggagatccagattggcctaacatcttgtacaatagctgtagttgatccttattgaagggacttttatctgatgattgagaggttgttttaggttcaagatcatttgcaaagatcccttggaaagctttcttgaagggtgtcttgctccctttatcaccaagagataatttcccattcaacttctagcaagtctctcttgtatgccttggtttttggcagtaatcacaccaacaagtatccttctctccaaatttcttttgttactaagatttagagagattagaatgatttgggagcctccatcttgttcagtcttcaaagctgaggcttcttgggagattgtacctatcataatactccttcgaccttcctcggtattcacataagaaaacacatcactaagacaaggaataggttcttttccaaggagtctaccccttacctcatcaaattctagttttaggccgaccaaaaaatcaaacactcttgtcacattcctaaatttctgccaaggttgctgcatcttcgggagctaccatttcaaaatgttgaaggagatctagttcctgccacaattttttgtattagactgtcatagagtgattgctttgttttgtattatgaatagttgtcttcaagtcatagttgccggcaacatttcccttctttgaatagatctgagacacaacatcccacatccacacattcttagctgttgagagataaagagagggtttcccaatctctggttgcatagagttcaacaaccatggcatgaccattgaattttctacatcccatatcttgaatttaggatccaagtctttaggctctttgacagttccaagcacatatttcatcttccctctacttctcaggaaaagcatggtagattgggaccatgagaaaaaattctctccatttaattttcctgttgtaatttgaagtgtgggattttttaaaactggtagcaattttgggtggatttgaataggaactagacctggagttatttgagatctttgacattatcaatgaaaggaaaaaacaaattggcaataaaaatcagaaaaaacttcaatagaaaaatggcaatggaggccgagaagaataagagtttgccaaatttttttttggctttgattccatgaaagctgaaagctagaatgattcattcacaccaagtccattgatttacaacctatttatacaagctgtacagtgaaggaaaaaaggaaatatgttaaggaaataataaaaaataaaggaaataggctaaggaattaaaaacaaatttctataattactctaactttcccatcttataaatatacaaatctgaattgattttctattcaatccgatgattttagtccataattaaatcagaataaagtcaaaagaaatattctctactttccaacaaacattcacatttacaacaattaacctttcaattgcctcaacttctagttattccaaatggttgtaccctacttaaggtgtgtgtgcacgtaatatggctatgcacaacaaaatgttgcactttatgcaagttgttatgtgcaattcatgtgtccactcaagtaatgacgtggatgttcaatcctaatgaacacacaaagaattgaatttgcaatgttttcgtaattagatcggttattgaatcgaaaaagttaccaggtcatagtttaatggtcaaattgatggttgaatcgtggttgcattgggtttcagtataacatgataaatatattatcaaattaaaaatagttataagaagttaaaattatatatataaataattaaaaaacttaaaatatttcatctttttaccttaattactaccaatttaaatcatgataaggttacatataaatgtattaatattttttatttgttgaaataacaaaattataatatttacttattaagaagataaatcatatatcaaagagtgaaatataattttattgcttattttattaattttatatgaatttcattaatactataattttatgatttcgttattgggttttggtataaacatgcatgtgtaaaattctaagtagtaactagtcactatatattatatgtcattgtaactgatattacaattaagaaaaggacatagcccaactacttactacctcttcccttttagggagggcttgttacagcttgtttgaattttattaaaagaaaagcctgcccacgttaatatatatatcaatatatatatatatatatataacctcttaggaatgcggcttttacatggtcaaacatgcaagtcgattctatttgcaagaggttagataggtttttgttctcttctgagtgggattcttttttctctcaaaatattcaagaggcccttcctagatggacctctgaccatagcccaatttgcttggaaactaatccttttaaatgggggccgactccttttaggtttgagaatatgtggttgctccatcctgagtttaaagagaagtttagagattggtggcaagagtgtacggttgaaggttgggaaggtcacaagtttatgaggaaactaaagtttattaaatcaaagttgaaagagtggaatataatggtctttggagatttaagagagaggaaaaagcatattcttacagacttaggcagaattgatcgaattgaacaagaagggaatttgaatcttgatctggtttcggaaaggaccttaagaaggaaggagttagaggatttgttattgaaggaagaggtacaatggagacaaaaatctagggttaagtggattaaagaagggaattgcaactctaagttttttcacagagtggccactggaagaagaagcaggaagttcataaagtctctgatttctgagaggggggagactttaaataacattgagattatttctgaggagattgtaaatttctttgggaatctctattccaaacccgaaggtgattcttggaagattgaagggattgattgggcccctatttctgaagagagtgcaatttggttggatagactattttcggaagaggaggttcgaatggcagttttccaattgaataaggaaaaggcccctggccttgatggctttactatagcagtttatcaagactgttgggatgtgataaaagaggatcttatgagggtgttttttgagttccacactaaaggggtaataaatcaaagtacaaatgcgacattcattgctatggtgcctaagaaaagccaaacttttaaaatctcagattatagacctattagtttggttacaagtttatataagataattgctaaggtcttattagggcgtttacgcaaagttctacatgaaacaatctttggctctcaaggagcctttgtggaagggagacaaatattggatgcagtattgatagccaatgaagtggtggatgagaaaagaaagtcaggagaggaaggggtagtcttcaaaattgattttgagaaggcctatgatcatgtggattggggctttttagatcatgtgcttcaaaggaaggggttcagccagaaatggagatcttggatgaggggctgtttatcttcttctagttttgctatcctagttaatgggaatgcaaagggttgggttaaggcctctagaggtttgagatagggagatcctctttctcctttcctttttactctagtagcagatgttctaagtaggttgatgattagagctgaggaaactgggataactgagggtttccttgtggggagggataggactagagtgtccttgttacagtttgctgatgataccatattcttctctaaagcctctttggatcttcttcaaaaccttaagattatccttttggtttttgggcaagtatctggtttaaaaatcaacttagaaaaaagcacaatttcaggtattaacactaggcaggaggtgttgtctagtttggctttggttttggagtgcagagtgtcagagtgacctttgtcttatttaggccttcctttgggagggaacctaaagacaataggattttgggatccagtggttgagagaatttcgaggaggctggatgggtggaaaaaggcctatttgtctttgggagggaggattactttaattcagtcttgtctgtctcacatccctagctacttcctctccctctttaaaatccctgtatctatagcttcaaagattgagaagatgcaaagggatttctttggtctggggccggggaagggaagaaagatcacttaatcagatgggaggttgttagtagaccaagggagatgggaggtttgggctttgggaagacttctatgagaaatagtgccctcttagggaaatggctgtggaggttccctagagaaaggagcggtctttggcataaggttattgcgagtatatatgggacacatcctaatggatgggacaccaacatggtggttagatggtctcacagatgtccttggaaggctattgctcaagttttccaggagttctctctttttgtccgcctagtagtgggcaatggggagagaattcggttttgggaagatctttggtggggaaaccaaactttgtgttctcaatttgctgatctctacagagttatttctatgaaaaacctcactgtctcaaatgtccttggcaattccttaccattgtcttggaattttaactttcgccgcaatctaacggattcagaaattgatctccttcaaagattaatgtcctcccttaattctgtgcttctttccccttcttcatcagactcaagagtgtggtctttgtctttgtcaggctcgttttcaatgaaatcttttttctatgccttgtcaaaagtttcaaatcccttaatgctccttccagccaagtttttatggagctcaaaagtcccttcaaaggttaaggccctcgcttggttagtagcacatgggaaggtaaacactaatgacaagttgcaattgagaagaccctataaagccctctgtcctcaatggtgcattctttgcaaaggaaatggagagtcgattgaccacctttttcttcattgtcccgttaccattggactttggcacaggttgttcaatctagtaggtgcgatttgggtccctccaaggagccttgaggatatgttggttatttcttttaaaggcttggggaactcattaagaggtaagacactttggcaaattgcttgccttactttgatttgggtggtgtggcaagaaaggaacaataggatatttgaggataaagggagaacggaagagatgatttgggatttgatccggttttattcttctctatgggcttcttgtactgaagcttttagaggagttcctctaagcattctacaactcaattggattggggtttgcgtttcaagagtttgaagattgatggagtttcttttgtttttagagttttattgttgggtgtttttccttgatacttgtgtaggaaggacctctcatccttcccttggtttttttctctttcttttgtctctttttttctctcctgtatttgttcttttattagtataatattcttcgtttctgatcaaaaaaaataaaaataaaatatatatatatatatatatatatatatataaaatagagtcaactcatgggctcactcactttaaagagctggcaaaaagcagaagtttgaaatgaaaattggcactttgaaaagtggggtgaggtgaccttttaaaaagtgggccgcacaaggttacaacaaaaaaaaaaaaagaaaggaaaagaaggaatctctggtccagtctggcggttcaattctggtttaaaggtaaaatggtcgaaaatgcgaattgaactgggcatgtgattggtatgaggtttaactggtccaattagccggttcgatccgattttaagtggatgagtataaaaattgcagtttaaattgtgataactaatttaaagtggaaagtgcatctaaaaagtaaaaatttgtaaaatggctgtggtaaaagatctaagctgcttcacttcaaatgactttctgatttcttttgcccaggtttgcccatgctaatggttggatgaaattttaacatgaggctttacaaaatggttgtggcatttctttgatcaatgttttgtcattcactcccttggatattggattggatttccataatacaatttttgtttgaacacaataatgttgcagttagggtggtttgtgttgatgggagaacataactatgtagatatacatatttctggataatgttctgagtaaaagttacaagaccatttttcctgcaggttgctgcattgtctgttgcactgttcagagcttt

SEQ ID NO: 13449 - DNA, 3204 bp, Vitis vinifera
  Intron number 1 from transcript GSVIVT01019984001 (locus G SVIVG01019984001) derived from phytozome v7.0 (chr-ID chr1 ; pos 11990659 to 11993862 reverse strand)
gttcgtaccgtttgaggggggtgtaaggccatcataaataatttagattattttcaccccaactttgtaggttagtaagaaattatgtttaaatttttttaaatattttattcaatttgaatttaatctaattagaatccataattaagaaaaataattggagatgtatatatttttatatggtcttttttcttgagtctttcatgaaagggagagtattcattttatatagcggtcatgcatgtaaagtaagtcgatcttgtatcatcacgagttgtttgcaggctttctggctaaatattaaaaagacaacacagtttgtcagaacaacactattgacaactaagtcatggacttgggttgacctagaagtagtgagtgaggagagtatctactcaagggtggtgtcagactaacatcttcttctttcaaggatgtacgatgaccagatactcatttgcaagggtaccttatttttgcattaccagtaatgttagaccttatacatctaactaaatttagtcttttgagtcttccatcatatttaaactcttcaacatgttaatacatcaaagttaaaaaaaataataacaattatgataacaacaccaacatataaactataagtgaaatacatatttttacaaacttatcttcatctaatattatattaacatataaaatatttaaataggttatatataatttataatatgtcatttttcaagtaatattcataattttaaaactttaatttcaaaaacacttttagtgcttaattcaatcataacccttaacttacagtcctatgaaatttatcttaatcaaagttgaattaaagagcaaaaaaattgtaggaggattcaataaaggaagggagtgggaggccaggatgtggaacaatacttaaaaatacaagtggtgtacgtttggtactaaaataagtaggtgtaaaaaggcatggatccactatccacctacaaagataaatacataaaatatactaataataataaaaggaatcaagtaggggtagctatatttgactgataaggtatgatcccacctgtaatgaaagacagcgacaaagatggaggtccacacggtatggagcaagggtccatactctgaagtccaaaccaatgtagtatggcacatgcatgggataggagtcataggacccataccacattatcaataaatgcccaagactatgtgttatatgcacttgtggtatatattcaacaagtggcctagtccacctccacacttattcgccccaccaaatagtgggcagatagaaggtgggattccaccatggtaggtaataaaacaggaatttcaaacaattctaacattatgctgatttgagacatggcattcattcctccatatcttagatttagagggtatctcatgaaataaattcattgattgttcgtttctttttcttttttgtgtattatgtgtgatagtatccctttctttagttacttttgtgactgtatgaatgattttactagatttgtttttatgtttgattcctgataaatattaaaaacgttcaaaatttgttaagatttttctatgtttaatttcattataaaaaataaaaataaataaatattaatcaaaataatttaaaattttatatattttaaaattatttaatttttatataaaaaataaaaataagttaaatggatttaactaaaactataacaaaattaaaaaaaaagaacaaaaaagaagtaaaaatgtaaaagattagaaccacatcaagtaatggagttttttcttcaattttaatgataaaagataagaagataaaatgttatgataatgaatgttggattggtatgaaactattattaactgtattatgaaatattttttttcatttaagatgatagatgatcaacctattttgatctaaaaaagaattgatgtgttttgctactcttgaaaagtctaaatacaagtttaagagtgaatgaaattgttaatggttaatgattagagttaatttcattaagacccttgagaattagtgtaaatgcatcccatcatcattgattttaaatttcattaattaacacctttataaattagagttaatttcattaagacccttgagaattagtgtaaatacatccaatcatcgttgatttcaaatttaattaattaacacctttataaatttatttcgcttataaaatttattttttttagagaaatttcaagtaaaagtatcttaaataaaaatacttaataatttattaaaaattaaattttatttttcaaaaaataaaatttatatataaaatacatttacaaggatgttaatcgatgaaatttaaaacttgtgacaacttaatttatttacataaaacctcaaggggattgaatgaaactcacccgataaatataaatttttatttatttttattaattgtatagtttagataataacttaaaatgagttatccatagagctctatctcttccaaagaaattaaattaacttcatctgtttcaaaagagagtcaatctcttcaaattacctctctttagataagaaactactatacaatcgtgttgaagaatccgatgatttattttctaatttgaatttttcaaaatacaagcacggtatatttacagaactcttgctttatttttcctcataataaagattgagaaaacacgagcagctccactctacaaaatttttcaggtacgaaagttttctttgttttttgttttaaaatgttcagaatgaaatcaagctacttttaatggactcggacgagtagtgtggcgggttcggtatttcagttggggtctaacaacgtaccccaacgcagaccccaccaccgaccatgtccccttaaaaaattgagaaagccatttcgaccggaaaacaaagcaagtaggtttcaatcagcgactgacgagtcccaagcccttcgaaacgtgtcagactagagcgaatattaaacagggacggaaattaaaatgttctgagaaatccaagcgcctctcaatcacccatatattccatacacgttgctttctcccttaccattttctccgaattcgcacctacgatcactcctatttgctcccggatttctattcatctttccacaaatcccgctgtcctcacaagtggagagtccactctctccaatgaagttctcc

SEQ ID NO: 13450 - DNA, 17021 bp, Vitis vinifera
  Intron number 1 from transcript GSVIVT01036842001 (locus G SVIVG01036842001) derived from phytozome v7.0 (chr-ID chr1 8; pos 17869260 to 17886280)
taattttcaatttttttaatttttttcaaactttagtgttgaaatattaggttattgcttgtttcaaaaacttcttaattttgatggtattaattcttaatgttgcatttatattgatttggcaagttagataataaagttgttgtaccttttatgggttttttttttagtgttaaaattatattgttttggtcggttaaatgattaggttaaatttttttcttttggtcggttaaaatattagaattttttttatttattaaattggcattttgagttgaatcaaattttattatttaaaaaaaaatgaattttgtcatcataagtttggctccttgatcccaaatgaaaggtagctaaaaaggagggtccaatttagcttttctcttgttttcaaaaccctcttaagttataaatcaaaaaaatttattttgtgcctagtgattgggatttaaaaaatcattgggtccctcttttgtttcttcccttaaagtcattttcaaaagcattcaaatcaccaataaaaggttttagaaaacactcattctagctttaggcaaagaacacactttctattaaaattatgcaactcatttcatttacattgcgtttctcctttgttgtttttttttaaaaaaaaaaattggtttttttattcacataggtttggacttgtgctcccaaactaatggggatacacatgtaaaaacttacaaaaattgaatgcgacttgatggaacccctacataagaaaatttttcaaaactcttccttgctaccagtttatacttagccactgaccctttagatttaaaatttgttttagcaactttagaatgtttttttaaaaaaattccaaaacttgtatgactttcctcacttcttgaacgtgaatttaaagtttcgtttgagttagaaagcaattatggaatagaagatatgaatgagtttttaggggggttctgttttcacctagttctatacacctgaaacctttttgtaaaaataaaataataaatgacctttgactcgatattttttcttgattctaaacttcttgaaattgatcttagacacataaaatattaaaaatatatgcttttttgagagagatacgatttttcaaagtcgtgcatattgtgcacgccggattctggacatctgattagcttgagtgttttaaaaatatttttgagtaatatctgaccttggattctatttttatgtgatatagacactttgaaatatgtgtgtgattttttttttaatgattttatgtgatcatttattattttgtttaaaaaattgtttatgcatgtcaatttttcttatctaatctggactttgtagaacctttaggtatctttgctgcaatctgtcatttgaatggggtttggattttggtatgttgatctagatgtgtaggagttgtttcctaaaaattttcataattaaattccattctaagccatttttttagaaattgttttgtgatgcttccttttctaattgcatgctgatggttttatactttactcgaaattgttattatttttagagtcatttgattttatcttagcttgattactactcaaaaagtgctattttatagtttttaattaactcttttaaacacttttgggtagtagttattaccttttaactcaattgacatgttaaggacccttgcaatcatttctaatcaaattgtgttaagttttagtgtttttgatagctttttgatcacaaaagcaatctaagatgagggagagctttgtataatccatggcaaagcaaatggaagctcatttacagtaagaatccaagctttggagctttgtagtcctttgccaaagccaaatcaagaatgcaaggaggaaaaacagagagaggaatctaatatgaagaaattcaagaggagagcagctgcagggcacattccaagcacttcctggagtccattttttacatgctatatatttttttgaagatcgagaagtcagaaatccaatgctttaaacagtgtgcaaatcggagctaaaatgaagaagttatggccattggaagacaaccgcatcaagctgaaagacaatttcacaagctgcgaaatcacaaaagtcaacttgcgaaatcaaggtccaacttgcgaaattttcgcaagtcatgtttcaacttacaaaatccacctgtgtactcccagatatttgtgactgactcttttagatttttttcttcagatatttgttgtttaaatccctattttctcattgtaatccaccaatcataggattccttagttagaaagtaagaaggaagggtgaataaccttctatataatctattgtaatttttcttttaaagagagctcggagagttttttctcagagacaacacttttatatagttttgaataaagtaatacacagagctttgctttgccttacctactcattttgattgtatttttctcactagccaaacaaactctgaggatgttttctcagaggatgagtggctaggttttttgtttcttggagtgaaggaagctaggtaaggttccgaatacaataattagaagttttgttgtttcagtttttaatgaagagaaagtgtgacccgttaatggtttttatctttatagttaacttaaaatgccttaaaatcacctgggccaacacttggtaaggcaagtggactccgtccattgagttacactattttatctcttgcgagcctttgggaggtgctttaaaggtaggattttctagaatagccaacacttggtaagcttttagactccaaggagacatccattagttatctcttgcgagcttttgacaggtaatccaaggttaaggatcaccttgaatgtccaatactaggtgagaggtatgaaccattgcaagatgattcagtgacagggaattagtgtttgaatctataaaagggaagcatctgtaccataccggttcgggaaataactatatgttaaatccccaatgcgaggaaaagattcaagtgaccgaaactctctttttgcataggaacttgagcccaatgatctaaaaactccaagaaacacttttctttgtaagtaattttcgttaccttattattggtttcacttaaaaaccaaccttttcaaacatctttatgttttcttttaaagctaaccttgaaatgaaaaagcaccaattcagcttcgaattaatatcagttgtaatttgaaaacctatcccagtgaacgatcctagagccactatgctatgctagctaaggctatcctagtacatggtgaaataggtttataaattttgttgattactcccgtctaaggaccaaaatcaagggacaccagttgactgagcaccaatcaataggacatacaccagttgggcatgaatcaaatggcgtcgttgccggggatggtgccaactttatagtgatattaccctttcagagtacttgtgatcttcatcacaagtttggtgatttttctttcattttactaactctttttaattgtttcttttacttgttcatattttaacccatattttaattcagttttaattaatcttagtctttttgtagatttgttttcttttgtttctttgtttttgttacatttgttacttgttgtgtatgtcatattggatacgagacagtagaggaagactggtgaaatttgaaacacctcataaaacagagttggaattgtgcttgaacatcatggtcaccaggacaatcctaatgcattcagatcaatgagggaccacatgcatccaccttatatgagtgcaccatcatgcatagtgcctcctacagagcagctagtaatcagaccgcatattgtgctgcttctacctactttccatgggatggaaagtgagaatccctacgcgcatatcaaggaatttgaagatgtttgtaatacattccaagaggggggagcttaaatcgacttgatgaggctaaagctatttccttttactttgaaggataaggccaagatttggcttaattctttaaggccaaggagtatccgaacttggactgatttgcaagctgaatttctcaagaaatttttccctactcataggataaatggcttgaaaaggcaaatttaaaacttctcagctaaagagaatgagaaattctatgagtgttgggagagatacatggaagctatcaatgcttgtcttcaccatggttttgatacatggctattagtgagttacttttatgacggtatgtcttcctcaatgaagcaactcctcgagactatgtgtggaggagatttcatgagtaagaatccggaggaagccatggatttcttgaattatgttgctgaagtcttaagaggatgagatgaaccgaacaaaggagaagtgggaaagacgaagtctcaaccaaatgcctttaatgctaaggttgggatgtataccttgaatgaagatattgacatgaaagcaaacgttgcagctatgacaagaagattggaggagctagaactgaaaaagatacgttaaatgcaagccgttactgaaacaccagtgcaagtcatgccttgttctatttgtcaatcttatgagcatttggtagaagagtgtcctacaattccagctgttagagaaatgtttggagatcaagcgaatgtcattggacaattcaagcccaacaacaatgcttcatatggaaatacctacaattcaaattggaagaaccatccaaattgttcctggaagccaagaacacttcagtacacacaaccaggccaagcatctcaacaagcttcaaatcttgagcaagcaatagtgaatctaagcaaggtcgtgggagattttgttggagataaaaaaatccatcaatgctcaactcagtcaaagaattgacagtgtagagaatacattgaataaaaggatggatggaatgcaaaatgatttacctcagaagatagataatctccaataatcaatcttaaggctcattaaccttaacatagtgcaagaaaagaggagatttccttctcaacctcaccaaaaccccaagagtatccatgaagtggaagctcatgagggagagtcttcacaggtgagagacgtcaaagccttgatcactctaaggagtggtaaagaggttgagatgcctacaaccaagccactttttgaaaaagaggaggcagaagaagagacagagaagagggaggaaatcaaaggaaataagaaagataacagtgaaaggaaagaggaccatgattcaacaatgagtgaaaatccagagaaaatagttatcaagggagatgtgataaagaaacacatacctccaccttttcctcaagctttgcatggaaaaaagggaataaaaaatgcatcagaaattcttgaagtattgagacaggtgaaagtcaacatcccattgctagatatgattaaacaagtgccgacttatgctaaattcgtgaaggacttgtgtactatcaaaagagggttgaatgtgaataagaaagccttcttgactgagcaagtaagtgccatcatacagtgcaagtctccattgaagtacaaagatccaggttgccctaccatctcaatgatgattggaggaactgtagtggagaaagctttgttagacttaggggcaagtgtgaatttgctaccatactttgtctacaagcaattgggacttggtgaattaaagccaacatcaatcactctatctctaacagatagatcagtgaaaattctaagagagataattgaagatgtcttcgttcaagttgacaatttctactatccaatggattttgttgttcttgacacagacccaattgtcaaggaaactaattatgttcctatcatacttggaagaccattcctagctacatcaaacgcactcataaattgtaggaatggactcatgcaactcacatttggcaacatgacattggagctcaatatcttctatatgtctaaaaagtcaatcactccggaagaagaggaaggtccagaagaggtatgcatcattgacactttagtggaggagcattgtaataagaaaatgcaagagaagttgaatgaaagtcttaggaatcttgatgaagggttgtctaaaccctcagatttgcttgctactctacaagattggaagaggatagaagaaattctacctttgttcaataaagaggaggcacaagaagctgttaaagaggagcccccaaagcttaatctgaagcccctgcccacaaagttgaagtatacatacctagaagagaataagaagtgccatgttattatatcttcatctcttactactcctcaggaaacatgtttacttgaagttctcaagagatgtaagaaagcaatgggatggcaaatatctgacttgaaaggcatcagtcatttagtctgtacacatcatatatacctggaagaataagctaagccaattcatcaacctcaaagaagattgaatcctcatatacaaaaggtggtgcgagctgaggttcttaagctacttcaagccggtattatctaccctatatcagatagcccatgggtgagtcctactcaagtagtatcaaagaaatcaaggatcatagtggtgcaaaatgaaaagggagaagaagttgctacacgcctcacttcaggttagagggtgtatattgattgtagaaaattgaatgttgtgacaaggaatgatcattttccattgccatttattgatcaagtgttggagagagtctcaggccatcctttctattgtttcttagacggctactccgggtattttcaaatagaaattgatgttgaaaaccaggagaagaccaccttcacatgtccatttggaacatatgctcacagaagaatgccttttggtttatgcaatgcacctgcaacattccaatgatgtatgttaagcattttcagtgatatggtggagcgtattatggaggtttttatggatgacatcaccatatatggaagtacatttgaagaatgcttagttaacttggaagcggttctgaaccgaagccttgaaaaggacttagtgcttaactaggagaaatgccattttatggtacaacaaggaattttccttggccacatcatttccaagaaaggcattgaagttgataaagcaaatgtggaacttattatcaaattgccatccctaacaattgtaaaaggagtaaggcaaatccttggccatgttgggttttacaggaggtttataaaagatttctctaaactttcaaagcctctttgcgaactattgggtaaggatgctaaatttgtatgggatgagagatgccaaaagagttttgagcaactgaagcagttcttgacaaccgctccaatagtgagggcttctagctggcaactaccttttgaagtgatgtgtgatgccagtgactttgctataggagttgttcttggtcaaagagaggatggaaagccctatgtgatctactatgcaagcaaaacattgaatgaagcgcaaagaaactacacaaccacagagaaagaattgttagctgtagtttttgccttaaacaaatttcgtgcttatctagtagggtctttcattgttgtttttactgaccattcagccttgaagtacttattaacaaagcaagatgcaaaagcaaggttgattagatggattctcttactacaaaagttcaatctccaaatcaaagataagaaaggaatggagaatgtggtagttgaccacctttcaaggttggctatagcacataattcccatgttttacctattaatgatgattttccggaggagtcacttatgttgctagaagatgctcattggtatgctcatatttctaactatctagttactggtgaagttccaagtgagtggaaagcacaagataagaagtacttatttgaaaagattcatgcctactattgggaagaacattttcttttcaagtattgtgcagatcaaataataaagaagtgtgtccctgaacaagagcaacagggaatcctcagtcattgccatgaaagtgcatgtggaggccactttgcctctcagaaaacaaccatgaaggtgttgcaatcaggttttagttggccatcacttttcaaagatgctcacaccatgtgtaggagctgtgatagatgccaaaggcttgggaagctgacacaaagaaatcaaatgcctatgaaccccattttaatagtcgatctctacgatgtttggggcattgacttcatgagacctttccctatgtcttttagtaactcttacattttggtgggggtagactatgtttctaaatgggttgaggcaatcccgtgtaaacacaatgatcacagagttgttctcaagtttctcaaagagaacatcttctcaagatttggggtgccaaaggccataatcagtgatgggggtactcatttttgcaacaagccttttgaaactcttttagccaagtatggggtgaagcataaggtagctacaccttaccaccctcagattttcgggcaagtagagttagcaaatagggaaatcaagaatatattgatgaaggtggtgaacacgagtagaagagattggtctgttaagctccatgattcactatgggcatatagaacagcttacaagactattcttggcatgtctccttatcgcctagtctatggaaaagcatgtcatctccctgtggaagttgaatacaaggcttggtgggcaattaaaaaggtaaacatggacttgaacaaagccgggatgaagaggtgcttagaccttaatgagatagaggaattaagaaatgatgcctacatcaattccaaagttgcaaaatagaggatgaagaggtggcatgatcagttaatctccaacaaagaatttcgaaaatgacaaagagtcttactctatgactctaggctccatatctttccaggaaagctaaagtcaaggtggataagactttacattattcaccaagtgcatctcaatggagtagtggaactactaaattccaacagcacggacactttcaaagtcaatggccaccgtctcaaaccattcatggagccattcaatcaaaacaaggaggaagtcagtcttcttgagccacagaaatcctaactaaaaaggggttagatggacttagtctttttgaagactaatcaaggtccacatgtttttgttgatttaaaagctttattaattgtttttattttgattttttgctttgatttattttattttgatataacttagactttttgaatgatcaaaatcaggaggaatttcaaaggaagtggagggaagccataaagaaccaaagaaggagaaaaacagaggaatttttttaacttgcgaaaatttcgcaagttgaaaaatcaagttgcgaaaatgagggtcaacttgcgaaaaaatttgcaagttgaaaagccaagttgcaaaaattttcgcagctacgaaacaccctctaggcacacgtgtgccatttctcatcttcaaaagcccattttgcagctgcgaaccaagttgcaaaatcctcaaagcaaaattttgcaagttcagtcttcaagttgtgaaaattttcgcaactgcaaaacaccctctaggcacacgtgtgccattttgcattctcaaaacccaattttgctgctgcgaaataagttgtgaattaggttgcgaaatcaccttcaagttgagaaatggccttaagctgcgaaaatgccaatcgtcatttaaaggtctatttaaacctctatttttctcaatttttgtttcacacagccatttcaacttgcgaaaaagctcttcaagttgcgaaatccaagaattagagaggaccctctccaaaagaagcctagagcatgtgcgtctgaagaagaccaccccgcgcacctccgcataccctttggaacacgaacctctccacttcagccatggccaagacgagaggagcccaaaccctgtctccatcagctcacaacatcagaccgagaacttcacctgcacgagactccatgtctgaggctccacaggcccacgccattccaccttccgagggtggagtaccgcctagtcctcctcaccgaaggtacgagactaggagaccacccactacactaagggcaagctcttcacgccccaagaaatcagttagtcgccctcctgcaaagagagccaaagtttcaggcccaatagagtcatcagaacctccacagcctcagccgcctactactgagtctcagattccttctaggatgacttcggaagtgattattaggcaacctatggttactcagccacctatagaaggaaatttggattgccgagctaggtcattccactccgagctatgctttggtagagaggctttcaaacaccagccggagctcaaagattcattccacctattgcaaagataccatttggagcacctaatgactccaagggatttcttctatccccgagtagcattagaattttatcattctatgactacgcatcgcgtccgggatcttgctgttatccacttcactattgatggatgccatggtatcttaagagcaagacacattgcagaggccctgcacatttcatatgagcctatgagtccagcagattacagagagtgggctcatttttcttagagcgacatggtccgtatttgtccagggggacatccacacgctcatttctttttaggaaggagcttccacctagcatgtttcttctagatgtgttcctgtgctccaacatgtttccacttcagcatatggtgcagaggagatgagctatactagaggctttgtttaggatatcaaagggtttttactttggccctcatcatttgattatgacctctcttctttactttgaagagaaggtccataggaagaaactacagagagcagatgtcattccactacttttccctaggctgctttgtcagatattagagcatttgagctatccttatgagcctcagctcgagcgtcgacgcatttgatgagagatattcactctcgacaaatggactcatatgacggcttatgttgcacatccaggagccccaactaggccagcatatccggagataccacaagacgagtagccacagcaggctgagatacctacggagatcataccacctgcccttgcagcaccttctacagtgctcacgcctgaggctacatcttctgctcctcctaccactcctgggactccaccagtcgtaccagctacatcagcgccttctccacttgagtctactatcaccatatccgcttcagagttcagaggcctatgtcatacattgcaaacattgaccactactcagagcgttcttgcctagcagatggcagtcatacgtgcacatcaggatcaacttattgccacccagacccagcatactgccatccttaggcaaatacagcaacatttgggtattttgtcttcacctgagcatgatatgcctggtccatcagagcctatggatccatctcaggaggctcctccagcagagtagactgtgtcccatgagaagactactacagtagagatcgagactccgatccagaacactcagactaccacagccgagccatcatctccacacgatcctcccaccactacctgatcatctttctacttttgttttttgtatttacttattatagtagaactcataatcccatgttttttttttatgttttatatactgggattggatgtattacttgtctatagttcatattgtattttcctagtcaagtaatacatatccatcattttttagtatacttggcatactatcattttatttcctctactcataattttttgttgtttttgaatcatgttgtttctcctagacgacttagacttcatgtcactttggaggcaccacttcctccctgtattttcaatcgctcttgccacattgagggcaatgttcagcttggttggggggaagagagttaaggaaggaagttttgcttttaatgctaagttattttggtaatttagttgtttttgcttaatttaaaaaaaaaatttaagtttttattctactctccatggttattaaggaaaaattctcaaaatgaaaagggagaaattgaatttttgtctttttacttgacttagaacttgtattatgcttgttaaagttgatgaattgttgaaacttctattgaattcaaccttatttcttccactttaagccattcacacattgtgcacactaggttttgattataagatgacaaactatttcacccccttgacttagaaaaaattagacttggtacttttgacctcatttaatagtgttgggacaccttataagaggccaatgagcctttgaaaaaaaaaacaaaaagataaacaaagaaaaaaaagttttacttgccttgaaacccgagcaaggtctaaggggtatatggtgaaaatctttaaaacctggtgccctaagccttcattggttgggagtcactgacctcaatgcttgttacaagggtgaataggtgaagtttaacatactgtaggtgcttgggtattaaaattcattctcaaaagtccggggtaaaatctgaggagttagtggttgaaagatccttaaagcttgatgccctaaaccttaattggttgggagtcatcgatggaccttcgttacatggacaatttagaaaacaatacctttaggtttgtactcctacaatgaaaaaaattgtgaaccaagaggtgcgttcatagcctattgaaggttgtcagtttgctaagagttggaaaaggactaggttgagggaagagattagttcagcatactatattcaaaaaataataagtaacacatagatttttgtggaagagttaggattgaccctttgggagtggaaagtattttgaaacttaaatttgcataatgtcttctcttcatgaattgtgattagacaagttatttgataactcttgttgaagtttgagttttatatctttaatgttccatgtgagagtttgatcatcatgccacttgaatttttttgatgtaatcagcatgatgttgtaaattatagtattgtttatttttatttttctctccttcattgctaaggaactagcaatatgtcggttgggaggagtgattactactaaaaaaaatgttattttatagtttgtaattaactcttttaaacaattttgggtagtatttattaccttttaactcaattgacatgttaaggacccttacaatcgtttctaatcaaattgtgttaagttttggtgtttttgatagctttttgatcaccaaagaaatctaagatgagggagagctatgtataatctatggcaaagcaaatggaagctcatttacaagaaaaatccaagctttggagatttttagtcctttgccaaagccaaatcaagaatgcaagtagtaaaaacagagggaggaatcttacatgaagaaattcaagagaagagcagatgcagggcacattccaagcactttctggagtccattttttacatactatatatcgtttcgaagcttgggaagtcagaaatttaacgcttcaaacggtgtgcaaatcggagctgaaataaagaatttatggccattggaagacaactgtgccaagctaaaagataatttcgcaagctgcgaaatcacaaaagtcaacttgcgaaatcaaggtccaacttgcgaaatggacaattcaacttgcgaaattttcacaagtcatgtttcaaattgtgaaatccacctgtgtactcccagatatttgcaaccgactcttttagattttttttcttcagatatttgttgtttaaatccctattttctccttgtaatccaccaatcataggattccttagttagaaagtaagaaagaagggtgaataaccttctatataatctattgtaatttttcttttaaagagagcttggagagttttttctcagagacaacacttttgtatagttttgaagaaagtaatacacagagctttgctctaccttacctactcattttgattgtatttttctcactagccaaacaaactctgaggatgttttcttagaggatgagtggctaggttttttgtttcttagagtgaaggaagctgggtaaggttccaaatacaataattggaagttttgttgttttagtttttaatgaagagaaagtgtgacccgttaatggtttttatctttttagttaacttaaaatgccttaaaatcacctgggccaacacttggtaaggcaagtggactccgtccattgagttacactagtttatctcttgtgagcctttaggaggtggtttaaaggtaggattttctagaatagccaacacctggtaagcttttggactccaaggagacatccattagttatctcttgcgagcttttgatgggtaatccaaggttaaggatcaccttgaatggccaatactaggtgagaggtatgaaccattgcaagatgattcattgatagggaattagtgtttgaatccataaaagggaagcatctataccatactggttcgggaaataactatatgttaaatccccaatgcgaggaaaagattcaagtgaccgaaactctctttttgaaataggaacttgagcccagtgatctaaaaactccaagaaacacttttctttgtaagtaatttttgtcaccttattattggtttcacttaaaaaccaatcttttcaaacatctttatgttttcttttaaagctaaccttgaaatgaaaaagcactaattcagctttgaattaatatcagttgtaatttgaaaacccatcccagtgaacgatcctagagccactatgctatgctagcctaaggctatcttagtacatggtgaaataggtttataaattttgctgattactcccgtctgaggaccgaaatcaagggacactagttgattgagcaccaatcaacaagacatacaccagctaggcacgaatcatagctcaattttggctttggtactgtacattagacataataaagatattatataatatgtacttgtcctaaccactctagccttttttgaggaatcttataaattatgcatgctacccaggtacgccctctatcacccactttctaaattttgtgaatatgtttgtcactgtgaactatgtctatatttgatagtacttgggtgtcttgatatttttttcattgttcgattatttctgataaagcgcatgttgggtgatatgctatttgaactaaccatttatgtcttgttatagcgcttaagatgcaactcaggtactcaccctttgactctcttttatcatcatgatttgactttctggcttaatatgctaattctgaaatcaccttagtctacttaggtaccctcaatcaattaattaattgccacatttccctcaacttagttagtagagacctttgtagggcttagaggggtcctaccttttagaggtaccttcccaataggtaacctgatccccggacctagactcgggtttttcaaagacatgtttttccaaaaactatggagtcatttctttagggttttttttcttgtgttattttccttttaaaataaaaataaaataagtggcaactccaacttttacaaaaataattttttcactacaataaaagtgagtctcgccgatcgagtgagggcacacatgagaaatgcgggtccataaattggcgactctactagggaatttgaggatcaagcttgaacactagttgaggaaaatgtgtcgtttaattggtcgattagagggtacgtccttttttttaggcgaggtgatttagtctgatcaattttttagtttgctatcttaacatgtttgtttgcctttaatgatcacttgattgcttgctcacttcagcatgattcactctcgcatatgctagataggactttatttgtatgatacctatctacttggtatgactacttgttgcatgacagcccttgctcctgcatgatgtatgattgcttgcctatgtttaccttctcactttagaaattaggtttttcggatgcacccacatccttcattgtgcactttagattatcccttagtgttgagagatggaagagccttcactattaagaaaccccctaggaacgtgaggaagtgcatgtgtagaggtgaggaccaccttgcatggaagcacctcgtctcctaggaggcgtgcagaggattacgtaccaccggaaggtatgattgcttctgctagggatcctttaacccacccattttatcttatagagccacatcaaccttgtaggttaacttaaacccaattaggatctcattcctacatgtgggtgcatctgtggacctttagggtttccttggtcacaattgggtccagttatccttctcatggtctccttttggtgtgcttagagattggtacatgtttgagtttcaattaggccacttttctgcattgtgattagtgcgtttccaccttttctgagctgttttcatgtcatttatctttccgagtctttgtaccttataggatgtgttattcgcttcagtttagattcaacttcttagaccaaagttggagatagattgatcaagatttcaaagcagtcaggtatggatcctcagcatgatacaattgatcgatttacagtcaccatgactctattcaggaggcattagtaggtttcagccaaatgattgatggacagtgagaaagataacatctagtttaggatgagatttcgtgtgattcattgcttcccacccccaccacccagttagccaaagacattgatgagggtgacatcatacatatgatgagtttagtggattatgagtcgaagtttatcatatgagagttcttatagaggatgttagttctttctttaagatgagggatttgattaacatagttttcttcatgatgagcctaaggtgggggtgttggatgatagtcggatggttaccacaaattagccagagatagttcactctcttgat

SEQ ID NO: 13451 - DNA, 9561 bp, Vitis vinifera
  Intron number 4 from transcript GSVIVT01035966001 (locus G SVIVG01035966001) derived from phytozome v7.0 (chr-ID chr4 ; pos 6587884 to 6597444 reverse strand)
aaggtgtgtggccttttaatattttatgcatatttttttacatttcaaaattttgagttggaggcatctctcgaagaaattaagtacgaagtattataatactgttgatgacatactcggatacatcacggccatctatttgagaaataggttattgaaagtaggattattttgatatttcattaggatatgtttagttggtatatttgattaggttaggatcatatgcttctttcattaaacttattttagtttttatatgaatccttagattatcatcatcatcttcatcatgctagacataatattgaaagtattatagagtgcactcaagtacacatgatgtataccaatggtgctattattcaagcaaaaataaaaaaaataaaaaaatggagatataaaaaaaaacacttaaatggagatataaaaaaaacacttactttccttggaattcaaccaatctacaaagcctatcgtggtcctaaacataccttgtcttataaaccatgtcataatattcttccctttaatttgatacgtgttctacaatctgacaaaacttagcaggcaataccctcccctatttcaccctcctcatgaacaattaattcaagataaaggaagtggttaattttgtgtgtgtatattatctacgtttttttttttttttttaccgttgtcccatttttacttcttaatcttataaatcctattccacatattctgtcataaacctttagatgctaaggtgtctcttgataattttaacttagaataaactcttctcaaggtctgtcaattaatactttgttgtcagaaaaaatcattgacgatatgacactttactgtctatgcctagtaagttcatccatgaacaatgtaaaaaagatggggcttagtactggtccttggttatgatcaccatcatcattattgttaggtgcatcaaaaatttcacacgttattagacacaacaaaaatagggtctccattatgtttatgtggaagccattgaaaattttcccaaacacattattaggggtgagagatactgagaacattatgttcatttgaagatccaatctggttaaggagcaaaattaatgtagaaatcctgacataagttggacaaaatggggcacttgcaccaagagagagtccctatggaaataggtcatattagggaagtatggggcaaaagaaggaggatggtgcttgggggtggtggggaatggctatggggtggggttatagagggctgttaggaataggtgggaagttttttgaagaagaactcatctcattatgggtactggctgaaggataaaattttggatggtcaaatgatgagataaatcttctttagagaagtctttctcgatgttattttccttagccattgataaagacttttggatagcagaaatgtgggaataggttggggagggaggtcagtgaagttcttgctttcacagatacttccatgattaggaattggaaggattggagatctttttttggagacagcaatcaatctcaattagaagggacaaagaggacagcttgggttggaagataaccaagacgaacaagtttacagaaaaatctttctgtgtgtccttagcctagagaagaagtgagcctttcttagcaagtttagttggaatccgtgggtgccaatgaaggtgagcttctttaggaatctatttgggaaggattttaactcttgatcagcttagaagaaggggttggagtgttctgaatagatgctacatgtgtaatgaggatgaaaagtcgactgatcatttgcttctaaagcaataacgctatggcgattggttttttctttgtttggtgtggcttggttgatgcagccttctgtaagaggcaatcttcttggttgacatggggttttattttggggaagaaagtttggagagtgtttctttatgcctgttttggacatcatggaaggaaagaaataggagacattttaaaggagtaaaacagtcggatcaagctatcaaatcttcctttatgtgtattttcttgaattgggctagcatggatagatgaactttttatgtcaatgataaactttgtagatcggttgagtttgaagtaagatgggagttattttttgtgttctcttcttttttgcttgtctgtttttggcgctaattgtatatgtcatgtacaccttattgctcttttttcaggtgctttctttataaatatatcttttttgttttcctatcaaaaaaattaaaaaaagcctacctaaggttaaggtttttgcatgattagttgctaataagaagatcaagaccaatgatcttctacttgtgaggagatcactaagctttgggttcggattgttgtgttatgtgtttaggaagtagtgaatcaattgatcatctcttttttcattacctactttccttggggctttgatataattctttggtgaatccttcttgctgggatagactgagtgtctcctagaagcctacaaacatgttctttagaggctcagctgaactcctttgaggtatggctattctcacttcgatttggataacatagagggtggggaatgccataatatttaaggatctagatataggtctaagtaggtcatttaggactcaacttattttgtctctataggcttctgttagtttgcaagaacttccttgagttgtcttctactggattggaatctggtttgtagtcaggaggttggttgaggagaacattttgagtgggattcttctttcttctcccaaatgccatcttttatacctcctgtgtactaggattttgcttcctttttgttagtgaagaatttctgaactcctttattgattaatgaatcggtacacaccatacacatatatatacacaaatgactgaataagaaacaatcaatctagcttaattctctcctaaaattaggaaactaaatcataaggaaatatcctaaatgatctctccttttttattcctaaattaaagtcctaactttggcattatttcaacactccccctcaagctggagaatatatatcatataatcccagcttgcaagttaagtcttcgaagttaggcctaggtaaagctttggtgaggatgtctgcggtttggtgcttggtaggaacatagtttaatttgaccgtctcactagtcaccttctctgtgataaagtgtctgtcaatctcaacatgcttggtcctgtcatgatgcacggggttctttgctatgcttatagctgcctgattatcacacatcatcagaattggagatgaactcgtttgtcccagttcactaagaaccctttttatccaaatcccttcacagattccctgtgcaagagctctgtactcagcttctgcactacttctggctacaactgattgcttcttactcctccaggtaacaagatttccccagacaaaagaacaatatccggaagtggaccgcctgtcaatgatgtttcctgcccaatccgcatctgagtatacttcagtgtcacggttctctgtctttctgaagaataggcctttccctggtgtcatttttaaatatctaagaatcctgtagactgcttccatgtgttcctcagtggggctgtgcatgaattgacttacagcactcactgcaaagccaatatctggccgagtgtgtgagagataaatcaagcgcccgacaagccgctgatatctccccctgtctaccggtgtactttctttctcgataccaagtttcttctgactctccataggagtatcaattggtttgcatccaagcataccggtctccttaagaagatcgagtatgtattttctttgagagactacgattcctttccttgatctagccacttccataccaaggaaatatttcaaatttccaaggtctttaacttcaaactcttctgacaaatacttcttcaaattctgtaactcccccatatcatttccagatagaataatatcatcgacatagactatcaatatggccaatttcccggcatgagatttcttgacaaatagagtatgatcagcctgaccttgtttgtagcccagcttcaggactgcttttgtgaatctatcaaaccaggctcgaggagattgtttaaggccgtacaatgatttttggagtttgcaaacctgattctttgccatactttcttcgaaaccaggtggtatttccatgtagacttcctcttctaggtccccatttagaaacgcatttttaatgtccagttgttgcaagcaccaatcttgattgacagccaatgagagaaggatcctgatagtgttcagttttgcaacaggagcaaaagtctcctgatagtctatcccataggattgtgtaaaccctctagctaccaaacgagccttgaatctttcgactgatccatctgctttgtattttatggtgaaaatccacttgcaccccacaggcctcttcccaaccggcaaatctgtgatagtccacgtcccattcttctcaagtgcatcaatctcatcttgtactgccttcttccattctgaaatttttaatgcctcttgtattgtgttgggaacctgagtatcatcaagagaagtagcaaatgctctgtaagatggtgataacccttcatacgtaacataattcccaattggatgatctgtacatctcctaacacccttcctcaatgcaattggcaaagtagaatcatcaatgctgggaattaacacctctccagccctatcctcacctatgttctcttcaggaagacttgaattggagtcaatatattggccacatgttgactgtgatccgtgctctaattcctgtcttttcctcctcctgatgtaaacttgtaagttctcattagcaagttgtggggctataggttgaataggcatgggagactggatggtcacgggagaaggaacatttgtgtgctgggctggctgaactgatggcggcatgggtgtggacaactcagtgggcgcgaattgggaaggatttggtgactctgagtgaaaagaaggtacaccatcaagaaaagactcccaaacttgatgttcattcatgctctccccctgaacatgagatttgggatagaagaagacatgttcaaagaaagagacgtccatggtggtgtaaaatcttttgttggttggagaatagcatttgtaccctttttgggttggagaataccctagaaaaatgcacttatttgctcgaggagcaaatttgctacgattttgaggatacacatgaacgaatgccgtacaaccaaatactttgagtggtaaatcagaagaggcggcatgggtgtgaggaaactgttttaagaaaagttgacgtggggattgaaaggtaagcactctggatggcatacggttaatcaaataggtagctgtgagaatagcttccccccagaaatagtttggaacattagaggaaaacataaggcaccgggcaacctccaagagatgtctattcttgcgttcggccaccccattttgttgtggggtgtcaacgcaagaacttatgtggataatgccatgattttgaagataagtactgagactactagtaaagtattcctttgcattatctgacttgaggacttgtattttggaattgaattgattttgaaccatacgattgaaggtttgaaaaatgtgcccgacctctgacttttctttcataaggaaaatccatgttacccgagtatgatcatcaacgaatgtcacaaaccatcgagtgccagaaatattttttatccgggagggaccccacacatcactatgtactagagagaaaacagtcgaaggtttgtatgggatttgaggatatactgttcgagtatgctttgcaaactgacaaatttcacagtgataagatgctggatttttattgataaataatctgggaaacaattttgcaaggtaaacaaagctaggatgaccaaggcgatagtgtaacattataatctcactatctttattgaccttagaatttgacacagaattgaaagactctgacatactctgagactgtacgcaacttgcttgagagacttggttggagaattggccacatgaaaggaggtagagcccggaacacagttcagcactgccaatcatcttccccgatttcaagtcctgaaaaacacacaagtttagatagaatttagtaacacattggagatcatgagccaatttgctaatggacaaaagattgcaatccaagtttggaacatggaggacagagtcaagatataagtctttagtaagttttatagaacctgtcccggcaatttttgactttgaaccatcagcaatatggacggatgaatgaccattacttggcttgtaattttgaagaatggcagcatctcctgtcatgtgatcagaagcacctgtgtctactatccacggcctcattcctcctcgattagcagtgaaggctacaccggtagtactgccactgccaacttggcttaataatttctgtagcatctccatctgctctttgttgaatggactcggctcgggaacagaggtgctctcagagttggcagccacgtgtgctctgccatctctgtcaaaccgtggctttggtttccaatcagcaggtttgccatgaagcttccagcaagtctccttataatggcctggtttcttacaataatcacaccaaggcctatcccgtttctgacgatctccaccactactattaaatgaccgagccgcaagggcagaggcatccaatgttggggcaggttgctcttttgatcccatcatcactttctttctactttcttcacgtctaacctctgaaaaagcctccctgagacttggcaggggtttaatgcccatgattcggcctctaacatcatccaattccctgtttagtcctaggaagaacttgaacagtctcttttgttccacaatttgcctgtatgttgctgcatcatccgaacatttccatgagtgagtctcaaataagtcaagttgctgccaataccttgtgagtgtgttgtaatactgagtaactgactgctctccttggcggaagtcatgtagagctgattcaacctgaaacagttctgaagtattttcagaacttgagtaagtttctttggctgcatcccatatgtcctttgcagtcccaaacagcaagaaattttcgcctatgtcattgttcatggaattgataagccatgacatgatcatgctgttttcaatcttccacttcctgaaacccggttctgtagtttctggcatgactgcttctccagtgaggtactcatcctttcctttaccgcaaatgaacagcaacacagattgtgaccactgtaaatagttatggccatttaatttgtgtcctgtgatgagaataggagaggaatcattgccaccaaggtttggaatttcagatctgccccctgattctggtgacgtgacgctggatacttgtgatgatgccattccgtattttgtcatggaccggaaaggtagaagaacacttttcaaggcacgtgcagggactggagttgagaaaaaatagccgaaggacgccggaaaatctgatcagagggcccgcggaagcaaaaaaaccccaaaagaggcacgtgcagggctcggattgcacaaacaggtaggaagggtggctggtcggcgtcaggcgagcctggaggaggaagcgcgtcgccggaaagtggctcacgcgccctcacgcgccggcgcgtgagatgcagtcgccggtcggaaaaacgcgcgtgggcggcgcgtggatgggtttctggttccggtgctttgggacaaattggagatctcctccaggcgctccttgcggtgtagaaaaaaaaaccgtcgccggaaagttcgccggaaaagttgccggcggtgagtgttttctgacgactattcgactgactggaaagtgttttctcccttggctctgagaacagggactgatggccggaatgagagagagagagagagagatgatcggattgagatatggccagaaagatttggccggaatgagtgatggcctgaataagaggtggccagaagggattagggtttcagaaaactggctctgataccatgaagaatttctgaactcctttattgattaatgaatcggtacacaccatacacatatatatacacaaatgactgaataagaaacaatcaatctagcttaattctctcctaaaattaggaaactaaatcataaggaaatatcctaaatgatctttccttttttattcctaaattaaagtcctaactttggcattatttcaacagttaggcaccttttagtacatattaaagcatatagagttggatttgcctccatcatgttgtgtcaagttaaattttgatgcatgttctctggatagtccaaggcaattaaggattgaaggtaggattatagatcattatggagaaggtttcaccattgaggtagacatgctagcagttttgaagggtttgcaattagttagggcttgagtctctctattatttggtggaaggtgatgctgcaattttattttagggtgtcaaagaaacgaaaaaaggtctatagaagtatgatataaagctgtaccaaatttgtagatatcaatggtgagttagttgcattttctcttggtcttcctgattagcatatcatgttgcagtttgtttacccaattgaggatccaggtagctggtctcaaggtgatttttatacccctgagttgttggtcctttcgggtttgtacattcttatctctttcttcagctgaatgcttggttttgctcatatggtggaggcagatttttatttatttattttttgttttgatcatatattatatttttggcatgatttttgtccttcaatatacttaatttatattaataatttgttgtttcttggagtatgatacccacactctccaactatacctagtgtacccatgtcaacatgacatgggtgtgagtgtaggattctagtaagatattcctatgttgctttgattttgatatattttttattttttatttcaacttccttagcagattattgcgttaaaacgaaaaaagagaatttaagaatatttgggagaagaaagaaaagatacggataaaagaaaaaagataggtagttcttctcaaagatatctttttacttaattttaataggtttttctttggttttttcccccttttattaagttgtctccccatatccatagctataatttgaatcctttttaattctttccccatatcctaaattttggagttaaaagaatgggactcctagatatgcacctgcacctgagtccaggcaacctagttctaggtagatacatagatagatatatataaataaaatttatttctagttggaaagttatcttaatttcatgtctatggagtcctgattgtgcattgttggttacacatggaattatttctgaaattcttctcaaccacattttggtgttgtgcagggaaagttgaggagtgtaaaaagttttttgagact

SEQ ID NO: 13452 - DNA, 18049 bp, Vitis vinifera
  Intron number 20 from transcript GSVIVT01018288001 (locus GSVIVG01018288001) derived from phytozome v7.0 (chr-ID chr 15; pos 11772756 to 11790804 reverse strand)
gtcttcgtaatacttcttcagctaccattaaggtatgttcaagaagttgcattatttattttgtcatttccattagtagtcttcctctttttgcttggaagtattgtagcactttcattatttgagtatgtatgaaagctaaggaaataacatgcacaacaatcttccttgcctgagggtagatctagatgatttcattttagtatggcttgtgataatatctgtttgaaaatgaggaaatttgagggaggaaaaaatatttatttatttttctcttattttcaaattgattattgtatctatatttatacatgaatgactaaggccatttgccttagaaaagaaatctaatctttaggagaattgtgatacagctataacatagttgtgacgcagctgtagttgtaacacaactatgcacacaactgtacatcctagatttcctttggatttccacactgcccctcaagttgggttgtaaatgtttgtcatttccaacttggatctcaagtcttcaaagtgggttctagaaagtgccttggtaaggatgtttgttgcctagagagctgttggagtgtaaccaatgaaattgtcccttcttctatctctttcttgataaaattgcaatctatttccacatgctttgtttgatccgggtcctgagcgatacttatgacttcttgattgtcacagaacattttcatagaatcttctattggaattttcagttcatttaggagtctctttaaccacatttcttcatagattccataggtcataactctaaattttgtttttgcactgcttcgagctacaacaaaccgtttcttgcttcaccaagtaatcggattcccccatacataggtgtactagctcgaggttgatcttcagtcagttatggagttagcttgatctgcatttgaaaaaatttcaatgtttctcttctatgttcttttgaaataaagttcctttcttggagtcattttgagatattttagaatacgatacacaatttttatatgttcctcagttggattgttcatgaattggctaaccatgctaattgaaaagacaatgtctggtcttttgtgagagaaaaatgggtttccccacaagtctttgatatcttcctttatccactggagcaattcctttgacaactcctagtttagtagtttgatccataggtgtttttgtaagtttatagcctaacattccagtctcctttagcaagtttagaatatacttatgttgggagattgaaatacccattttttgatctagcaattttcatcccaagaaaatatttgagattccccaggtctttaattttgaactcatgggtaagaaaactcttgagtttgcctgattctttctcatgatctccagtcaggattatgtcatccacataaatgatgataatgatagttcttccctcaactgtgtgttttacaaataaagtgtgatcagactaacattgggaatcaaacctctttacaaccttggtaaaacaatcaaatcaagcttgaggagattgcttgagaccatgtatggatttttctagtcttacggggtcttctcctctccttgggttctcaaagccctagttgtcagtcactaaggatgctactacaagatggcggcgtgttggatttctcgaggaaggctgtgaaggaaccctctaggatggagatggttgctagggttgaggagttggaacttccaagggatgtggaattcggggccttggaggggagaatattgatagcctttccaatggttttgttgagtttagtaattgtttagggatgccaacaatgggctttgagaaggaaatttgtactgtttttaggaaaatggagtcaagaaaaggatggggcatgaggatgtcagggggtaagaaaaggtcttcctctcgttttgagagggaaatccaaaagctagagtgtttggttaacaataatagctctctgttcactgctaggggaaaggggagtagtgttggggcttgagggaagaaggtgctttgcttctggttgtagggttttactattggttcagttttttctattagttaggacagcttgttgttagggtggtgggtttttctccttcttttatatctttggcttgcttttgggtttaatttgtatactctgtgtgtatttttttatgccttttagcaaacactttaatatacctctgcttacctataaaaaaaatatagggatttttctagtttgcagactttgttaatgtttgtcttagtctcaagacctgaaggattttccatgtacgcttattctaaatcaccattgaggaaggcattcttaaggtctagttgatgaagaggccaatctcggttaacaactaatgacaacaaaacacgaattgtgtttaatttggccattggagcaagggtttcatggtgttcaatttcatgggactgcgtaaatcccttagcaattagtcgagctttgtacctgtcaacactcccatttgctttgtacttgattgtgaagatccacttactcttgactggactctttccttctagaagttcaataagctcccatgtcccattcttttcaagagctcgaatctcttcctcaatgattgtattccatttggatatttgtaaggcttcttggatattgttgggaatctgaatatccataagattggtaacaaaagcttgataacatggtgacaaattcttataggagataaaattataaattagatgatttgtgcaagatcttactccttttcttttggcaattggcaaattgagttcattatcttttgagttctggctcattaggattagaatcaatgttacctgagtgtgtctcttttaggaccaaatttagttcaatttcatgtactagcccaagatgtgttcgctgctctatatcttctcgagacttcttctttctccttgagtaaataatgaactctttgttattgttagcctgagatttgtttgggcaaagaggagtactcgactctatgtctacggattcagtagtttggagtgagagacttggagcaggagagataggattagagttgtgaactataacaaactcaagtgtttgaggttcggtcatggtttctgttccccaaaactggtattcttgaattctgttctcctcttgaataggagttttggagtaataaggctgattttcatagaatgtcacatccatgaaggtgtggaacttttctgtgacaggaaagtaacacttatagcctttttggtttgtagagcatcctaggaaaattcacttagttgccttaggatcaagcttacttcgatgctgttggggaatgtgaacaaatgctgagaaatcaaacacttttggtggaatggaggagatgagccaagtcctagggtatgatttgagaaatacttcacacaatttttggaaactcgagacaagggaagacattctatcgatgagataggctgcagtaagtacaacttctccctaaaaattctttgggacatgggaggagaacataagggcccttgcaacttttaacaagtgtctattatttctctcggccatcccattttgttgaggagtatcaatacaagaactttgatgaaccataccttctcttaatgagaattcccttaggacaaaattgaaataatctctagtattgttagttttcaacacttatattttggcatggaactaggtcttgatcatgttataaaattttttgaaaatttgacccacttatgatttgtctttcatcaggaatatctaagaaattctagtatgatcatctgcaaaggacacaaaccatctagtccatgttatgttctttatcttaaatgacccccgaacatcgctatgtatcatggaaaaaggatgagatgatttttatggttgaattggatgggaattacgaacatgcttggataattgacaaattgaacattgaaaaacatccaaactttttgtgaataatgatgggaagagttttttgagatacaagaaactagtatgtcctaaacgatagtactacaacataacattactgtctttattaaaactaaaaacagaaagactgtttttcaccaactgtcggttgaggttgtctatcaatataatcagtcgctttgaagatatagagccctgaacacaccttagcattgccagtcgtcttcatcgaattcaaattatgaaaaatacaatagttgggaaaaatttagtaacacaattctttatctgaacgaatttattaatggacaacaaattgcattccaaattcaaaactgaaataatagagtcaaaagtaaggttcttaaagatgacaacaaaacttgtaccaaccacctttaagaaagaacccacatacgaactgtataattcccaaaacaaggtgtataattttgaaaaattgtggcatctttagtcatgtgatcagaagctcctgagttaacaatccaaggacttaaattttctttttttactttcggggcaataagaaacttacctttttgagctaaggatcgagacttgatgatagaattggaggaattacctcctgttaagactcgttgaacattttttgcaataattccaattgcactttgctgaacggacaggaattaggtggtgctaggctatcctcaatggtgacatggttcctcaactttttctgtcattttgaggacgagatagcttccaatatgctagtttcccatggattttccagcacgtgtccttcatgtgacctggttttcagaaatggtcacacctaggtctccattttcttggttagttgtcactggaaggatagggagggccatgagtcgctagggctgaaccctcggtgataagtttgagatcccatcatgactttctttctactttcttctcaacacacttttgaggcaacttcttgcatgttgggtaaaggtttagttcccaatattttacctcgaacttcattcagatttttgttcaatcgtaataaaaatttgtaggtccatttcttcttaatgattgtcttgtgtttgattgtgtctgttggacaatttcatttggtggtttcaaacatgtctaactcagtgttattaaaggcgattgtctgggttgcctaggccatcaaaccaaatagggcaaataaaagtcaatccttggaaacccaagcaagcagcttaaaaaaggcaacgcctaggcaattgccttacgataaggtgtaaggcataaaggcgaccatgagttaggattttttattttttattttttattaataaaacgggtgttgtattaaagaaaaggtatacatgacgtatatatatacaataaccaataagagcgataacacaaccgcaccttacggggaacctaacccatccataaaatctatcaaagaagtaatgctatcccccatgtacactctaacccaatcccaaaataagtacaaaaaagaacttttaaaagtttgatatcagcattccttatcctcaaaagctctcctattttattccctccaaatggaccaaaaaatgcaaagaggagtaactttccaagcctttttctttttcttgctaaccgagacaccattccaacttagaagcacccttttcacggaagagtgcatcacccattgaatatgaaaaatagcacaaaccagctgccacaatgtacttgctttcagagaatgcaaaaataaatgatctcccgtctcctcttcagccttgcatatgtagcatctgtttgacattctccaacccctccttctaagttgatcccgtgtcaaaatcttagcccaagttgcctcctaagcaaaaaagctagctctaataggggcccaagagttccacactataccgtgcggaaaaggctccactatcctacttgccagagaggagtaaaaggaccgaattgaaaaattaccagccttagtctccaaccaaacaatggcatcaaaagtacccaaaacaatggagtagctatgcaacgtcccgaataaggcatctacctcctgtaactcccaatcatcgaatcgtctaataaacctcagtccccaactacccccatcccaaacatctaccacctaatcatccttaaaggaagctatagcataaagacccgggagctcatccctcaatgacatatcaccacaccatctatctttccagaattttacccaattcctgaaccaatctaaagccatgttttatctttgaagtcctcccaaccatttctaattgccttccaaactcctacaccatacctcctcacctcctttgtgcaccactccccctcctgaatcccatacttgccaacaattacccgtttccaaagagggttctttaccatcgcaaatctccaaaaccatttacccaaaagtgctttattgaagagagggaggcttttaaaacccaaacccccattgtgcttctccaaacacacaatcgaccagttaaccaaatgaggctttttctccaactcccctcctccccacaagaaatctctttgaattttttccaatctggtcgctactcttttagggataacaaatagggacataaagtaaatgggcaaactagataaagtgctcttaatcaatgtttgtcttctacctttcgatagatattgtcttttccacaaagcaagcctttttttgaaccgttcctccacaccttcccatacttgtaaggagcacccaaggggaggcctaagtaaggggatggaagagaacccaccttacaacctaacacctcagcaaactcctccaaattaatcttgagacccgaacatacctcgaaccacataaaaacccaactcaagtactccaagttttccttgcttgcatcacaaaaaatgagagtatcatctgcaaagaacaaatgggatacctcgaccctcacatcattcctctccttaacccagaagccctcaataaaaccaccatcctttgtccttgagatcaaacaggaaaggatctccattaccaaaataaacaaataaggaaacaaaggatctccttgtcttaaccctttagagctgctgaagaaaccaaaaggagagtagttgaccaaaacagagaaacaatccgtagaaatacaccatataatccaacacaaccacttggagccgaaacccattttatccatcatcgctataacacaattctagttaacatggtcatacgccctttctatatccaacttgcatagtaagcctctcaagttagctttaagtctaaaatctatggcctcattagctatcaaaactgcatctaagatttgtctctcccccctaacaaaagcatgctgaaaatccgagaccaaagagacatgcttagattattatttcatctaatctaacattggattaaacaaagtagcagatgaaatattatattatcaatcataaagattgttgaatataatgaatttatagtgtacaatctttcctttttttttaatataggtcacatgtatggtagttaggactcctagccttgtatatatatattttctcaattgtaagtagacactacatgaatgaaaatcaaggttttcttctctctctctcttaacatggtatcagagccaagggagaaaacctaattctttccagtttccccgtgtcatcaattccgggaaactttcctgtgaccgtgtttcattccggtcaccttccccagaccccaaagctttccggtcggtcgaatcgtcgtcagaaaacattcatcgccggtgacttttccggcgaacttttccggcgacgtctttttccgacaccgcaaggagcgcctggaggagatctccaatttttcccatagcaccggagccagaaaaccactcacgtgccggccacgcgcgttttttcggctggtgactgcatctcacgcaccggcgcgtgagggcgcgtgagccactttccggtgacgcgcttcctcctccagcctcgcctgacgcggactagccaccttcatacctatttctgccatctgagccctacacgtgcctcttttggggttcttttgcctccgccagccctccgaacagtttttccggcgtcctccggctattttttctcaaccccaatccctgcacgtgccttgggaagtgttcttctacctttccggtggtgccacagttgtttttcttttctattgggtctctcacacgggcgattcttcggtttttccttctttagccgcatctgaagccgtattagggctctcttcgatccaaatatacttcattctccagataagtggatatggctactaaaacttccattttttcctctgtcatatgtggatctcctatgattacttcggagaaattggttggcagtgaaaattatctttcttggtctgcctctgttgaattttggtttatgggacaaggatatgaggatcacttggttacacaggaggcagatatccctgaggttgagcgcgtacaatggagaaagatagatgcccagttatgtagtgtattatggcaatcagttgatcccaagatccttcttcatcttcgagcctacaaaacttgttttaaattttggactcaggccaaaggattatacacgaatgatatccagcgtctttataaggtggtttctgctaatgtccatatcagccaacaggacttggatctatctacttatattggccagattgcctctcttaaggagaagttcttgacggtgatgcctcttactcctgatgttggggctcaacaaacacagcttgataagttcttcatggtccttactcttattggcctccgtccggatcttgagcctgtccgcgatcaaattcttggtagttcatcagttccgtccttggataatgtgtttgctcgcctccttcgtatctcgtccactcagaatttgccatctgatagcatttcagattcttctgtgttagtttctcacactacctctcgaggaggacgcagtggtaaccgaggtagaggccaacgtcctcattgcacctattgcaataaacttggccacagttacatggacggcctcctcgcactgcccatgtggcccagtcctctgattctcagctgcctcagcctccgagctcctctgcatctcaggcatctcaggcttctggttcctctgttgcccagcctggtaatgcttctgcctaccttacccacacatcttctcttggaccctggattctagattctgaagcttctgatcacatatctggtaataaggatcttttctcctctattactactacctctgctttacctactgttaccttagctaatggttctcaaactgtagctaaaggtattggtttgacccttcctctgccttctctacctctcacttctgtcctttatactcctgaatgtccttttaatcttatttccatcagcaaaatcactcgtactcttaattgctctattaccttttctgataaatttgtgaccttgcaggaccggagtatggggaagacgattggcataggacgtgagtctcaaggcctctatcacctcacctcgaattcatctcctgcagtttgcatttccactgatgctcctctcctcattcacagtcgtttgggtcaccctagtctctccaagttccaaaagatggtccctcgtttttccactttgtcattgctttcgtgtgagtcatgtcagcttgggaaacatacttgtgtctcgttcccaaagcgtttgaataatcgggcaaagtctccttttgagcttgtccacactgatgtttggggtctttgtcggactgcgtctactttaggatttcagtattttgtcactttcattgatgactattctcgatgtacttggttatttttaatgaaaaatcgagttgagttattctctattttccagaaattttatgctgaaatccagacccaattcaatatttctatttgtgtgttacgcagtgataatgctagggaatatttttcagccccatttacttcatttatgtctcatcatgggattcttcagcagtcttcttgtgctcatactcctcaacaaaatggggtagctgaacgcaagaatcgacatcttgttgagacaactcgtactatcctcctccatagtaatgttccttttcgtttttggggggacgctgttcttaccgcttgttatttgattaatcgtatgccctcctctgttttacatgatcagattcctcatttccttctcttccctgaccaaccactttatttccttcctcctcgtgtctttgattgtacttgctttgttcatattctcactcctggacaggacaagcttttcgccaaagccatgaagtgcctcttcttgggatattccagacttcagaagggttatcgttgttattcccttgagactcatcgataatttatctctgctgatgtcactttctttgaggactcaccattctttttcaccacttctgagtcttttcctgtttctgaagtcttgctccttcccattgtctccccatctgatgttgtgcctcctcgaccactttaggtttatcatcgtcgccctcgtgtcgctgctcctctcccttttgctaaggcacctgctgactcacttcctatcccttcgacttctcctgccccggctctgccttctcctgatgatttacccattgctattcggaaaggtactcgctctactcgtaatcctcatcctatttacaattttttgagttattatcgattatcttcaccctattctgcttttgtttttgctatatcctctgtttctcttccaaagagcacccatgaagctctttcccatccaggctggcgacaggcaatggtggatgaaatggatgctctgcactctaatggcatttgggatcttgttgttttaccctctggtaaatctacagttggttgtcgttgggtctatgcagttaaggttggtcctgatggtcaggttgatcgccttaaggcccgcttagttgctaaaggctatactcaggtttatggttctgattatggttacacattcttccttgttgccaagattgcttctgtccgcttgcttctctccatggctgctatgtgttcttggcctctttatcagttggatattaaaaatgtcttcctttatggtgatcttgccgaggaagtttatatggagcaacctcccggttttgttgctcagggggagtttggtttagtatgcaggttacgccgttctctatatggcttaaaacaatctcctcgagcatggtttggccgttttagttctgttgttcaagagtttggcatgcttcgcagtactgcagaccattcagttttctatcatcataactccttggggtagtgtatttatctggttgtttatgtggacgacatcgtcattacaggcagtgatcaggatggtattcaaaaactaaagcaacatctttttacccactttcagaccaaagacttggtgaaactcaagtatttcttgggaattgagatagctcaatccagttccgatgtggtcctttcccaaaggaagtatgctttagacatcttggaagaaactggtatgttagactgtaaaccgatagacacacctatggatccgaatgtcaaacttgtaccaggacagggggagcctttaggagaccctaggagatatcgacggctcgtaggtaaattgaactatctcaccattactcatccagacatttcttttcctgtgagtgttgttagtcaattcctacagtcaccatgtgataaccattgggatgccgtaatccgcattcttcgatatttcaaaagtacaccaggcgaaggtgtgttgtacgagaacataggtcatacttaggttgttggttacacagatgcagattgggctggctcacccacagatatacgttccacttcagggtactgtgtttttattggaggtaatctaatatcttggaagagtaagaaacaagatgtagtggccagatctagtgctgaagcggagtatcgagctatggctttggcaacatgtgaactcatatggttgagacatcttcttcgagagttgagatttggaaaggatgaacagatgaaactcatctgtgataaccaggccgcattacatattgcatccaatccagtctttcatgaaaggaccaaacatattgaagttgactgtcacttcattagagagaagatcgcatcaggatgtgttgctacaagttttgttaattcaaatgatcaactagcagacatattcactaaatctctgagagatcctagggttaaatacatttgtaacaagcttggtgcatatgacgtatatgctccagcttgagggggagtgttgaatataatgaatttatagtgtacaatctttcctttttttaatataggtcacatgtatggtagttaggactcctagccttgtatatatattttttctcaattgtaagtagacactacatgaatgagaatcaaagttttcttctctctctctcttaacaaagataataaaatggagggctatcaatctagttttgatggaagtgaggacaattttaatttcaatgatgactatgatgatgatgcctaaagcttctctagaatgctcaatctcttattatattttttattttgctttttagatgtctaaaaaattagaatatgcatttggacaagttgaatatctctaaacaatatgatgtttcttttgatatggggtataatatttaacactttaaacaattattactattttgttaattttataagacatcatgagtgatgaaaaattaatagtgttgatcgttgaagacaaaacttatattggttgggtatcgaataggtaaatatatgaatatttttaattgtcttactatagttaggctatcgccttatttttcgccttaggctaaaaggagtcttatcaccttgacatcaccctttgcttttgataacactagtctaattgttgccaatagtgagttagaagactgaaatattgagtgatagacaaatcatcttagcataaatcatgaaggattccttctatttcaaatgtgtctgttatgtcttttgtatcagaataagtttcccttgctgcttcctagatttattgcattgtttcagagtataaaatttcccctacgtcattgtttgaagatttttttttattattaattctcttactttctatagaatacaacatggtatatatatacaagagaatggtgcaatcagtcaccataaggaccgggactcaatcttaactgattagagaataaaatctccactaaacaaggaaaggcattaaattaggaactaataacaaaataccaaaaatggccttaacaaaccctagaattcctcactaactttaagctagaattccatattgttcattgagttaattaacgaagacataaccatattattctcagtcttccatcctttgaatttcgggtcttctttcataggtcaaggtattgcactggtgaggtagttatccttctctttatatcatatgaacttcatgattgggtgagactattgaagatatttttgcccattcagtttgtatctagtaatgagaagagcatcaccatttgatcctttattgttgcttggaataggagcttcttgagtggaggtgacttttgaggttggggagcccttcttggtggccattctgtgtttggtcacggatggattgaatggtttagaatcaactctgataccatgaagaaatttgagggagaaaaaagtacttctttatttttctcttattttcaaactgattattgtatcaatatttatacatgaatgactaagaccatctgctttagaaaaaaaatctaatcctttattttaggagaaaaagtctcataaaattaggatataaaattagaataagaaatacaactatatcagctaaaatacaactatattacaaccgtgatataactatagcacaattgttacacaactatagctgtaacacagctatgtacacaactatacaacccggatttcctctggatttccacaaaaaagaattcactagtcgatcaagcaatacatagttggttcttttgacaagttttttctaggaggttctctttagtttctttgttttttattttattatattatttttttcctttgtgatgtatttagaagtaaaatgaaaatttctttgaacttgtttttctttcttctctctctcttttcgtcctctatttgtctttctcttttgggatcacttttgaatctctgcccccctctccttctctctgtctttctgtctccgtatctgtttgtctttctctctctatttcttagcgtatttttgaaggctccattgttctttgagagaatgaagggaaatgctcaacaatggtttcactaggcatttgtgaacaattttgctttccttttcctcatcttctgagaaccaaagcaaatgatattggtaagtattcttttccatgttaatcttgggattgatataaaacccagaagcttttaaaataagcttgagattggaacctttttcccttacgtttttattagaaataacttttttttgacagtaatcacaattgaaccaaaagcacctaccaaaagggcacaaaaaaatatatatggtgtatacaagaggtaacagttcattaatgtgaattaaaaacacatggagttattcttgtgaaagattagagagttggaccaagagaagagcattaaactacaatataaaaactccagcccagaaaacaagaaactagagtctatatcttgaggtgttagaaaattttctataaagagatccaactgctaggtacctttcttagctaattggtctgatgtctggttaaccacattgagaaattcatgtgtaacaacatcctagagctctagttacattgataaatcgcataacggtacataaagcttcaacagatcttgcttctccattggcacccatagatgacagttgccaaatcttttttcactaggggattagaaagactctgaaaactaaaggccaagatctctgcctatatgattactcttaacactctgccacaatggttcctcagcatactaccaaacgttacctgtctcagttagcttaaaagcatctgtcaacattttgacatcggtttctgcaaggaatttgttttgctccgccgttccttaactgattctgtaaaattcaacaagaaaatcaaagtaaggattgctaagctatattcaaggtaatgcctgttggtatacccgttgacagctcagagttttgtcaaaacagcattttgggatgctttaatgccatgtgccccagcactctcaggccactttcccaagacaataggctacggagaaaggcttgctgagggagttataccctggtgaagaatccaaacataagttcacctaatttagcctgaaaaaaaaaaaaaaaaaaaaaaaaatcaacttaaatgaacctactagaggggagggagaagtgaaccacatccctgaaagactccggagtcctctactcccctcaaaaatcatggcattcctcttgggccatgccaccccaaagtgccaatggccacctgccaaaaaaccacacctctagtatgtcaaaacccttaaaagcagtgattattatgtcaaccatactcctgagaatttattcttcctcttagaaaagacgaaaaagatattcacaatctggtgatgagagacttttacgttctctcctaaccttaaaatcttccactgaacctaggtcttctgctttgttcaacaccctactacagacaattgccactaaaggggaagaggagaggaggcataaaggattcccctgcttgagatctgaatccattcccttgtccctttcactgataagaactacaaaacttgaacatgtcaaatgaccccttaatcatatatgccacctagagctaaagcatttcaaacaagcgtatgatgcaagaagttccaatctaatggttacaagctttttcaatgtctagacttagaaccatccttttctcctctaggcaagattctcatcaagatcttgtggctattgagactggatctaaatttttctttgccttaaccatggacccttgcaaaggagaaatggtttgatgaagggcctgttcaatgcacttagagagcgctttcactttatacactctagtactgaagttttcgacctaaagtccttgatttcattagtctagcttgcttcggaatgagaacattatggtaggattggtactagtactgatcatcttatgctggtagaataaaacttcttaaaaactccaggaattttataatggtcttgatagaaagccatagtgaaaccactggatcttagagtcctctccatatccctaaaaaatagcctcttttactttttccacttgggaaggcatattccccaatattgtcttctcttgaaatggggaccaatccaagctttctaatctaaagaaccagtaattgttttataaagacaaaagaatcctagtatctcacctgaaatagggtgctggttttccaacacttttttcagactggataattttttttccttcctgtcattagcctttatatggaagagatttatttcattgattgcttagggagggatcaggctgttcttgtgcctctggttttatttttggttcctttttccttgtatgctttgtgtggcttgtattctcccatatatatgggttgcgtgagtcttgcaccccactttttatatagctatgtaaccttaagggttaatccatttggattatactgtttagtgtgtccagaacattaatatttttaagagtagaggctctcctctcatagacatctccaaagtttaggtttgaaaatttattttccaaataaatatatgaccttcctctctagtggttgatactgggcctgcacaatattttctgagtgatggagccatattttctcaaagtgcatgggacctcacttgactgagttggattctgaaaccataggactcgtcgataacagggccagatgaaccttttggacgatattaggaaatctaacttctcactcattaaagaataagaacccatccatattcttccttactggactcttacaaactggaccaggagaaggatgcggtttagaagggggttgaccaagccacattttcttataacattatcaaagtcccttgcactcctatcgattctggttccactaaaatcctcactagaatcttgagcaacatgaacccccacccctttctgcacaataggctagaaagggaatttgcagcctaataaaaacattagtagaatagcaatgacccaagatttattcccctcctttcagtggctagactccattaattttttgtatgagtaagactcttaaaggcattattcagattctaatgctcatctatcttttcttctttctatatttactttctctgtttctgtgtacacttttttccacacaactgatgcttccttaaccctaattttgttctgaaattcttccatttggtcattaactgtaaccctactttcatacccacgaacttaaaactgaaatcccatattcctttcatgtttaaacattcctgcaagcttttccttttaatttcagcccatatccctaacctttagtctatccataaccctgaattctgcattttcttccataaaccttaaaaaccaatgcctggccattcattatttgatttggttagcagtttaagagctgtgctacatcaaaatggtttatattctttcctgcttcagctttctttgtgatatttttcttttcgttgttattacctatatcttatctcaacactgcacttagtgttgcttggagctctctctctctctctgatcttttaatagtttacaatatttctatatgttgattctacagttttagtctcatgattctatatccttgcaataatttttggaaagcgtgtttcttttcccgtcttttttgggtacaaatgcttggagatctatgtttttttaatagtcacaataattttaacaggtggaaagtgcagaatctt

SEQ ID NO: 13453 - DNA, 11287 bp, Vitis vinifera
  Intron number 1 from transcript GSVIVT01025145001 (locus G SVIVG01025145001) derived from phytozome v7.0 (chr-ID chr6 ; pos 3987205 to 3998491 reverse strand)
aagcattttttaagggggttttggatcattttgtcgtactagaattacgtgtaaaaataaaataaaaatggaaagcttgggaactgtttactagatttttcattttgtggtgtaagattgtcatgtttgaagggaaaagtttactagattttcacaaatttagtagataacccaagttttggtattttgattccatccttcaatgaggatttgaaggaaaaggaacaacccatatgtattatcctgtttggctataagtaatctatattttattgaaattttattttgtacatttgtttagatattcaacaattttttttttaaatgttttgaaaattggatcgaacaaccattaccttggtaaaattaaaaaggaaccaatgagtagactagattgaaagtttttaatttttttttcttataaactaggtttgaattttgataataacaaattatgattaagatattaatgacggttttgagcttcaatgcttaacttttcaactcttaagaaagagcaaaataagatcaagaaaagctcatagagggttggaaagttgaatatcttgattgagattctagagatttcctaattgtattttgtgtaaatataggattagttaaattttgtaaattaggaaagttaaaaatagattagtagttattttgttccttgattgatgctttgtatagcttataagtaggaaacttgtaaatctttttttatcatcaatgagaagttaatcataccactctgattcctcttcatatctgtcttttgatggtagcagagcaaaaatttcttttctaactctcttcgcaaaaaaccttaaaatatcttggactcaaataccagcatgctcctcttccattctagccttacaccatgtcaaaggtatcatctaaatttacccatgttactactttctacgttagtctcaatcggttcaaatgtacactctgggatgttgagaattccatggttatggcatgacttgtggatgccatggatgatgatattagttccaactatatgtgctatccaactgcaaaggaactttgacactatgagagaaacaaaggataagaacagaggataaaataggcaaagaggcccactcactttctgagtcttcttttattaagagttggaaccaagaaatttatacagcaagaaaaaaccaaccttaacaacccagcctattattcaatgccacgggacacaagaatgtctctagaagtttcaaaatgtttttttaacactcccttgcaagctaagcgtagaaggagagatgacgtttagtttgtcgcaaagtctgcagaatgaggataatgaaagaggctttgtgaagatatctattgtttgatcataagctgaaacatgttgaattgccaagattttctccaaaactttgtcacaaacaaagtaaagatcaagctcaatgtgtttcatccgagagtgttgaattggattaacacttaaagatacgatgctgagattatcacaccaaatgattggtgtttgaggttgtggaactcatagttctttcagcaatccctacaaccacaccatttcaatagtagcatttgctagacttcagtactctgctttagtgctaaaatgagaaatggtgtgttgcttcttggagctccaaaggactaggttttgtccaagaaatatgcagtagcctaaggttgacttcctatcatcgggattagatgcctaatccgcataaaaaaaaaccttcaagagacaaatgtgaaggtttggaaaaataaagaccatgatgaagagtgccattaagatatcgaagtattagtttaacagcttgccagtgagagttcaatggattgtgcataaactgagatactttattcacactataggatatttcaggtctggtaatagtagcatattgtaaagcccccacaatactccgataaagcttgggatctggaataggttcaccttgatgtgctgagagtctcaaacctccaaccataggtgttgaaaaggcctctgctataaccatcttagcctttcttaaaatatcggtgagatacttctcttgtgagagcaacattcctccattttcagtatgctgaacttcaacgcccaaaaaataatggagaatactaaggtccttgagtgaaaacttttgattgagtaggaagatcaatatggaaattacaagtgaatcatttctggtgataatgatatcatcaacataaaccaaaagataaatacatgaggtagaagtaaatcgaagaaacaatgattggtcagctttagaactcacaaaaccaagctgcaagagataatccttgagtttatcaaaccaagctcgaggagcttgccttaatcaataaagggctttgtgaagcttgcatactagtggaacaaaaattgtagatttctcaaaaccaaggggttgctccatcaaaactgtttcatgaataataccattaagaaatgcattattcacatctagttggcgaatctcccaattttgagcaaaaactagtgtcaaaactacctaaacaatgcttggtttaattattgggctaaacgtctttgtgaagtcaaaaccaggcctttgatgatatccctttgcaactagtatgtcttgtaatgagcaatagaaccatctagatgtctcttaagtttgaaaatccacttacacccaacaattttcttgtttgaaggttacgaaactggagaccatgtgccattagcaatcaaaacatcatattcttcttgcataacaacttttcataggggactttgaaaagcttcatgcactgtagttggttcaacagtagaaaggtcaattcttagcaacactctaggtttataaatccctgttttagacctagtcctcattggggggctattccccgatggtgctatggtaggttgttgagtttccaacagttctagttgaattgaggtaaaattgttactagttcttggacttgtttgtgttttttgagtagtagaggaatcaagttctttcaaagaacaaggggaaacatgattagacttagtgtgaagagtattaggatggattgtatgatgaaccgaggtcaacaatgggagccatgagctggtattaacatgattagagattgtagaatattcaggaacaattgttgaagcaaaaggaaacatgttttcatcaaatgtaacatgcctagatatgtagatcctaccactcagatctaaacagttatatcctttgtgtttatgactgtatataacaaatgcacagggaattgaacaaaattgcattttatgagaattatatggtctcaagtacgaaaaacattgacaaccaaatacctttaagaatgagcaatcaggtttggtgcgaaaaaagtatctccaagggagagtgtccatgaagaattgatgttggcaacctattgataaggaaaacaacagttgcaaaggcatcatcccaaaatttcaaaggtaaagaagattgagctaagatagttaaacttgtctttacgatatttcctttctacacgaccattttgttctaaagtatgtggacaagataatccatgagtgattccagttgattgtagaagtgaagttaatgatctaaattcactaccacaatcaatttgaagaattttgatctttctattcaagagaagttcaacttgagccttaaaatgtagaaatgtttgagtgactttagatttggattttaagaagtagatccaagtgtaccttgaatacacatcaacaaaactaatgtaatatctaaacccattcctagatgtcactgaagcagcaccccaaagatcagattctgttaaatgtgatgaatcattatatacagtcaaggaatttgagaaagacaatttatgacttttgccaagttgacatgcaaaacaaaaacgatccttctcattcattgaaaacttcaaattacaatttgacaaaacttgtttgacagtagagagagttgggtgtcctaatttcctatgccacaaactcaaaatagtaaatgacttaacattatcataattttgattggaagtagaaataataggaaaatttggaccacaacctcctattctactagatttaagatacaagacttggtgatccttggagctaatgggggaaactgatgtgaactagttgatgaaaatggttgagccttgaacaggttgaatcgatatagcccttcatgtagtctccatttgagcagaggtgttctcgttgctagatcattcacaatttaaatagatggatgaaactcaaagaatacattattttctctagcaaattgattgacattgatgagattgcgagtaatgtggggaacatgtagtaggttaaataacgaaaaaaaactctaggtgaattagaaaaataaagtgaggaaaaaccagaatgaacaatcatcaaacctgcaccattacccatatggatcttatttctgccataatactcagaaccaaaattcagattgctaaggtcatttgtaacatgatttgttgctcatgaatctgaaagctagttgtcatcattgagcaattccgaagtggttaacattgcagtcatcggacgtgtttttactaacattgttgtttgcaaagactaaatcatttgtgaacccagagaaatttgggttaaaacgatggtaacatttttggacagtgtgtccaaattttccacacaactaacattgtggtttagaaccaccattccatgaacaacctcctccacaaccagtacaaccttgtcctttattattttgaaattgttatgctccctagtaggattgagaagcttcctgattaaacctttgaatcccattgttgaattgtttatgctgattatgaaaaacaacattcacaaatggttgagatccatcaaaattcaccgaatactgctcgattcgactttcttaggctagtagcaaccctcgtacatcttccaaagagtgagaatcaactctagaagtaatgactaaaaccacataatcgtattcaaggccaagaccatcaagaaaatagagaatttggtcttcttttgatatctaatgcccaattgaaacaagagaatcaaaatacgttttcattttgagaagatattctctcattggtaagcccgatttcttcagactctggatctacaatttgtattgcataatcttagctttgcattgtattgcaaagactttgtcaagggttctccaaatatcattagttgtgttgcaacctaccatttatggtataatactctcactcattgaagatagaagccaagagacaagtagttgatcttgtctctgccaagtcacatactcaggattaattaattgtggacttccattgaccctagatgtcatctcagatggacaaatagaggttccataaataaaaccctctaaaccaaagcctcaaatcgtagcgagaccttgttgtttctagatgagaaaattttcatctgtgagttttactgtaactagctcacttgaaggactgatgataggattgagagaaaatgaagaattagatgaggtttccaatgaagtttccattgtagagctttgagtcgaaaactctaataccatatgagataaatagataataaaaacagaggataaaacaggcaaataagcccactcactttctcagtcttcttttattaagaactagaaccaagaaatttatacaacaagaagaaaccaaccctaacaacccaacctattattcaatgccacgtggcacaataatctctttagaagtttcaaaatgctttttaacaggaacaatatcaatcaaatgtaacttgatgagatataacaaggaggagacgtcaccatgtatttcaatggtctaaaaaggctacgacaagatctggatatatttcttgattacacatggaagaaagttgatgattgtaatcactacaagaaaatggtgaagaataacctaattttcaaatttcttactggtgtaaatattgaatttgatgaagtaaggggaaaaatgattggtcaacaacctcttcctccaattggagaggctttttagagggaagaaagttgtaagagtgtcatgcttggaaaaaaatgggtgatggatcaatagataactcaacattagttacttttaatgataatgcactactgcaacaaaccttgttataatcaagaaacgtattggaaaatccataggaaacccaaaaactagaaaagtaacaaacttggtaacataaccaaccacatgtttccttctgcaaacgaggtcaagacaagtctgagtttcttcaacaaaaagtagatggaccatcttcttaaactactaaaatccaattcttcatttggtattccttgtggttctttggcttaaacaagtagcaatcctagtgtttttccttgttgcttaaccattgcaccatggattattggttaaggggcatcaaatcatataaccagtctctctcatttatttaaatattatttaccttgttgtggtaattagaaagttagaattgtagatggtagattctcatctattgcaaggaaaggtttaattagaatatgaaaaaaaaaattaaaatatattcttcatgttcctaaccttgtttgtaatattttgtttgtgagtaaaatatccaaagattctaattgttgtgtcatattatttgattctcacttaatttcaagactaaagctcggggatgatggttggcagtgcgaggatgatagatgacctttactattttgatgacaactccttcaacaataaacaaactcaaggctagagtagtagtatgccaatgctaggatggtaaaaggtatttaataattttgatgtcaacttcttcaataataaacaagattaaagctatagtagtagtattacttcaatttttgttgttgaacaaacaatgctttgacatcttagattaagacaacctagttttccttatctaaaacatatatttcctactttatttacaaacttagattgctaattttttagtgtgaaagttgtcatttataaaaaaaaagccattgaatttcttatatttcaattccatatcgtgtatcaaaacctttttatttagttcatagtgatgtttggggtccataaaaaattaccactttatttagaaaaaaatggtttgtgactttcatggatgatcatatttaatcatcttgggtatatttgatgagtgaaaaatctgaagtaaaaatattattcaatttcaaacaaaaattagtatattttgcattaataatggaacataatattttaatcaatatttggatttttttttttgaaagaagaaggtattcaatatcaatccacatgttgtggtactccttagcaaaatggtattactaaaaaaaaaattaacacttacttgaagttggacaaccatgatgttttctataaatgttccaaaatacttatgtggggatgccattttagtagcctgttatttaattaatagaacgcctacctaagtttcaaagtatactataccattaaagtgtctaaaaaatacttttcctaaatcaagaataattttggatttaccattaaaagtgtttggtagcacaatgtttgtccacattcctagtcatttttatttttattttatccaaactagatctcaaaacaaaaacaaaaaaaatgtgtgtttacactccaaatttaaaaaaaagaaaaagaaaaaaaaagtataagcgttataaccctaaaactataaaggttcgtattagtatggatgtttcttttttggaaaatcaactatatttcaatcaaaactatgaaatatttgtacctttgcctagtcttttttttttcgagacaaccgatactccaaaaataattgttctaaatatcaatcttcctttgttgagtataaatgtaccacaaacaaagggagaaatgctacaaaatgattacaataatcctacgtctgagatcctagtttatactagaagaaatacccatcataagagtaaagatcaatctacaatcctagttcgggctcaatcataatccttaagatttggttccttaaataatccaggtaatcccttagtttcatttttttctaatgttgtgcttcctaatattgaatcattagatcttaacattcctatagcacttgggaagggcatccgaacccatattaagcatcctattgttatatgtgtcatatcatatactttccattaaccataaggcatttacctttaaaatatctcacatgtttgttatgagaaccattcaagaagttctagatcatcttgattggaagttagtaattctagaagagataaatgctcttagaaaaaatagcacttgggaagttgttgatttaccgagaaagaagaaaattgtaggctgcaaatgagtgtctatagttaaatgcaatggtgatggtagtataaaaaagtacaaggtaagactcatggcaaaagggtttacacaactttactactctaatacgatcacctttaccatttcttgatctcatttaccgtagttataatttatgaagataaatatatcaatttgatgatttataataagttttaaattaattttattgaacaactttaatacttaaagttataattaagtaataagttttaagtcaataaattaagtataatttagcttaaagttaatctaagttatgaagtaacaagtattaagttttatcaaacaccccctaaatgacatcttgaccaaatgtaatcactcataattatatttgtttgtttaaattggactttaagttttaacaaaataaagtttaagaaaagccaataaatgcgatagtgcttttgattaaggttcatatagtgaaagcttgacatacgctatcaaagtaaaaaagaaaccatcatagcatgcatttcatattgcatatgtttgaatgtgataaaataaggaaagtgagtgattaatccccgcatcctcagtgtgagaaatcttttggacatagcccattaaaatactttttgtatttttggccatattttgaggtgataaattaatattgctacttttttttttattttttttttatggaaatgaaatactttatccttacgaggcatattaggtaaattgttaatttgaatctaaaagacatgagctcaaaatgaatatttttttaggtcatattgacaaaaatatgctcacgtttgattgattatattgcttttgtatttcatatacttgtgaatacacttataataatgtaaagtatacaaatttgagggatggagtatatgcaataaaatataattaaataagtttgaggtacaatgagacattattattattgttcactcattttgttttttagttggactactatgtatccctaatagatacataagtttctagctcttaaattgtaggtgtgctcgcatggtcatatgacccatttgtctatatgaatgaccttcaaatgaggaacaagaaggacttgaatgttattgatcgggctatttcaactcatcttatgctagtaggagatgttgcagatgggtttgggtgcccaagtagattaactcgacttaatccaatatatttttaaaaaagaaaaagaaaaatggaaagagcaatttatgggagttttttttttaacaacatagaaactcctactgaaaataagaaaaagaaaaaatagcatatatattttttttaacaaaaaaaagaaagaaaaaatagcataattttttttttttaaagtgttctccctaaaggtcttttcttgaagtttttctatttttttttttatcaaaacaatggtcaaggtttttataatgtgaaaatcttgaatggttttcgtatttatagtttcattcatgactatgagaagaaaacttgtcaatgaaataatcaaattgggatttttatgcgtctctgaaagtaatcaaaaatgtttttttattaacaaataataatcaaattataaacactaaaccaaaatatatcatatctctaatccaaactaattgaaaatggatcattaataacttaatattaaaatcaataattatccaaaaaaaatttaataataattccaaaaatcataatcaagtaaagaaatcaaaagcatattgcctattttaagcacttatcccaaatatcatttgtacctaaaatatgagataatagaaaatggtgagctcaaagacccatagagaaataatataataagaatatttttaaataatcacttaatgattaagcttaataaccaaatttatttattttttcatataactccttattagtaaataacataaatttactttcaattcaaaataataataataataataataataataataataataatataatgtcatttgtataattagtttacattaaaaaaaacacataatacataaataaaaatattttactttaatatatcgatgattcctaaatcattggagaacactatcgcatgactactccttccatttaattatttatttaatcatatcaaaataacccaataatttatttatcatccatttcactcgtataaattaatttaataatcaaagtgatatttcattataaacattaaaaatattttataattaaaacattgaataaaataataaataaccacaaaattaaaattttaatttaatttctatgttaacaaatatataataattaaaattaaataattaagatttaaaaattaaaaattaaatgttaaagcactattttaaaaataatattttgtaaatttaaaatataaaataggaaaattaatatactgccttttttatcatttatttaataaacattattattattatttgaaaattcattttccatatatatttgaaatcccattttaaatatgatttcagaccaattttttttttttaaaatgataattaaaagataaaatgcgatggagaaacagataattttaaataataatttaaaaatgttcaaaatggatatttgtttgggtaaaaggcttatttttaacctacgctctagaagtgtgaaaccaaatcggtactttcggtaggatgctttctataacgccgccattgactctagtcaatataaaaaaaattaagggtatttgtgtaattacacgtcttgcaaagccctagccgtcccctttaaatagacccaaagcctatcctgcacctctcgtctctcccacataccctcttctgtttgctgtgttctctcgctgcggctagggttttagcacgatatctccttctaacggttcgat

SEQ ID NO: 13454 - DNA, 14255 bp, Vitis vinifera
  Intron number 5 from transcript GSVIVT01023608001 (locus G SVIVG01023608001) derived from phytozome v7.0 (chr-ID chr1 1; pos 7934618 to 7948872 reverse strand)
caggtaaatgaagacctgttttgctttcattttttatttttttatgcatggataatctatagagtttttttataatcaatatttatttcctttattgggaactctcgaagctcttgttagcaataattccttgtaaatataatcttttaggggtttttgacccataaatttgttccacaatgatatttatgattgcctagtgggaggtgaatacgattttttcaaagcttcttttcaattatgcctttcaacaggactcctcaagaaactcaatcaaccaaatacagggagtcatgccaatctaaatggatgtttaatttaaaatagtggcaattactaaggacttcataagtgcgacatataaatatgttaagagttcaatggtcaaagaaaataaagaagagacaccaaatttataatgcctcagcctcaagcctaaatccactcctggaaacctctttggtatcaatccaataactaaactacattttcctaagtttacctaaaaccattagaagttaaaaacaagagatgctgtggcccaatttgggatatccttttttcttttgacttcagctagaggggtaaaattggtattatagaagtttcattaaacataattttttttttttcaaagtgtaagaattgtgttatagaaagacgctaaaattttcagcataaaatggcttttagcataagccaaaagagagagtttatctgataagaaacattttccttgcttccatatttagctatgttttaaggctatatatatatttgataaccgaggaaccttccatggccaagcccttaggactctccaccaaactttggggtgttgaccgttctacaacaactaacattgggtaaattcagggtatcaacagtgacaggatttgaacccaggaccatgtgccacttactgggaccacacttcccagtgttcgccctaaccaattgggctaccctgatgggtgatatacatacatatatatatatatatattaaaattgtttcactcatcctcgctcaattttacttcatccaccaatggggcagattgtttattctcacagtcctagacctaacgtgccaaattcaagcgtgacacaccaatgagaactcttacccatgacctagaggtcattggagcgaagtggggctctccgcctattggtgattgtaattcctctgacaagggttgcctaggactctgataggtacatagatatgctcttgacgcacgttagctccccctcggtggttgtatgggtagctaagttcaaaacccaactgagggatcgtgtgtaatagtcgtgggtgtctatggtattagagccacaggaagggaagtcgggtgaatgtattttcataagaaagagatgttgtattctcttaagcaggatgtctgcctattgatccaagaaaaagctaaagtcatggcggaagataaacaagtttttatttctttttatcttcaaaaccttcatctttatctcttagccatccctggcctgcatatcccaagtttaaaattggtcaaggacattgattttgacgattctaagttttgtagaattgttgaagaccccgtcctttaccaacaaggtattaaacacctattctgcaagtgcaacaaaaattttatgattagtcgtgtctacctagatttgcattattacaagtcaatttgttttccattcaaacatgatgaattgatcctaactccaaagttactcttggattatggattggttcatcaaattgtctgtttagatcctattcagacaacaaattttggaagaaagttggctttaagtttgctataaggatttaagatgaataagaagtttgtcaatgcaatcatcatcagtaaaactctagaatggattttttatggaagcctgttacccgcacaacataatatctctctccattatcagaacagaaggtcaactctgttatcctacccttttgatcatactgatccttgtcctgagcctattaaaaatcagattaagtactggagagctagaattatcagcagcgactttgaggcatttcctaaaagtatgggttacttgatcgctgcagactcctttcatcagatcttctgcaacaagaaaattgatcatctccccatcaaatccattactgaggatatcaagttacttgatgaacattgaagggattatcttctcccttgattttcattaagacatagtcgtttaagcatgccattttcattgggattctccaccaacaactttaagatagtttagcaccgaaagtaagtttgttccctgcatgtgaaaccacaaagtggagtgttctcaaaattgtgagcgagtcaaggaagcttgggtgagtagtgggtttaccgttgcacttttggattcaagaggtgtttagaaagattgcggaaggctatggggggcttgttacagtggatgaagacactgctcttttaaggagcttcaatgggctatagaatattagtgaaatctgaggggttagagtggccaagctctttgcaggtggtagttggctcttcttgttttgttattcaattgtggtgggaggtacaaccaagggtgtcggaagttgctccgatgttcagaagtgggatgggaaaggagcaagaagttagggatgatggagggggtggttcatgcactgattgtaacatggagtaggtacagactcattggcaatctgcaaaggtggttatgacatgcaaagttggagaagcttgctgcaaaaaagacagggaggttgctacttttgactttgtgtcggcaagaggggcagaggacgaagagatcagaggaagggtgtattctgtttgggaggaggtctcagatgaagggcatgtagcctaaggtagttttttgggccaagtaatggagttggatgtggaaaggaggcccaacgggtctaaggaaggccaaatcagtggcgttttaaaagacccattggaagtggaccgaaccatgtctgttttagaaggtccagcgttggtgggccgatcctctgctaaagcattaaatggggctagggctcataggggccttccagacattgactgcgggaagccagacggggatgattttggctttcagatggggtcgtctccaccggcaccaaatcatgcaaagattatcgacgaagctttgatggaagaggcctccaggtacataggttataatttttgttctctgttctctttgggaaagcaggatttctccttcttctactctttcagggcgggatggggtaatcgtcatcactgatgggggatccgaatggggttgtgtttcagaagcagttggggtagcagttttgggccctttaagggtgattttggcggataggagggaggcggaggtttctggtttatcaggtaaggctaatggggctatcgaggaagtgataagaggatatttcagaaagggctatacaagaggttgtggaggagagggacggagcgggtgatccgagctggtattccagttgcttggttaagtttatccgctgcttaggaatgctgatggagggtttcgaaggggagattttgattttgctgaaaataatgagagagaggaaacttcaaaaggggaaattggatggtaggaaaaggaaaaaattggagtcgtcaaattgaaagggagttgaaaaagctgaaatgtactgtgaattattttcgaggaggaggagaagggggatggggtgtagttgttgcaagtctagatgaagattcgtttgctttcatggaatgtaagaggagctaataactgtgataagaggaaggtgatcaaagccttgataaagaagaataaggtggatttggtttgttaacaggaaaccaagatctaggaaatgtcaagaagtcttgttcgtagtttaggagtagggagatttttagaatggggagctgtggattcaaggggtgctgctggaggtatagtggtgttctgggataatagggttttagagttggttgaactagaaaagggagtgttctcaatctcttgccattttaagaattgtgaggatgacttcatttggacttttacatgggtttatggcctgaccctgagaagggatagggagtgtttctagggtgagttgggggccataaagggtctttggaatgggccttggtgtgttgctggggatttaattccattttaagccctaaagagcgtagcaggggagggagtttgaattcagacatgagaaggttctcaaaagtaatagaagacctagagttaaaggacctaccgttgcttgggggtctttttacttggagtggaggggtgaataatcagtcattgtcaaggctagatcgttttttggttaatgaggaatgggactgccgttttagtggatcgaggcagtgtgtcctcccgagacctgtatctaaccatttcccaattcttttagatggagggggtctaagaagagacccctcaccttttagatttgagaatatgtggctaaaagtgaagggttttaaggatcttttgaagtcttggtgggagggggatagctttagtggctcttcaagttttattttggcagaaaaaataaaggtcttgaagtctaaatcgaaggagtggaacaaagatatttttggcagggttgaatacaggaaggatctggctttggatcaagtggaattttgggatgctaaggagaagactagcagattgtctttggaagagttggaagctagaaaagatacgagggaagaatataaaaaatgggttttgctagaagagattacttggaggcaaaaatctagggaagtgtggctgaaaaagggtgacagaaatacgggcttctttgacaagatggccaatgctcacagaagaaggaataatgtggacagaattaggattaatggtgtttagctttcggaggagaatgaaatcatggaagggattgtcaatgctttttggtctttgttgtccaactcgggggattggagtcctcctttatccaggctgtagtgtgagactttagagaatctggatgcttgtgctttggaggtgtcgttcacggaagatgaggtgtttggtgcactgttgggatgtagtggggataaagctccaaggcctgatggcttctctatggcattttggcagtttgtttgggactttgtgaaagatgatgtgatgagtttcttcaaggaattctatgaacacggtaaatttgttaaaagtctaaatgcaacttttctagttttaatcccaaaaaaagcaggggctgaagatttaagggattttaggcctataagtttgttgggaagtctgtacaagtggttggccaaggttttagccaataggctaaaaaaggtggttggaaaggtggtctctaaggcacaaggggattttgtggagggtagacaaatcctagatgcagtgttgatagctaatgaagccattgattcggtcctaaagaataatgagaatggtattttgtgcaaacttgacagagagaaggcatacggcaatgtggactggtttttattctcacagttatgcaaaaaatgggttttagggagaaatggattgggtggatcaagtggtgcatatccactgcaagcttctctgtgttggttaatggcacatatacgggtttctttcatagctcaaggggattgaggcagggcggtccactttcgccttatttacttgtgattgctatggaggtttttagctcttttcttaaaagggttgtggatggaggttttctgtcgggttgtaaggtgaaggggaggagtgaagaaggggttcaaatttcccacttgttgtttgttgatgatactttggtgttctgccaagcttctcaagatcatctgacctaccataattggttacttatgtggtttgaggctgtgttggggttgagaataaacttggaaaagagtgaactaattctagtagggagggtagagaatattgatgatcttgctttggaatttgttcatagagtgggtagtctcccgtccacttatttgggccttcctttgggtgctccgtttaagtcaatgacagtgtgagatgaagtggaagagcagtttcgtagaaggttggccatgtggaagagacaatacttgcctaagggagggagggcgactctaatccgaagcattttgtcgaatttacccatttattttgtccttgttgcacttgccaaactcagttagatggagactagagcaaattcaaagggatttcctttgaggaggtggtaatttggagcgaaagccacatttagtaaaatgggagttggtgtgcttaagtaaggagaaagggggtttggggtcaaatgtctatccaatctcaataaggttgttctttgtaaatggaattggcgttaagcaaatgagagagaggccttgtggaatcaagtgattagagggaagtaagatagatggggatggtgctctcgagaagtgagagaggcgcatggtgtggggctttggaaaggaataaggatggactgggattttatgggctctaggattttattccttgtaggtaatgggcggagggtgagattttggagggatagatggtacggggattcccctttgtgtgtgtcatttccttccttgtttgctttgtttgttgataaggaagtgtgggtggcggatatttgggaccccttggctaagaggggttggaatccctgtttttcaagagccttcaatgattgggaggtggaggaagcggaaagattcttgaagcggcttcatgggaagagagtgcatggagatgtggatgatatggtgttttggaccgaaacaaatagtgaaaagttctcggtcaaagcccctctaccttgctctagaaacgggttgtccttctttgtttccttctagctgcatttggaatgtgtgggtacagcccaagattagcttttttgcttgggaggctacgtggggtaaagccttaaccctggatcttgttcaaaaaagaggatgggccttggcaaatagatgttttatgtgtcttaagaaagaggaaaccatagaccatcgtcttctacattgttcaaaaacaagggtcttatgggatttactctttaatttgtttggggtgtcatgggtgttgccttcatcagttaagagagactccttagttggcatggttcttttgtgggcaaaaagcgcaagaaggtgtggcgagcagctcctttctacattttttggacggtttggaaggcgagaaatagattggccttcaaggatgatgtgttgtcaatccaaagacttaaatactcttttgttcttcccctttggtcagaggccaagttgtttatagttgattgccctctaactattgttagttttattgattggttgggttctaactaaggttgtttgttgggccagctgggtgtttttcttcttttttggttgttttggcggtgggtgtataggtattgtataccttgagtcgcttttttggcgcctctatttatatgagatttttccttacctatcaaaaaaaaattatgaggcctctagttgattactagcttaggtgtttctctttctaattcagcttgtttctgggcatagaaggttgaacaactccaaggggacttagactttcttatcaactacttatcaagaagattttggatctccttttcacaatagcttaataattctttattcatctggataggtctggctttagtgggaatatttttctcactaaaatctggttcataaggtaactctacctcatgctgcttcctgtgccaaaacgcattaagaatgttagagtaaacttctccaacaatcttattcttaaatctttctactacatcttgagttttcttaccttttaattgttcttcaattcttacaagattaatttcttgatcacctgatcccttaaagtatttatactcttttcatcaaggagatcagtgaattcaaagagaatttccttatctaagagtgttgttcttaaaccttggttatctactctaatagggtagatagggtttaaaaagggtactcctagaagaacctttctcttcaagtctctaactagaataaaggtttgcttactataaatgtcttggttacaaatgtgcgcatttgacaacttgtaatcaatggtaagtcttttaccattggctcttgaaagtgtttgcttagttttctcataaaattgggttggtactaaaccttcttgtaggcaattcaaagctgctcctgaatcaatcaaagcaactgtattaaggacatacttatccttgattactccagagccacggctcaaattaaagccatgaaacaggtagctggcaaatcaaaattggaactggcgcaattcgcaaaattagaagcctttgcgcaattctcttctgatcttgataaagctactcagaatcaattagcaagaggtcaacgattacgtgaattgctcaaacaatcccaagcagcccctcttacggtggaagaacagataatgactatagttaaggagacttcccacttttggaaaacaaccctactaaccgtattcaagtatgaatctgtctcttcttcattgacttgggaagattttagaacctcttcaaggtttccttggttaacaacaatcttgttgatctggtcttggaggtctataaaacctaagcttgtgaattgtcttaaatcctaaatttctttcttatactgtcttatttcttcttaaagatccttaatggttgtctttgggggaattctgattaattcttgttaaaatttcatttaggttgtaaggacttactgtcttcttaatttatggcttatggacgaatttcttaaagacttcaaaaagttcttgcttaacagtttcatcttctatttttcttaaaacatctaaaactaactcttgtttttggcttatgacatttatagtcttaggatggcaatcacaattgcccttaatgtaatcttcttgatcactagatgtttggctcaaaatctcttcatcagtatctagttgattaataccatcttcattatctgaatcagttcttgatccaaattctgaggagtttaacattactttgcaaagcatatcttttaaatcttctaaaatgttttaagttattaattttcttcttaaccttacaatctttcgtatagtggcctaccttaccacacttaaaacaaaatgggttagattgtaaaggggtttctaactttttttgtgcttccttgtttatcctcctttggatgtgtcttgatctcttggtttcattcattctgtacttcccatgagtacctctcttgttatgataaaagttttccttactgggctttcttgctacttgtcttttcttacgttgcttagaagggggcttggtttccttttgattaaacccaaattagctacaaaatgtgccaaactcattcttgtagatcttttgttcatatttcatttgttgcttaagcttaaagtcattgcataggcttattccttctattgtaacaatgcttataatttctccatatgttagcttatcataagggatttgaccattaaattgttcttttatcttaatcctaatctttttaaagaaaagtctaggtaatcctaagatgaatttttctttttaaaaagattgattacagtctaatcttagcatgactttggttaggaatatgtctctataccacctgaagtcatgaagcttgggacacttaaggttggttaagagatttgcagtcttgtccttaatttttgcaagatctccaatgaagtgttttgatatggaaaagattagagtagctactacatcctctatatcttatcctttcgtccttaacaacttcattgccctcatttatcctataggcttttaggataccattcctatcatcaagtgtgagatagttatcctaccatccttttagttgacctgtaaacctaacaagtgtctgagctacaacatgatctgacaggctattgtttaacttataggttttgctaaccatagtcatctcttgaagcttagtatgttatactcaattataccatctatattccattcataaatggttccactagtgtaagaagcttgcgtgtattggtttctttccttatactgcatatcaggaaaggttggcctaaggtagaaattcctagtcttaggggtttcttggttatggataattcttaaaactccttggtcttgtgattccttaaaaatcttgattagttcatcagcctctactacggaactaatttcttcatcaataacaataattctcctatgagacggctgaggtgtctctgggacaattgagctatcttttacttttttactaatcctttctattaattcttgattaacataaggattttcgtggaattgtttagagaactcgaatggcttaaataaatgcttagtatctttcttaacaaaagatgtcttaatatgatcttgggtttcaatgatcttttcaaccctattgagttgatcacctaacgtcttaagaaacatgttagtgtagttgttttgttccattattttcttaacatctattgcactagcaattcctttatcctctgttttagtcttaaaaggtgaagctcttattattgtaccataaatattcttatctatcttagcttttggagagtgaatggattatatgacagtttcgtcactagttttccatatcttagtttttgtggatgtgttgttaatacgcttacctgggtactctggatattcttcttgtttaaagagtgcaaaccaaatccaatacttaacatttttctgtttttttcttaagtatgtgtaaaattcttcttgatagagggttttaaggtcttttgggacttttctaaagaactaatctcctttttccttgttggcttctaaatagagtcttgtcttatgagatccttattaatcttaaactcttgacttacggtgttaatcatttgcgaatatgtgggagacatatccgatgattcatcttcttgggtagactccttttcctccgtgtaaaaggttctggcaaggttggtgtgactcctaacacttgttagcttattcttaggattcgtagaagtggatccttcttctatcctagtggttcttactgggatagatgaactagatgctctagaaggctcataatctcaaattctagggttattagaatgtctgaatgagttggagaagatcaaatctccacctccatctgggtattgaacaatctattcaatcctctcagatctttgttctaaggctggaacgacattggcgaaataccatgaatctggaaactcaacctcattccacatgatcctttttggaattatgaagtttgacttgtttaggacatctgagtggaagagtatagtttcacccttaagactggtgcacaatgctctagatccaacacttgtggtcatactcttatagacaaatcttgtgatgatggaaataggactgcttcctttcttaaacttaaatccatgggtcttaacatggaggataatcgaatctaatatgtctacatctcttaatctaactgtgaagttagggtaacactggaagtaaacaggaccaccattcaatcctgcttggaccactccaataatagaatctcggtaatcaagatgtccattatccctaacacatgacaattgagatttttaaacctattcttgtcaaaggcttagctgcaacttgaatcataccaaagtgtatgaagttgaagtctttcttatgtctctctatggatctactatccaagagtcttatcacttgatcttcctgctccaagcttatggtctgttcaagtgtcttaatggtgtagtatgtaaagaacttaaaggttcctttcttataaatttcttgattagataccttggataacttccaatcatctaaatcattttaggtcttaggataattgatctcttcactgtttactacaacttgaaaatttgtgggtttcctagacatggttctaaaaattgaactcattttaaggtcttaatctagagcctaatagcagattgacaaacctaaaggagtaatcacctaatacccttttcctaccctaacaacgcctgacactggctgacaacgggcacaacttggtaagggatcgcctcaggcagactgctaccttcctaggatagattaaaaactcaaaacaaacccgaattcctttcctgtggctctgataccatagacacccacgactatcacatacacatcctcagttgggctctaaacccgactgcccatacaaccaccgagggggagctaacgtgcgtcaagagcatatctaggtacctattagagccctaggcaaccctcgttagaggaattaccgtcactagtaggcgaagaggcccactttgctccaatgacctctaagtcatgggtgagagtttccactagtgtcactcctaaatttggcatgtcaggtcgagggctctattaagaaaacgcctgccctaaccctggcgggttatatatatatatatgtatatcacccaaacaggtacaaaacctcttattgaacttaagagggaaaaaattgactttatgaagtcaatctacaaggggcctacaattacaactctagagcttatagcttaatcttcaccaagaaaaaaaaggaacagcatgcaagagttctaggataactccttttacaagcttaagtaaatcaaacttacaaagtgatgcaggatctttagatttccagctcctaagaaattccttgagttataggacaaaatgaaaattaaaaagataaaaacgaaacaaaagaaaagaaatgatagatattttgaaattacaccgagctcctaggcaatcacaccctcaaaggaagcataataggttttaaaaacttctattaagaattcttcagggactacaaaggtatatgtagactcttatgattctcttgatacaataactttcctactacaaaggtatgtatagactcttatgattctcttcctcactcactatctttccttataaggacaggtaaagatagaaaaggaatattatttagaaattaaaagaaatagaaaccttcctaatataatgagaagtctaaaagaaatgaaactcagaaaaaaataaaccacattctaaaatagaaacttaatgaaggatccaactaaacttataaaatgcttaattactaaactattctttttaaatatttttcccttattttattagttttcaaaaggtgctctccatgccctaatctttttgttgttggagatatcctcaaccaacttgagctccacaacttccttttttatgtttagtgaatgcttgaaggttctgtcacgaaatgcaactcaaatcaaagcttaaggagttagctatgggtttagagctgttaaagataatgaaagtacggcccaatttttttcttacagtttcttagtgttgtaaagctccaataaagtgatttaaataaggaaaaaacaatctaatggctatatttgagtgtactaaaagcactatcagacaggcatttggtcaacttaaaaaattgatggttgagtggaatcccaatggtaaaagaccttgctagcaccagagttaaaagggaacggatgttggggctattggccccagcttgatgcctgtcaactggactgaggtactggcctccatcaagcaaccagttcaaagaaaaacaaggccaggggcttctggccctacaggtcaactggatagagacagaagcttcaatccaagcaaccagatggatgcagaatcctacatccagccaacttggatgcaagacacaaaaaataagcattaaataagaggggggaactctgtgtggaaaatcttcccaatcatcataatgtaatcaatttgggagaggaataggtgcatttttgatgaattatagttaaaaacagatgaataaaaggtttttgctccttcattgtttgatgatctcttacagttttttcagctaacgtagtcctgctgcctgccattctagttttagtaacaaacttacttgaaaagagaaaggggaaaaaattgtaaaataaactattcaagtctttttattatggccataaatgtctttggtggtaattgttgatctcttgctttgaaaaaggaagaaattgtagtttgtaaagcagaatgtgctgagatattgggttttgtgctctttgacagacctatcttcagtctcttaccatacggcttgaaga

SEQ ID NO: 13455 - DNA, 7004 bp, Vitis vinifera
  Intron number 1 from transcript GSVIVT01020728001 (locus G SVIVG01020728001) derived from phytozome v7.0 (chr-ID chr1 2; pos 2622661 to 2629664 reverse strand)
taacaaggtctccaggcgcttaaagaaccagaaaagtgagttctctgaaagattttcgttctgtcattgtttatttttttactttctggttggttgccgaggatgctgcggagaaaaaaaaaagattccttttggttctggggagaatgaggcattatgatggtttcttacgataattttgcttttatcgagccggaaggagtaaaaggaaatgaaaaatttgaagttctatttccgctgcaaaatttgttatattgattcaatgatctgagcaggaaacacgagagaatggtaaaaatcatttctggatatggtatgaaaactagttttagggaaggcgaatatgcgttatagagattgtcctaatttgcgtttatggattgtcaatcgatggaacaaagatttcatcaagaagtcatcactaagatggccactgcagaaatttagtctaaaaactaattcgaatatgtgaggagattttcaagtaggtcacattggtgccaagtgaagggccaccgacatgtgggcctttttcatacaattgcagaggcatatacaaaatttggtgaattggaaaatgacattataaaatttatatgatacagtagattataacaactctagatggcctgctatagtgtaagaagactaaagcttatgatctccaaattggtgaaatgatgtgtgcctcaaagtttgcacatgctgttgattacaagagagattctgtagccatttgctaagtgtgcattcttgatggctttacccattttgaaatatatatatatctgcgtgtgtgtttgtgtgtgtatgtgtgtcttttatgggaaaagaccaaatccattacaagcgcctagaaaaagagcgcacaaaagtatacacagtgtatacaaagacaccaaaaggccatacaaagctgagagagatacaaaaaagaatagcctctccttagagcccaaccaatcaatgaagtctactatggatattgagtaatttcctatgtacattctaacccatcccaaaaaattacaaataaaggattgtttgtgtttatatgtatgtatgtatatatgtatatatgtatgcatgtacatgtagactcacacatatgtgtatatataaatatgcatgtataaaaactcttgagacatctaatgcatgagactatttgcatctcacttttagccctaagcttaaaacaatttgttatggttctttttccaaatggctgcatggaggaaccccaaccagattgcgaaagtaggaaaagaaagtttgtggtgcatcaatcacctatgtcctctccaccgtaatctgtctctttctttgtctctcaatgacttatctattaacttgttatgaaagaatgttatgtgtttctttaagccatttgcatgagatttgaagctagatgatctttcatgctccttatatggaaaccatacccaatcatctcctttgaagaaatgaagtcttcccaggtatgcctttgaccatttgcctaaaggttatcccaacttaaaagtccatattggtgacataatgggctgctcaacttgcaagatgtcaattaaacagctaccatcaataaaggacactatttctttattgtgatctttggaagagcaagataatgctctatataaaattttattagagaagagaaagcatgtaatactcatccatgcacaaaggcatgagccttctttggcatgattagcattatgggcgaggtatgagagaacatactggaccgaccatgacatttttctgagcatttctttcaaccttaattaccttcttggccaatatttttttttgatagataagcgcagaatatattgataagaggccagaaagccacaacgtatacaaggagtatacaaactagctaagcctcacaaccaaaaggaaagcaaaaaaaccccaccagcccttatctggaggctacccactccaagaagcctataagagacagcgaactctctccactatacagtctcgctcaacaccatgaattacagacaaaagaattttttaatttctgaatatctatcaccccctccccctaaaatttagcctatttctttccttccaaagagaccaaaagatgtacaacggtatagatttccatatctttttccttttttcccctacaaaagggcccctccagcttaataagacctcctttacagtttctggaaagacccactgaacaccaaacaccttcttggccaatattgatgtcttgtgatttcatcgggtgaagttacttgctgtgtagttcaatctaagtgtgccctcaaactgttataagctttaattgaatccaaattagctaactgaaaaccagcggagcatcttgaaagcctaaaatttctggctactagggctaaatctgaggcttttaccttagctgttgaattggcttctttgattgagaatgggagggctgaagccttacataaaaatgggtttgagctatttgctgcctgcgtgatataggcttggactggcatctagctttacttttgctattagctcttccttgtgcttttgggagcaatagcttacaggagaagggacctttgcttggggaggtattagttagtataaaggattacataccctggatggctgattaagtagcttaggacaggatcttacaagaaaagctaaaaaataaaatatagttcaacataatctgataaaggattttttaagaaagctacaaaataaaatatagtaaaacataatctgagaaaggattttttaagacaacacaaacaatgttgtcatcctcatgactcatgggcgacttgaaggaggacaagaattctttatgaatacttataatagcctggcacatatattatttcatttattaattgatgcacaaatacagatttagtagaatgcataaatatgatgaaatctggttagaaaacatctgagaatattgtttatatgccatggataatagaataaagttggttcctttggaaatatttgatcatagaggtcactagtacattgaatattagtgaaccagatttcgtttcatttgtttaactttctttttcactttgtatctgatctattaatttagaagcttttgtgtgccttcttcaagggtacaacagattactaaaacaataggtctttctgctagtttctcctagcagtaaggcaaatgaagtttttgcttccatggattggattcctaaagcatggactcgacgactgcatatgttttctcaatggatcaatcatttccaattgggcctgcaaatggtcatgtattggaatctgttatagttatgggcaagctgatgccaagagctccctcactcataacttcttccccacctttgggaatcattgatgttaagggtgccaattttagttatgtaaaccatgataactgggccttggaatcaattaaaagcaatgttatggaaccagaagaagtgggtcatttccttgggaagaagtttttgggcttgggaagcagtttgggggaggatgttagcattagatgagcttaaaaggagtggattaatgtttccgaaccaatgttctatgcgtaaaggtgaagaatgatctcttaatcattttctcctttattgttctaaagtaagaatcttgtggctactagtttattctttgtttggaagagcttggttgatgcactctttagcaagagggaatttcttgatttggcatgggtccatgttgggaagaaggcaaaaaaggcttagagggctgctcttttgggcttgttttggactgcatggaaggagagaaatcaatcacatttggaaatgtgtaacaggtagatcaaacaatcaaattttcctccaagtgtatttttttagagtgggttaaaatatacataaatgattattgaatcacatgataaactttatttattggttgagttctaagtaaggggatgaagttgttttttgtttctcttttcttttgcttgccttttggtacctatcatatacgttgtgtgtacttttgtgcactaatttgctagccactgttaatatatttcctcattgactatcaaaagggaaaaaaaaaataattctggaacctttggaaggttggagtagtgcctattggtctagctggagtattagtctagaaaaattcaaagggacttcctttggaaaggtggggcattggagaaaaagatgcatcttgtgaagtggccaaccatgtacatggagaagagtaagggggttggacattggatgcctttctttgccaaataaggtgcttttatgcgaatggaattaacaatatgtaattgaaagaggactcttttcgaatcaggtcattagtggaaaatatgggaaggaagagggaggttggcaatcttgtgaagtgagaggcgggtatggagtcaagctatggaaatctattaggaaggatttgaacaccttttatactagatcttcctttgtggtcggtaatgggaggaatgtgaagtttaggaaggataaattgtgtgtggatgaacctttgtgagtttcattcccttctttatatgccttagactgttgagactattggaacccttgtttctctagacttttaaattattgataactggacaatgtaaaggactcattttcaaggttgcaaggagtgacaatagatagtgagggtggaagacaaggtgacgtagatgaactcgataaataataagttcccaattaaatctttatacgttgccttggaaccaagggaatcagtttcctctccaacgagtgtaatttgaaattcatgggtgccttctaaagaaagtattttcatttgggaggctagctgagggaaaggtgttgaccctaaattagctttcgaaaagagggtggtctttgatcaatagatgtttttcttttataaagtagagaaagaatccatatatcacatccttcttcactgtatcaaggcaagggtcctttgacaattgcttttcacttagtttggtgttcattgggtgcaagctgctacagcttaagagactttcttacagtgacaaggatccttcgagggtaaaagttgcaaggtttggagagtggctccatcgcatctcttggattgtatggaaagaaaggaattgacggtcatttgacaatgaggggcaatcagatcaagccttgaaaagttcttttgtttctttacttttttttttctttttctttttgtggatgaagatgtacatagttataggctctatgtctttaaatggttttgtagattgatagggttcttactaagagaggaagttgttttctgtgttctctctttttggttgtgccttttggcactcattgtatatgtcttgtgtattatggtgcgctgtatatttactgttagtttataaaattgttttatttgcttatttaaaaaaatttggcttaggttgactatatgctgctgttttcacaggtcgccaaattgtgaaaaaagtaaatatttcaagtttcttcacccacccccctcctctttccattcatgttttgagcaactgaatattaaaaaaaaaatgatgtttccacacacacacacgcagatgtgttttctttgacagtgcaaatccactagccttgcttcgcaagattgggaagaaccttatgcacaatgattagagatcatcaaggttcagtaatcaaaacatgttctaaacctgtaggtggtggttttgctattgaggttgaggtcgtagttctcttggagggccttgtgcaaggaaaaactttgggcttgtccaactttgtggtgttgggaggttttgttattgttatttcatggccgactaaaaaggaaagaggttcatggagacttggtacattgttgtactaaatatttgataccttaacaaagttgggatgctccattcaatggggtttcttgttttgctaataatggtggcagatgaactagctaaaagaggagcaaaatagttggtttcttttgttggagatcatgtgcctccttgagtctacttaacggttgttcaaatgttgcctcactttttgtgacttctctcgtttgttcaactatatggttccttgtaaaggaatctattcccttgtacattgtggatgaatgtcttgttcttcttgattttttttttttaccttatagaaaagatctattaggttgctgatagaaaaaaaggaaaaaagaaaaaactatgtatcgattaagtctatagtgcaaacctcaaacctcccattcctatgcggtggtgcctgccatttgagctgcctgtggagagtgctttaatagatcattttgcattgaaaccctgaaatatcttcttattctttatttctttaataaaaataggaatgctgtatttcatgctattttagttttgaactaattcactaagctagaaagcgatattaggcacagtttagtgacaatttttatttattcagtctaaaataatgggttcaagcctgtgaagtctatattatccattgtttggagttgcttgggttcttcctaatttgatcaaaagacttgttgattggatgacatggtggtttcttggataagaggcatagggaggtttggagaatggctttgtttacgtttgaagatctggaaaggaagaaacaaaatatcctttgagtaggtggagcagtcagagtcaatggtgaaagtatcttccctaaagttttgttgtcttggctagtggtttgggggaagctagtatagcttccttactagattttgtccatggcttgggcttgcccagttcttttctccccttctccgggttgtgattttctttgtatactagtgtactggaacgtgctcccttttgttgggcactgtgttgataaaatttcttcttgcctattagaaacataatggggaatgaattcatattttgatttatgatatatcctaactcctgttgaagattaactgctaattttttgttgacttggttctgtttaaagggattgatt

SEQ ID NO: 13456 - DNA, 4338 bp, Vitis vinifera
  Intron number 1 from transcript GSVIVT01035657001 (locus G SVIVG01035657001) derived from phytozome v7.0 (chr-ID chr4 ; pos 3071363 to 3075700 reverse strand)
cttaatcacgaccctgggtatatatttatctgcgccttttttcaaacacttttaagtatcgtggttttcttttttccttcttaggattctgtgatagtctgctgtgtggatttgatggaacagttagtttcttttttggccccggaagaatttagggaggaaagtgttttgaatcagtcttgaaaaattgcacctagatgaatttgattgaacatctgtcttctttttggttgcccataaagtgaaggaaaaggaacaaaagtatagatttgaatttggaaagcttcgtttggatgaattttgattgaacagttgtttttctgtttggttgccgagaaaagtgagaaaaatatagattttgagtattgttccattgtgttctaggttaggaataaagaagattccactatgtgtctggttgctaggagtctatttctgaacgattgcaaattcacattggctaagccagaataattagtttagggtcaatcaattataagtttaagattcatttttttcctatgcttttatccaaaacaaaatgaagcttttccttttcattggtttaattaatttgaaaactgaagaaaggaaaagaaaaaactaataaggttttgaatctaattctttattttgttttggttttggaaaagagggttcatccataacagaatgaaacttttcctcttcattggtttaatttgaaaactgaggaaaagaaaagaaaagaaaaaactaataaaattttgaatctaattctttattttgttttgggttttggaaaattgggaatctccttcaactatggtattaggaccaagcgtgtttggatccaagtgtttattttccctaccgtatcttagcaatcaaatggagttttaactctatacagttgcttagagaatcggggataaacaaggaaaatataaaatcttgtgaatcagttgactagagtttcctattttatagggtgtcgaattacctttttaaatagtctaagattaaaatatttgatttgtttctaaattttctcagcaaccaagaggataataagtgatttgaaatgggtgattatctgctggtgaagacccctgatatcattagctgcagcaattactttcttttacatccaagttgccaaacttagttgcccttgaggattggcccaaatgggaaggagttgggggttcatctaacagaaaaaaattaaagaaccattgcatgcagaaaaagcaaaggttgccactgtcattattgtgcttttcagaaccttttgattgagtctagggagtggagactcaacattagtggtttgtcttttgagagtctactgggccttgaagctacaaggctggagtattcgttatcggaagaagaggttttcatagctctctcagacgtaggtaaggataaagcgccaagtccggatgggtacactatgacgttttggctttttagtttggagattgtgaaggaagaggtgatggggtttttcagagatttccatgagaggggtagatttgtcaagtccttgaatgctgttttcctggttctaacccccaagaaaggtggtgccgaagatttgagagattaaaaggtcaattagcctgttgggcaacctctataagttgttggctaaggctttagccaatagacttaaaaaggtgatgggcaaagtgatctttgacacccaacatgcttttgttgagggtagatagattttggatgtgacattgattaccaatgaggttgtagactcaaggttgaaaagtaacgaatgcggtgtcctaagaaggcatatgatcatgtaaattggaatttctagttgttagtattacaaaagatgggatttggggagaagtggattgattggataaaatggtgcatctgttgtaggccctttatctttgtttaactttgtggattggttgggttcttgttgagggccggtgagtgcttgtgtttttgttgcttgttttaggtgtctcttgtatactccctgtatgctctgggttgcctttcaagctccctttctctaatatatctttgtgcttttgcctatcaaaaaaataaaataaaatggtgcatctcaacggcaaagttctttgttcttgtgaatggaactccaatcagtttttatcacagcactaggggtttgagataggggaaccgcctctctccttatttatttgtgattcctatggaggtatttagttgtccctttaagagggtagtgagtggcggttatctttctgggtggcgggtaaggggcaagggtagaaatgggattcaaatctctcacttattgtttgctaatgatactctcgttttctatgaggtgtctttggattagatgacttgtctaagctagttacttatgtggttcaaggccattttaggtttgagaatcaatttggacaaaaggaagttaattcctgtggggagtgtggacgatgagatgacttggccttggagttgggttgtaaggtgggcgttttactttctcttacttgggttttcctttgggggtcctttttaaatttgtggcaacttacctataaaaataaataaataaaaaatttgtgccagcttgggatgtggtgaaagagagttttcgcaaaaggttagccatgtaaaagataatatatctcaaaaggagagaaacttactctgattcaaaatactctttgtagtttgcctatctactttatgtctttattttgcttgctaaggctggtcagactgaggttagagcagattcagagggattttctgaaggatagtggggcatttgtgcaaaaaccacacttattaaggtggaagatggtctattcaggcataaggaagtggggtttgggcgtgaggtatctttcaatgatgaacaaagctctgctttataagtggagttaacactttgccaatgaaagagaggcactttggaagcaagttattagttagaagtatggtgaagatgaaggggagtggctttctcgtgaggtgagagatgggcatggtgttggcctttgaaaaaccataagaaaggagtgagatcttttgagcaacataatatctttttcattgggtaatggtcagaaagcgagattttggaaagacaagtggtgtggagacaaaccgttatgtgtttcctttccctccttatttgccttgaccgcttctaaggaagaatgagtgtcggacatttggaactcaataattgaagggtgtggatgggctccttgcttctctagatcgtttaatgactaggaggtggaaagtgtggaccgctttctgttgaaacttctagcaaaaagggtgtatagggatgaagaagacatggtgatttggacggttttgaagaatggtaagttttcagtcaaattcatttatttcgttttggagcccgatgaccctttattgctcccacggagcatcatttagagttcttgtggctttgttcgcttaggaggtgacatgggggaaaactttaactttggattaggttcagaggagggggtcttctttggcaaacagatgttttctttgccactttgaagaagaaactattgatcacattaattttttatgtttaagaaaatacttataaaaaaaaagaaactattgatcacattcttctccactgggcaaagacaaggattcttttgcagcagctttttactctctttagagtgttgtgggttctttccttttcagttaaagacacactccttgggtgacattggtcctttgtgggtaaagttcataaaaagtcttggaaggcagccccatcatgcatcttttggattgtttggaaggaaaggaaacatcctagcttttgataatgcggagttttcaatctaaagaatgaaaaattcttttgtttgtaatttgtggtcttggtctagggtgtctatagatgtggaccatatttctttttttagctctatcgattggctatgttttaaggaaggacatgtgatgtttttttattctttgcctccttcgcttggtcgagccttttggctgctggtgtatacttcgggacgctgttttggtgtttcctttttatatatactctttgttttacctatcaaaaaaaaaaaagtaataataattttgctgcccaacttaatagttgggatctattaggggaattctcaaaattttctcatctatactgggaaaacttgtattttttgtatttgtatgcaagctgaattttttgtacttaacctctttgttgcaatttactattatggggaaattcatactgtatttgtgctgttcaatctagggtgaataattcttgaatatggttttgatttatcaggcaagcaaagg

SEQ ID NO: 13457 - DNA, 5503 bp, Vitis vinifera
  Intron number 4 from transcript GSVIVT01017031001 (locus G SVIVG01017031001) derived from phytozome v7.0 (chr-ID chr9 ; pos 3629131 to 3634633 reverse strand)
ttgatagtgctctgtttctaggacaaggatttcatgtatactaaacatttgcaccgataaaatcgttttctctacaagttttattagtactgaatttgttgacagagtacaactattggatgtgtataatcatttcatagtcattatgccaattaatcatgcacattgcatcacatagctattagattgagggagtgcaaatccaaagagaccaataaaagaatatctaatgaaaatttgaatttcaatcctcatatatgacatacatacatacatatatacatattatcaatgaccgctatgttaagcatttaatttatctttcgatcaatttagctttcctttcctcgtaggtttacttcttcgaattgtacctatgatgccaaagaaagtccttgaacatacaaaactaatttcaaatatgtaaaggtatcaagacattgcatatacaagctaactaaacaatgcaatcgtgtataaccaaaaagcgcacaaaaaataattcctatagacttaaagattagaagggagtaaggatgtttggatatgggaggtggtggtttaggcagcaatattctcttcccaaatgaggtttgacaacactaaaaaggaacaatacataattgtcgactttaaattcattatacatacaaatattcattcatgcacatccttaatctactcatcaaccaaaagatgaaccaccctttccaagatgaaggtatcaaagttgtcaaaattttgattcaattgtataatgggatgataatagttttattattaatggtaacaataagagaggcatattcacgggatacaaaaataataaatataatcaaaagttaaaaaagataaaataatattatatagaatattttctaagttgatatgttattgtagtattagatttctttatagaataaagaaaattattagaaatatctgtataaatattttaggttatgaaatggagatgagattataaagattataggtggtgaatggaacaatgaggaagaatgggagatactcaacagactaagaaactcatatttcaaggtatggatacaatgagtgaggaaacataggattgttcgaaaactcaatagttgcatccgatttatctcatttacactattctctatgatatagtgaaatgattttcttttatatatggatgttcgtatgtttggttgaaccatattaaagccttgtgtatctttatgttcttgaactaacattgtttatattaaagctccaccgacataataacgacaatgaatgaatacttcaccacattagcaatatgaatgcatgcatctcaagtaaaataaatgcccacttaaataaaccaagataccaaagcaccacattagcaatatgaatgcatgcatctcaagtaaaataaatgcccacttaaataaaccaagataccaaaggctttaaaagcaaaacatgtttgaaatttttgtaaaagaaattgacaaaacacattaaacatatgatatattaaattttcaacttacatgaataaaagcaaaatgatgaaatgaaaagagaatagaaaatatgtagtaaataaattatcataacccatattttctttaatgctccaataggtccaataccagaagtagaagtattcattactcaatgataatttatacctctttgtccaaaacatggacaacatgtccaccaagtcttccaaacaagaatctctgaagtgcatttattaagaaacagcttcattcaaccatgtttcacatgaagatattgggaagttgaaatatgtattcaattttcaaaatttcctttatttccctgaactctctcagcaaccaaacagagggtagatggaaaattttaggtaatattcgcagcaaacccaactcgaaatgaattaaacgaaacgcaatccaagcacaaaatcacatgacaggtgcctatatttaaaacaaattagcctcagcatcttgaattttgggttgggccattgaaaatgtgggcttcagcttggtagtcctgggctgttgttcttttagttgggccagccacatgcatatcttacgctgtaaattgtggcgaaagggttgtacaatgggcacagactggtcaattaatactaatattggtagcgatggaaatatggatgatttaatttcatgaaacattgaaagaatattattatcgatgaaaattttgataaacataaaaaaaaaagaaaaattaaaataatggatgaaactataacgcatgataaaataatacaggttaatattggtgaaattttatatctttttttgaaggattatttgattaaaaaagttattgaaaacataaaattcaactgacctcctcttttgaaaatatgaaattacaaaaatatacttcaacaattatttttatttttatttttttatgctacttcaaatgcatttgacttattttatttttttctatataaaaattaaataatttgaaaatctataaatttatattattttctttgatattttttataataaaataaaaaaaatcattgtccttaattattttttaatattttcttagaatcaaatatagcatcaaataaaagtaagggagattgccaagaaaaagtgacaagtggtgactgacatgatttaatttacagaaaactaatgtcagaatgagaagatgccacgttaaaattcccatgtagattagtcaactttttttcatctcttttctatctttaatacaaagaacttcagagtaggttcccatgaattttcatgtatctcttatgaatacatatttcaacttcccaatatcttcatgcagcattgttgtctataatgttaagctccgactatgtttcctttcagaaaatttgaaaggaaatatgaagaaaagaaaatagaaagataaaatcaacaaattatttttatatgatactttaaacccatttaacatattttagaaaaaaaaattatttttatataatactttaaactgggagtgcaatttgaacaagttggtttgacccaatccaaactcaattcgatatttgagtgagtttcaataaacatttttattacttaagttgagtttgggtttaagttttctcaatttgaacttaatttggattggattcggattaaggtttaaacaacttgagtctaacttgaacttgatttaatatttttataatatttataatgtttattatcctgtatgataatattcattttctttttatattttaaagaaaaaaaatactaaattataattatatcatattttttttttatcatttttttaaaaagatatacaagtgtacttttacttttatatcatacactttttcatttttttttaaaaaagatctataaatttatttttaagtttatttttattattattttgcaattttatgttatttaacatttaaattttggtataaatataaaaacaagttttttaaaaatcactatgtatggattttaagtcataccacctaaatttagttcaaccaatcggagttcaactcgagtttagaaaaataaggttgaatactttaggttaaagattgagttgagttgagcttgggtttattttttcttaatttgggttatgtttaggttagccataaaccggatcaaccctctcaagttttagccctactttaaacttattttttatattttagcccttttatatgaagattaaataatttgaaaatgtgtaaatttttaattaattttaattatcttcatttttttttaaactatttttcatagtaaaacaaaatataaaaaagtcatttttcttcgtattttttttctttctataatactttcttgaaatcaaatatggtgtaatgctttgaacttttacttttgtatttaatttctataaagattttctttgatataataatttgtcttgatctatgatttccaaaattagtttttcttgttaaattaacatttttttttttgcttgttttcatgtacccgtgcatttccttttgtatatgcatacaaacatacaatttatacgttcatcacattcaagtttgtcctaatagcacaaaagtatataatgttatacacaaattcttaatgagattgaaatttggtttcataacaatgaattttttaatcttattcttattataaaaaatgatccaaagacattaatgaattaatagaaatggaatgaatttcttgttttgattctcgattctaggtcccaaacatgacctaagggttatttgattaaatgagataaaataatctcaatattgttacaaaaatctctatttttaaaacatgaaatatatcctttttatacaaaatagaatttatcaatatttttttctcagttctatgtccacacatttttacaaaaaaagtatttggcaatcatatcaaaatggtgttattttttcaaattagggattatcttattcaaaggaaaatcatttgaaaatgtacacatttttaactaattttaactatattttattctcttttatttttactttttatgataaaactagacaagaaaaaaatatatattttaattttttttattagtacttttttagaacaaaacatagcgttaacaacctataaaaataaggacaatcactaagaaaaagtaacaaaagatgctacgtaggggacccaaatggatcatttttagactagtcaaatcctttgcatattcaaagaagattattgatattccatgggaccaacaatccattaccttgctctccctctcttctttgactgttcttcacaagcaaattcttccttgtttttagtataaagaatttaatatggtaggttctactcaatttcgaatttaagatgttagttccactcaatttccttatatctattatgaacgcatcttttaacttccctgtatcttcgaggggatcatcatctattacgttaaagtcaaatcttgactatatttgattctataaaatttaaagaaaatgaaaggaaaggagatagaaagataacctagaagtaaaagaaaggaaaattataaaatataaaaataaaaataaaaataaatttaaaaccgataaattagttttatacaatgctaaaaattcttcacttatttaaaattatctatataaaaattaaataattttaaaatgtataagtttttaattaattttgatttttatagtaaaaccaactacgagaaaataatttttctcaacatttttttttatttgggtggtacttcttagaaccggacattttttttcctaggcataaaatgtaacccttcttgtataaatgtaaacttcatcctgaagcgagagcaatgatcttccaagaggatgctgagaagtcgatggatgatttccttgaagatgataagcagtcgatagatgcaatccgagaagacactaggaagaagacttttgacttgttattcccacttcacaggcagtttccctatttacttccagttttggaggact

SEQ ID NO: 13458 - DNA, 3798 bp, Vitis vinifera
  Intron number 1 from transcript GSVIVT01037658001 (locus G SVIVG01037658001) derived from phytozome v7.0 (chr-ID chr1 9; pos 6619437 to 6623234 reverse strand)
gtatcagtaagtgggttcctcaatcgtttcttttggttgctgagaaaactgagcaaaatttaaaatttggagtgttatgttctatgtgtgctgatttgatttgtggaaaatgaaaaatttatctatgctaaggggaatagttgcatgaccccatttgagtgcaggttgttggtttctggaaaatatctatcattcagcgtttagattttttttttttcctaaattttcccagcaactatatggatgatactgaaaatcctaaaatactgaaaattacttcaaggtcatactgtttaaagatgccatctttgggctaaaaattaatttggataagagcgtcctgttggggaggtagctaatgtggaggaactagcctcggtgttgggatgtagaatagagaagctacccacttcctattgggaggcccttctaaatcttccagggtgtgggatgcagtggaagagagatttagaaaaagattagtggtgtggaaaatccaatacctttctaagggtaggagacttactttgatcaaaatcacgttatgaagtcttccgatttatttcatatttttatttgccatccctagaaaggttagttcaagacttgaaaagattcaaagagatattttatgggaaggaggtgcacttgagaaaagacctcatttggtgaattggaatctagtttgattagagaagaaggcattttggaatttgtaacattttgtcctaaacaaggctttgcttgagaagtggtgttggagatttgttacagaaagggagtacctatggaagcaaatcattaaggaagttcggagagaaggaaggggagggatgggtttggagtgcaagtgtggaaagccataaaaaatgaatgagagggtataaaaagtatatcttgctttttagtggggaaggggagaagggttaaattctagaaagacttgtggtgtaaagattaaactttggaagaagccttcccaaacttattctctcttgtggccaacaaagattgatgggtggtagagggtttggaggaggttagggaagggtgtagttgggcccttcatttttctagacatattatgattgggagttggttgaagtgaagacttggttttagaaattacattctgtggtagttaaaagggaagtgaacgacaaactaaactggaatgaaaacaagagcggcaagttttcagttagatctctttatggtccttctctaggggacctagagagccttttccgactagtatagtgtggaggacttaggctctagtgaaggttagcttttttgcttggaaagcgtcctagggcagaattctaactattgaccagctcaaaaggagggtttggaatctcctaaaaaggcgttacttgtgtaaaagagaggatgaaacgatagatcacttgcttttgttttgtcccaaagcaagaacattgtggaactttatctgctctctctttggagtggagtgggttttgcattactcggttagaagtaatttcttagttgacatggctctttcatgggtaaaaaacgaaagaaagtgtggagagctgctcccttgcgcttgttgtgggctatttgaagggaaataaacaaaatggcttttaatgaagttgagtagttcaacaaagctattaaatcttttttatgtatacttttataaattgggttagggtgtatatagaggactatatgttgactatattagattttgtagattggttgatctctaagtaaggagaaggttttgttgctccttacttttttgcctatattgggctttggttgactactttgtgtgtacttgctatgcctccttttagatgctttttatatacatgacctctttttgcctataaaaaaaaaatcataattaaaaataaaagttaccttggtccataatgctgataagggacacaaatcaactatttcaatcactactcttactatccttgatggaagactagtgtggtgtaggtttttttgttttggtaggagactataaaagatgatccacaataatctttatatctattagcatctctaaggaaatttcacctccaagtcatatgctcgaaattgcaaatacctttctttgttaaacactctattgttctatttgtttccctattaacatgtttgacatttgtaaatatttaactcttgagataacttccaaatatccttcattaataacataatagaattaggaatcttatcctttttattaaagcactctatcactatttttgagtcaccttcaatctctatttctgaaatccattgttcttagtggttagcatgtcatctcttaaagtcattagtttttgcaataattattgatgcattacctagatgcctacttgcaacaatttttattgttccattaaagtcattgaacacgcatgctgaagcacttttattccttatatttgatacattaaaatttagtttaaattgtcattgattgagggaatccattaaatccacttttccaccacttaagtgacactatgcactttcttttgaataaaagaatcaatcaaatgttcttgaagattttggaagtttagggtatctttctcaataacgagaaaggggttgggattgttcttcctaaacactacctgatttttatgaatctagaagctctacatgataatggcaatcttttccataggttggtttaaaatttgcaattgattttgtaatttttgtccaccatttcaagccaagataaaaactctccttcatatgatataagggtaggaccattgaaatccatgcgatcccaaattactcataaagggcattttctaaaaatatggttaatattttcactactttcattgcatagataacacatgtttataatctcaattctcttaggttttagatacttacatatagggagggcttctctaatgactaattttctaaaaatatggttaatattttcactactttcattgcatagataacacacgtttataatctcaattctcttaggttttagatacttacatatagggagggcttctctaatgactaatcataagaaaatttttatttttggcataaggtttaatttccaaatccaatacaagaatttggttttagggtgcacaaaaggctttcacttatttccaaacattgcccatttaatgtggtgtaggttgtcacaaaagtttagcaaccaaaattgaaagtataatttgggaccttaattttatataaacatgaactaaccttttatcatcccattaatgaccattaaacatgtaagctatgctctttctttttaatttccacatcatatacaattatggcataatttccattaatcattataatggaatagtaaacccccatctataaattgagggtggaataaaaaattgtaactctttatattcataaaaggtgtaacagtcttctaatttacactaaggcattgactcttcatgaatcataataacagtgattggtggtatgaaacaggatttttggaatttgaattggaggtcccagttccaaattcacatttcacttgatttacatacccatggatttggaattaaatttgagttcagtcaacccaaaatctagaaaaaccaattccatggtaaaagaaagattttggatcctcaacaaaacacaccttgaacaattttcagccatagttagtaatttgtttgcatatattattatggggttaaatcctttgtaaaattttatcttaattcttcgctgtttatttgcttaatgtacagtgaaagagaaaag

SEQ ID NO: 13459 - DNA, 1199 bp, Vitis vinifera
  Intron number 5 from transcript GSVIVT01026915001 (locus G SVIVG01026915001) derived from phytozome v7.0 (chr-ID chr1 5; pos 19419836 to 19421034)
ataccaatttcatcaatttttctattcagaataaagtgagtgtttactgttgttttgttaacgtagggaacatgatcttgtttaggttctattcaatttttgttttcttgggtgtattaaatatgaatatatctcaagttttcttttctttttcttcttcttttttttttttttttagaattttcttttagatttttgtgaaagctagtaattgttatgtgattttggaattctggaagtgtctttcttggtttttaagagttttagaagatgtgatttttgcttcaaaaagcaggaaaagtacttccaaggtgctagcatatgatgcattgtaagtccttagatgcccattggtgaatatgcccaatcgatgttaagtccatatggagggagagaaataggagagctttaaataattgtgaaagtttggatcaaacaattaagagttgtttcttgaatcccttttaggagtgggtaagattgtatattggggacagatctctatcgttgttagagtttgtggaccggataggctcttcgtagggcatgactgctggtttttgtgttcccgcgcttctttttggttttttggttgcttttgtatacatcacgtatacttcttttttattctaatacatttacacgtatccgaaaaaaataaaaatgcccaaccgcatgtttgttagcttctgctgaaggtgagttatggcatttgggtatggaatgttagggcctggaaattgttttctagcataaacacatgtttgacaattttctgtaaacagttttttcaaaattcttctaaaaacaggtgtttttttggaacaaatttgagattttttcatgtgtttttgtagtgtgttctaaagaacaattgaaaatataaataatagtttgaatgtttttacattatatataagaggacactactttcaatgagaatagttgagaaaattgtttttcatgtttgaatttccaaacagaattttattccagtaaacaattgaaaactattcctaaaaattgtcctcaaaaatggttttttgacaactgttttttaagacgttgccaaaacggacccttgctcttttatgtttcattttccaagaattaaccttgcaatgactatcctaagcatttctcaacgatgactaatgagttttctctgacttcttctgcagcttgatctggagaaaggg

SEQ ID NO: 13460 - DNA, 7387 bp, Vitis vinifera
  Intron number 5 from transcript GSVIVT01021429001 (locus G SVIVG01021429001) derived from phytozome v7.0 (chr-ID chr1 0; pos 5252003 to 5259389 reverse strand)
cggtttggtgaaagagacttctgacgcgacaaaaagtggggtgtctgaattcgtaaggttggctggaaagaagttttttggctgtggaaggggtcctgagggtggacagggtggccaaatttccaagtgggtcgagccggtgtctagggacccattgggagggcctactagaactcgaaagcccagtctccattgggccaagttttcatttaagaaagtggggttgggtttctctaataaggtggggtgttgggctgtttctattaggcctaatagaaaaaaagggcttgaaatggggttggcccaagcttctttcctaaggctccctttttttaattctggggagttcaagtaggagatcccgaagccagtttctactggggagatttcagagcaggaggcatcctcgttggaccaaggccttagttgttcacttttgaagagttatcttccctatctcttgttctcctactcttggggtggggtgggaggggggtgtgtattcggggaatcttcagacctttcttctccttttttttttcggggttggggaattctatggggtactcgcagacaagggagtatgaggggacgtctgaagaccctttggagcttgagttgccactttgtatggttctcaaggatggatgctccttcactttgccaggtaatgatggggccaatcgcttagagggaggggatgaggcagtaacccttaggtcttgagataatgaggttcccaacttgcacgattttcccgtttctttaaaggaggagacgccacaacttcatatcactatagtaggagaagtggaaaaagacaaatccccttaggtgaacaagaaattcttttggttctataagtttgtgggggtttcgattgaaggtttcaaatatgatattttgagaatcctcaaggagattgagaatacgagatgttttatcaataagcctaatgagagcaaacttggtcaggttcaaggaatgatagagatttgaagaagctcgttagcactattaattatgatggattggctggaagagtggcagatgaaggggagttgggagggtaaattgatgtagtcccttatgaagcttaggatattgtcctggaatgttagaggcatgcataacccagataaaatgatggtcattaagtcgatggtgagaaaacataagccatatttggtttgttttcaggagacaaaaatgaaggaaatgtctgctaggattgttagaagtttggggattggtaggaacgtgggttgggtatctttatatgtaaggaatacagctggtgaggtgctagtactgtgggataagagagttttggaaggattggaggttgaagtgggttttttttctatttcatgccgctttagaaattgcgaggagggttttgtttgggttttctttaggttatatggcccgctcaaaggaagggagagaaaggagttgtaggagaagctagccgttgttaaggggctttggaatgaaccttggtgtatagcaggggactttaatgtggtgtagtttctagttgaaacgagcaatggcagatagatgtcaaccatgatgagagagttttcaagctttattgacgagtttgaattagtagacccaccactgggaggtggagcattcacttagagtggaggggaaggaggttccctaaaggctcaattagaccgctttttgtttttaggagattgggaggaccttgtgtcgggggcaatgcaaattcttattccaagacctgtttctgaccattgcccgattttattagactacggtgggataagaacaagtaaaagcctgtttagatttgaaaacatgtgttttatggataatattaaagaatggtggtagtcttacaattttaggggaaaacccagttttgtacttgcgaagaagctacaagctttgaaatacaacttgaagatgtggaataaagggacctttggcaatgtgtcaactaggaaggatgcagccttggagaagttaaactatttggatagtttagaaaggcttggatctctatatgaggaagataggagtagtcagcggatagctagagatgaatttagtcattgtgccatccttgaagaaatctcttggaggtagaagtcaagggctctttggttgaaggagggagatagcaataccaagttctttcaccatatggctaatgtaaggagaaagagaaattttatcagtagcctgacagttaggggtgttcagttggataaaaaggaggagcttaaagaagagattggatcctactttaaatccttgtttgaagaatctctagtgagaagacctgctgtggagtcaggtctttttagaactcttgactcattagataatgagactttgggggggccattttcggaggaggaggtttccaaagctctcccagatttggagggagataaggcgccagggtcggacggttttatgttggcattttggaatttttgttggcctatagttgggaggaagcgatacaggtgtttgaggagcactattcgcagaacgttgtttttcgaaaccttaatgcaacctttttagtgcttatcccgaagaaagagggggctagtgacgtgcaggattttaagcccattagtcttgtggggagtctttataaaattattgccaaagtcctagaaaataggctgaaaagagtgatgggaaaagtggtttcgaatagttagaatgcgtctgtgggaggtagacagattttagatgtagttttggtagctaatgaggcgattgacttaagaaaacgaagtgtcggtgcaggtttagtgtataaattggacattgaatacgatcacgtaaactggaggttccttctttcagttttggagaaaatgggttttggacccaagtggcaaaactggattttattctgcatttcaattgtgagaatggcagttttagtgaatgacactcccacatagttcttctcaacgtttagaggcctaaggcagggagacccactctcagcttatctgtttgtgctaattatggaagcttttagcaatttaatatcaagagctgaggaaaaaggtttcattaagggtttcaaggtaatggggagatgtggagaaggggtttcagtttcctatttgttgtttgcagatgtcactttttttttttttgcaaggataacaaggaccaattggaattttggaagtgggttgttatttgttttgaagtggtatcaagcctaaaaataaacatgcagaaaagtgaaattattccaattgggggagtagaggatgtggatagagcagctgcggtttttgggtgtaaagtaaggaatcttcctactacttatctaggtttaccttttggaggccctcataatttgtgtagagtttgggatgttgttgaggaaagattcaaaaggaaattggctacgtggaaaaaacaatatctttctaagggaggtcaacttaccttcattaagatcactctctcaaatcttcccatctattttatgtcgctttttgtaatcccaagaaaagtgacacttagattggagaaattcaaagggagtttttgtggggagatttggaggagagaaagaagattcacttggtaagatgggcggttatttgcaaagataagaggcatggagggttggggttaagacatttgaaggttttcaatcatgctttgctaggaaaatggctttggagatttcctctagatatggagagtttttggaggaaaatcattgttggtaaatttggagaggaggaagggggttggaccactagagaggtgagagagtcttatgggatgggcctttgaaaagacattagaaaaggttgggaggagtttctttttagaactagtattcgtattggaaatggtagactcacaagattttggtgggacatttgggtaagagattctaagctgaaggatcttttccctttactgttcagaattgcaacccataattctgctgtagtggctgatctttgggggagacaatgggtggatgcgagggttgagaggtgcaatttagaagatccttccaagattgggaattggaggaggtgactcgttttttggatcatatttttacagtaaaggttcaagaagggaatgattctttattttggaagataaaaaaaaggggaaagtttaatgttaaatcttattataggtctttaagggtgataataaccccttatttccagccaaagaggtttggggttcgtatgttccttttagaactcgttttttttgcataggaagcagtttggggtaaaatttatactatagatatgttagtgaggaggggctggtctatgattaataggtgcaatctttgtaaagagaataaggaatcggcgaaccccatcctaattcattgtggtaagacaagggagctttggactttgttgttgtcttcttttggggtggtatgggtggtctcggcttcagtgagaaatctgcttctagaatggaaagttaaggggctagggaagaaaaggagaacaatttggagattggcgcatatttgtgttttttggtgtatttggggagagcgaaaccgaagaacgttccaagaggaaaagatgtcaaatacttgcttgaggaacctcttttttcagtctcttcttgagtagtctcaacagtttttgaacttgaactctctttcttttctgaattttttgggtgattggcttgttggttagcttttttctctctaggttttttttttcttttgttgccttgttttgactttctttgtatattgtctgtgtacgtagggagcaccccctgttttggcatgttttatgttatttttctctttgtctatcaaaaaaaatattaagaacacaaaaataaaacaatcgatacaatgatacataaggttttaacatgattagatgaatcatgctcacgtttatagatgagggagaaactttctactatattatatatgatattacaaatgatagaaccaaatacaactattagattctcaaaacatttcatgtttccccacttcttgtatccacatcttgaaccatgagctcgttcgctccatcaggtaccattcttcgtcacatctctattcacttcgtataatctgtataaactcatctaaatctcataacattttcttttatgatctaaaatatttataaagatattcttaataactttttttattttataaagaaatctaatattacaataatgtataacttatgaaatattttatatatagaatttttatcaattaggaatttgaaatactttacaacaagaggaatgaatagaacttggggaacaagtctcatgaaagattactttaatacttaaaataaaaaaattaagtaataaattttaactaacaacttaaaagtaatttaatttaaaattaacttaaattattaaacaataagcacgaaaagagaaaacttattgtgtaccatcttgtatagcttggtggagcccaaaattaagagaggatgagttccttctaactgatgggatgccaaacgcactttagaaatacttctaaaattactgtcaaattttaacctttcttctagagctttgctgcaaagattgggccaaaatggtttgagatgatgctgggcctggcctgtcttggcctggcacgggtggatggcctccacacagccaactgccgccatcaaaatggcccaatctgtatgggctttggatgggctcaaatcgattcaagtaggttagtaaggtcctttaaaataaaaaataaaaaaaaaatctctcatctctattaaatcttaataagttttaatttaatttaaatttgaataaatctacaagtgtagaccttaataatacaaaggtttgttttcacatgttaaagacattaaattacaaaagataattattatgcttttcttaacaataatttgacaaaaaataaataaataaaataaaattttagcatattttcaaataaatcaaaataacaaagtaatttgatgtctctttcatgtcaaaaattaattattatgtttttcttattttatataattaaaataagatatttgaaaatatataatagtagatgctccattttatcaccttagaatataatattaggtgtttttctgtatttttctcttgattcgtaatcatttcatgtaggttcataataacacaacaaaaaatttagtaatatgatatattttttagtatcttaaaatattaaaatttatttataataataaaaaagataaaatttagtaatttacataattaaatcattttgcaataaaaagatagtttagaaatattgtgtaacacaatatttattataataacaaaagtgttacaattttatttcatttcccagctaaagtaaaaacaaaataaaataaaaataaaaagaatagtcataataatttaaataaataaacaaaaaaaaaaaaaaaaaccacacaagcaaagcctgaaccttattggatgttgcggcctttatagggtatggagcccttcttggcaggctcatttttcacgtgggtctcttctctgggaagcttcctgtcctatggaggtttctttaggaaacttccattttagcataaatctggccaattcctacctgttataaaagcattattgattttggtagataaattccgtccaatcatatcctttttatgaattgcccgtaaattttataaatatattacccataaattttgtataaatataaaaatatagtaaatttaaaatgtatttgacagtgattttaggattaaaaaatttaatcttctaagtaagagaaagaataagttaaaataaaatcactaagacacacactgttaatgcattatgtactaataatataaagtttggttattattttttaaataagttataattattagtgaggtgtatgggttcatgacccactttcgtctatcgtcccactaaatgacctaataatccaaaaccaataatgctgacattatcaccattggtattagggatgggcatttttgtaaaatcaaatagatcatcatctatatgtagccaaatcagtcatcggtcaccgatcacttccagcccactctctctctgtgaacacactttcagagctagaattctcaaaacagtgagccaatggcatcccaagatcagatggcccttcgccatgatcacaagcatcatcatgaccaccaccacgaccatcaccacgatcatcaccacggccacaagcacggccaccatggccaccatggccaccaccaccaccgccaccaccatcaccgccgccaccctgataataaggagcctagcaatgatcagcatcatcctagcagtgatgaccagaagcaaaaagagtctgatagtcacg

SEQ ID NO: 13461 - DNA, 6559 bp, Vitis vinifera
  Intron number 1 from transcript GSVIVT01020749001 (locus G SVIVG01020749001) derived from phytozome v7.0 (chr-ID chr1 2; pos 2365987 to 2372545)
cgttcctgggttgcagagattgggaaagaaaggtggtgaagacgatgaagaagaggatgcaaagattgtttcagtttctaggccttatttatcagaagcatgggatgtgatggacaggagacgaaaagaagtggatccactattgaattggagaatcccagattttggtgatgaaatggacatgaaagagcatctcagattttgggctcacatggttgcatctgctgtaagatagaaaagatggatcattcctgttgaaattttctttcttcctttccattctttctccgggctctttttcttgagttttaaaggatgttttgaaggctttttggatgcaactttgtgggggttcttttctttataggttctaaatgtaaataaagatgacagaagaggatatctatatacttcacttagatcttgattttggcatcaaaacttcaagtgtcttggcaattcaagtgttcctttcaatcatatatagacaaattaaactcaagaaaattcagactatcttcttgagagaagagaaaaggagtaggggtttgtattaaaatctgcagtagttgatatggaaatgtcaaaatgtggaaagtatcatcaatcatatggttgatgcttttgactcttgtgctgtttctgacatgtaaagaggaaagtttgatcctctggtgggctcctcacaagtcacaaccaaaccaccacaccagtatgttatgggcatgcagcaaaagccatactcaactttttaatcttttggccaatcttttggcctagagggatgaatgcaaaatattctttttattttttttattttttatttaattcataacacccttttcaaaaagttaatgactaaaaatattatcaaattcttccttttctttttgtacttcaaaatattccatcttatcagagatatttttgaaaaatatttggtttactcatgaaggtaaacttactttcaagtttcaactctcaatcaatgattggttaaattagatttgcaaacacttttaaccaatttaaatatatatcttgactcagcctcttatgattaggttggggttgatatgataagtattaggggtgctacttgattaagagcaaccaatccaaccgcttaggggattaactaatcaaagagcccttatgttgctgatgtgattttgtgtggctgaagtgtctgcaaaacttccaattggagattcaatttttatatatttatgtattttattacccctttagactataatttgatacaccatcattaataggttacctcttcttctttgaaaatgagatagaattagtgtctttccttatcacttattaatattggcttttaaaaaccgaggaaaaatgtcaaagatagaagaaatgaaatttaaaaaaatgaaaaaaaatcaattataagttagtgaattgtttttatatattttgttacacaataatgagaaaaggaaatagaaaaacaaacaaacaaaacaaaaatatacaaatttacatgaaagaaataaaaaataaaaaatacatatttacatgaaaaatagatagagaagaaggcggtgcaacataaacataatatatatctatatatatatatatatatatacacacacgtgtatgcacgtgtgtttgtaagtaattaacaaaataagtccatacaagcccccacacttctaataggattagtagtgggttacaagattcgagctcataatcataaacctccaaaaaaatcacataattataatttcatcatatatattgtattgtaagttttttgggatggattaaaaataatttactcaccaaactcttaatatatatatatatatatatattaacttattttacttatttttttgtatgaaaattaaatatttataaattattttaattatatttatttttctttctttcatatatttcaagaaccaaagatggcttataataagcttgaccctaactaatttgaactttacatgaagttgaatttagtgatgtacgaatttatagtgaggtcaaactaaacccacgtcacactaaattaattacacctttaattgagatttattgagttgaccaatttaattaattaacaagtcttctatttcttttatgatggtatgaatgagacttcgcaacattgactaaaaaaattcattcccaccaaaaacttcaacttctaaaggtgggctgaggtcagcgcgatgctttccaccactccaatatgcagccacatgcaccaaatccatggatgaaagacttcaaccaatgatattattttctatttaaataacccctttttatatagatgaattgcatgtcacaagatcaaatgaatttcatatgtttacatggtcccaagatcagatgaattttacataattacatggagaagaagactaatctaattaagttatgctaatggttggaagaggaaaagtgtacattgaataaggctctaaggtggtatttgttttttgattgaatataaaaagttaaaatatttagttttttttatttaactaaaaataatatgttggtatcaattaacataagtaaattgaatttattgataataagtttattttagttatgttggttgatattaacacgttatttttagttgaatagaaaaaaaccaaatatttttatttttgtatttaataaaaaaacaaacatcatctaaaacatactataaatgacatgagctaactaaaaagcaggccaattgtaaagaaaattattaggaaaaatgtgtttttatcctctaatgtgaaaatatgaataagacggaaaccatgaactttgcatatttcaaattatgaattctactcccaaaatatttgggttttcatacactcttgtttgatgtgtatttcagtctcatgaaatacatagcaattgttttgagagtagaattgttaatttgaaatatacaaagttaggtttccattttgctaatatttgtataccagaagatgaaaatatactttttttttccaaaattatttagaataaagcaatcataaatcataatatagtaatacatatgtaatttatatatctcaatgaaattaatctcaccaccttaataatttcttcccactgaagagagtatttaggaaaccttactttatttaattaggagataaatgattatcacttaggtgacgtttgcatatattttttaatcttaaatttaaacacacttgaatttgagttgagtttaaatacaacataatgtggttaaaagatttttttttttttttttttatcaatgtttgaatgttattaagagtgtgtttgacagtgattctatttttaacatctttaatactttaaagataagaattttcaaatgttaaaaaaattagaaatactttctaaaatcacagtcaaacgcactctaaatcatttatttttattaataccttagagtttctttgataatgattttaatcaaaatgcttttaatttatagtgtttttttaaaaatgatttttagaataaccacataccaaaatatcaaattaggaaattgatgatgagtaataattaaaatttttaatcatttaatttagttgttggttacttatttgtatataatgcacatttggatgtatgaatttatgactgaaaagaatcttcattaattttaaaaataaattcattactttttggatttttaatttaggaaattaagaacctcaaattctaactttttattcactttttaaaattcagtgaaattattgatccgattgaatttaaatcagtgtgagctctgctttagaattctaattggagaaattttatttgagtggatgatagttgatttatttaacttggattttaaatttgaaaaaaaaagtagtaaattcatttctcatccaagttttataatttctagtattgttgcttttgcttttgaataagcaattcttagaaatttatgatgtataatttgattgagaattagataagttatgagataaaaagacaataattgtattccatttggggaatttatggatttattttatacttatttcttaaaaagaaaaaaaatgtaattcttatatcattcattttgattttgagtaagaattcttaatttaaaaagtagatctaaatttatttgagaaataagagacaaaatgataaataaataaaaaagaacttatgttagttttattcaatattttgaacattttaccaatttatttctaaattgaagtacactctatttacttttatgtcaattgtagaagttaaaaataaaaagataagagaggaaaaaaaaattaacttttttctttaagacaaattataaaaatgttaacttttttttattaagataaaattatcttagaataagtaataaattaaaagagaaaatattcaaaaattactttaagaataaagtaacaaaaaaaagcaaacaaataaacaaacaaacaatgtcttaatattgctagtaaggaatggaattgaggattgttgggaccttgatttttcccgcctcattcccttagcttttatacctctttaattatatttggacaaattatgtttggatagaaatctattctaacataatttggtcaaatatagtctacctcaacataatttattcgaacatagtctatccaagcataaactatctgcaaatatagtctcataatataattctatttcatattacgtattcttttattatctaatattactacatatatacttctattgttttcttaaaaaatctagtctagcatatattattaattattttatcatttgccaaagttcattcaaaatttttttatttagttaattttcattcttataatttagttaattttcacttttttatttccatataaattttcatcaatatcaaaaaaatctaggccaaggaaaagactaccttcaaacatctaactactattgaatgtcattaagttataagtatgtactcaattaattattattggtagaaaaatactatgttattattattattatttattgcttgtaaaactaggaactgcattaacgttatttttggcattcctgtaaattgatatggcatgtgggggtagaagtagggtttgtgaattcagaagtagagggatgtgctgatgtggagcttttataaatagggtttgtcaattttggggttttgacctgaaagaattaatccagctgtaaatcaataaaatccattgtggaatagtttcagcaggtctatttccaaggccataaagtcaagtatgtacacaaatatgaggttttgattgttgtccacttgtcactcaattccaaatacttaaacatcagcctgctttgaatattgcagtgcagttttaatggccacaaaataggcttcaatatttggttcttctcttcaatacttctccacaaaagagtgcaaaatgagtgtgaaagtgtgaagagagagagagagagagagagagagagagagagagagagagagagagagagagagagagagagagagagagagagagagagagagagagagagagagagagagagggagggagagagagagagagagagggagggagagagagagagagggagggagggagagagagagagagagagagggagggagagagggtagcatgtgtaatatagcatgtgcagaatgtgaaagatattaattactttcaaaatgtatgttaagagtttgaacagatgaaataggtagagaaagacccacatgcatagatttctcatgcacatggattaaaatattcaaatcaaaactatcgcccatcattgtgccatttatttttaccacctaaaatatttattatctacacgttctgagagtctgagacccatatacatatatatttatatatgatgcatattcacacgcatacacgctcttcatatacatatatataaaccctcttcctcatctatcctcctatctccatcttctctacaattacttcatcaccaatggctgcaaagcttctaaacctctttgatttctactggtttcagcatctaatcttctcaaacaagccacctccaccatctcctccaccacctgccccacacccagatctccaattctatgatcccttcaaggaatcaaacctctctgagcatcttcctactcttcatgttaggtctcttggtgatgctgaccagttcttgagctcccaggagagcttcaccttggataattctgtgtccccaagctcagtcctccaggcatcaaagctccaaagaatcttctctgtgaaagaacttggagaagggtacccgacatttgatgagactgatagacctatagagagaaaggtttatggtggaaggagaagaaaagggagcagaaagagcttgtcagagcttgagttggaggaggtgaaggggttcatggatctggggtttgtattctccgaagaagataagaattcatggctggtgtccatcgttcccgggctgaagagattgggaagaaaaagcactagtggcggtgaagatcacgatgaagaagaag

SEQ ID NO: 13462 - DNA, 6692 bp, Vitis vinifera
  Intron number 9 from transcript GSVIVT01024519001 (locus G SVIVG01024519001) derived from phytozome v7.0 (chr-ID chr6 ; pos 9345674 to 9352365)
tggtcagtttttaaccaaatttattggttgaattttattcatacgtaacttttatgaatagttgcatatgcttggactttttaaaaaaaaaaattatttttcactatgaagcaccttttctctaactttttctattccccataaatgtacaatatctgaaagttttagtccatgaactatacaacttgacctaaatttagtatgcatttctcataatcaagtgtttcacatggtttaatgtatcttttatagtcattgttgatggactgttttgattttgaaatgtgtgccatgaggtattggtgtgtggatagtgtttgcacaaaatgtggccattatgtgtcaagtactgctgctgctgcatatgaagctgatctgtgtgtttggcctactggacctagacattagtgctcattccttggaagaatgcctaagtacatgttagatgcttattgttaatgaagttccacttgaatggtgtctgcctaggtatggttccccatcaaccctttggaagaggcttgatgctgatagggatgaatctctgaggtctatccaagaaaaggaagaaaagaaaagaggaggaaaaaatttctgatttaagttatttagagtcaagtttagtagttatttggtttatttgagtcttacttagatttggaagtttttattttagttctttttaaaatctaggaaattttctttattaagaagtattattacatgaatttttttttgtaaagttttaaatttctagttctaaaaagaaagtctgcattttttttatgagtgttagaaaagaaataaattactacaaaggttaatttgaaaaatttaggaggcttagaaaagaaatgaaaattctagtaagttactataaaggttagttttctgttttcatagttttatttagtttttagtttctaaagcttataaatgaggttaattattgtaaaacggggttaatgaatgaatgatgatgaataatataaaactttttgcaaaccttgcaattgccaatggtgagactccattatttttcttctaggtaagacgcctagaaaaccttattcagattctaagtatttatcgtatattttctcttttattcttttattctttatttattttttcctgctgccatacttttatttcttgtttgtctcctcaaatcctaaaaaattgaagccctaatccactttatttgattgtagataacaatttgaggattgtcctatatcagatgccttaatgcaaagatgccagcttaatgtaacaaacataatcttttcctaagctcgtgcggcacttagacaagctaagacacttgatcttgctaagtcagctttactcctaatgcttagtttgcaaggctaagacgcacccgacttggaagctagtaagcacacgtaggcaacatttgaagaataggaagctttattgttctcaaggatgctttacaagtgctttggaagctcacttgcttggttaggaagtgatttatgtggtgccttggccaaatgaggcctttacctatttataggcaccttaggaagtctctagaaccttggaggttccttacaaataaaaaatgatctagaagctcctacactagtctatgtacaaggctatgtacaagatgcctttggaagactctagaacaccccacactattccaattctctcctagccaagtgtagagatgtgtggacatctctagccctctctagaagcttccatactcttccacttggagcttagtgtagatgtcttcaagggtctctagaagcttcctacctcatatataagcccatggggagggtcatttgaagcatcttgtgacattaagctgggagcaaggcttgaggagttcattttgaactagatgcttgtgaactagatgcttgttgatggtttggttcaacttgccaattttgaagctcttggaatggcttaggatattgacttgattagagttggagagtcaccaagatggtgcaacatcacgtggacagcatatttcaagcccacttcagctaggtttagaaggaaaaggggtctgttcttgttcattggatgggttaccaatgggtgccaaatcaccttgaagactgtatttgaccttcaaatggtgcgtttagcttttcaaaagctctcctaaattgacctatatatggatatacgattactactactagtactttttcaaccactattagttttggcattattttgttcgattggaaattggtttgtttctcataggagaggagtggagttgtgggctaagtgaactcctctgcaaataggttctttgaagcttaactttgatagctgcctcttgtctaagctatgtcaaataggaattgatgatccaactgttgctgctgctgctcctacatttagcaattattttgttggattgaacattggtttgcctaacttattggagattggtggagttgtgggctgaatgagctcctccgctaattaataccttgaagcttaacttggatggctgcatcttggttaacctaggttaaattgggattggtgaccccatttgagatgataaaggtgtcctccaagctttctccaaggcacatggctttagcttagccatttaagtagagatgttggtgctattgaaagagtgcaattgatgaggagttgaggtgtctctaatcttatggtagatgaggattcaacataagttccttcttgggtgacaaatagattgaatgtaggagattttgaatctcgcaagagttttaagatgtttatttctttgaagtctagatagacaaaggagaaagatgataggttgacatatagaggagccattatgaattacaaactgaaatccaacttagttgaatgacattaagtgaaattcttttaaaagcaatagagcaagaggcccaaagggaggaatagaaatgaaatagaacccacaacgtctcttctatttttcatttttcctaaaaaatcctagcatttctcttttaccgcacaatccaaagaatagtgaggcaagagatttgccaaagtgttttgcctctcaatgaattccccaattctctaaaagagataatcatcatatctctgatattcctaggtgacacctaatccatatggcctaaattgaagagcttataccaaagccgcaaggctaatggacaatgtagaaaaacatggttgaccgtttctccatttcccttgcaataaatgcaccaatgcatactaaaggatttgtagtgtcttctcacctatagcaagtaattggtatttaccttcttattcaccattaaccaaacaaaggccttgacctttgaagggacttttgattttcaaacaaaattagtcggaaagaaaggaattggacttgggggcttggacaataccagaaaaaatgattttattgaaaatgagctagaggaggataaagaccatgcccttgaatctatagtagtgggagacaagtgcaccaaggtgagtcatgacatgagtctttcaagagaatcaattttaatatcagtgaaattgcactagaagttaaaattccaaaaaggcaagtgggaactactgaggtttttcattgagataactctatagagatttggaaattgggaacaaatcgagcttaaatcaacctctagtgaagataataagggttctcttggctatgtttctccatgtgagaggaaatgtggaaagctttgtttggacctttagtaaaaacatagctcttgatgtgtttttccctctaaaaccataggtgcacttatagtttagtacagagtaaaagagaaaaatttagtttagaagttcaattacttatgagttgtatttcaaaaccaacctctccctcctttcctcccaattgagaagcaaagaacggtggttggttttttctcctctaaaggttgtggtcttgtgaaaaggagtagtgtgtcaaatccctaatcacaaatatttcaactgtggcctagtgtctactagggtcaatccacaaggaaattgtttttccttggaaatttgtcaaaatatttctttaaagaaaatccaatgttttaaatgtggtaaatttgagtgattggaaactattgaaatagcaatgccacaagaggaaactaaattgttatttcttactcctactttagtcattttcttgatctttttcaacttgtgtgattttgatcacattgcatgagtcatccttgttaagtcctttgatcaagattgaaatttactatactagattagcctaacttgggtcacataatggaagctcccacttgttcccaaggttgattggcttgtggcctttttcaaccattacaataagcgtttgttacaacttggatctagttttgctttaaccagttgaatttgtttcagaggaggtggaagctacatcttttaaggttcaaacatattcccaaggatgcttagcttgctgttgtcacatttatcaaagaaaaaaaaagcttgcggttgtcacaaccttacaacgtgcattcgctataaatttgctacaactataagattcacctctctttccccctctgcaacttagttaaaccatcccaaaattaagatgagtgaggaattccactcttttcaacccatgacacttgtcccctttagctctttatcgacaagcagtggtaagatgtgtgggaaatttaattaaatttctagatatagctactctagaaaaaggaatgttttcatgtaaaatcaaagcttcatttaattcaaaagagtataaaggttctctaatagaaatgaagtgcaagaaatacaaagcaaacataatattctatgtttttctatcctaacactccttttatctctctctttcccttctctttgtcccctcctcatcatctaatcatctctctttttatagctctttcatgcttgtgtctgaagccattcatcatgaatgggagttaaaaagtagttgctaaaatgtcttctcgcaactatcatggtgatgaaacaactatggtgattggaggcttgccaattctcttttccaattagatgtaatgaagttcttccttggtttgaaactgggttacatgattagcttgaagttccttgattgagaatctttgaaaaagtaaggcggtgatcaactctaatgaagggtgcaagtattcgtagtgtaggtttttgctttagaaggttgtgttgtgtgtgcatttggtgggtgttgctcccttagtgcagctttttgaggtgcaccaccttatgtgtgccatatatgaagataaaaaaaaagtgcgctgctttgtgaaaataaaaagtatgccttgattgtgttagcaagtgaaatgtgccactttatggtgctcttctgagaattaaaaagtgcgttgcatggggtaccaggtaaggtgtgccacttgtaagatggaaggtgcgccaatagtgttgatagaaggtgcactatgggtgatgataataaatggaccaagttttgtatcttcctttgactcgcttttgaatgtgtgccaattgatgccaggtatacttaatatgtaccctgactagatctaatgcacttaaaatgtgtgccaactgacccatgcttcaagttctccaaaatctctttctctattgtttttctagttgtttctttttagtgcaaattttgttaagggagcctgaaacatgttaaaaaactattaaatatagagattagggaccttagtgacaaatccttgtgttgagttagttttgagatctaaaactcattaagataggatcaaatgatcccctgcaaatgtcaagttcaggatctcatcaaatagctgatatggcatgcatcatattcactcccaatgttcaaatgtcaaaagatgtagtagaataggactattgattttgcaatctatttttctaattcttgaatttaccaaccatatccttcaaagaagacctaatattagtataaatagaaattctcatggaactaaatcacaaattaaaaggaaataggaaattcattgtataataacttcttacgataagatatcacaacaaagaaaaccattaaagtttttagacaagactcaaataagaacttttagaaatggaaaccctaaaagtataggaacctcttacaataagaagtttcttgcaaaaagagctttcaaaactttgagtaagatagaaattatgaaaaaaggcttgattaagtcaatgtaggatttctttatttccttcctttttgtgaataaacccacagaggttcatctgtatcaaataactatagcaatgttgaaagtaatgatggttgtgatgttgcttatgcatgagatggtgatatgtctttaaatttataaagcaattgttgttagaagcttgagaaaatgtaggactattgttagggtaattggaaattccttctcatttcattttctaaaataatatatcttaaaaattgatatgtagttgttttattgcgcaaaaatcatccattttccataatgttgtatttgttgatgctcctatggttaacggatttcattgtttatcaaagtttttataggtaagttcttacattttcttttatattcttgtagttacattatacatctatattaattatctgtatcttgttaatctgtactatgcttgtagggaattgtgataattgcaccatctcaaaaagggag

SEQ ID NO: 13463 - DNA, 7130 bp, Vitis vinifera
  Intron number 5 from transcript GSVIVT01013491001 (locus G SVIVG01013491001) derived from phytozome v7.0 (chr-ID chr1 3_random; pos 1711102 to 1718231 reverse strand)
gatctgcattgttgtggtttctgatactttgtgagttacatggaccccatagctccctttcaggttgacagtagaatagatgaattacatgccttttgtattatagtgctaatgcattaaatttgaaagacaatccatgttcatagttgggttgcaaccatctactttctaaatcaagaaaatatattttagagaaacaagtttggcctaattataattatttccattgttaagacattcttcaagtctctttctctgtgggattttgctgaagaaagattcaggaaaaggctaacctctgggaaatgccattatccctccaagggagggtggctcactttgttgaaaagcactctatgttgtctgtcaatctatttgctatcagcttttgtaatgcctagtaaggtgagggtcacacttgaaagaattcaaagagatttttttgaggtggaggtctacttgaaaagaaaaatcatgtaataaggtggctgattgtttattttgaaagtgggttttggggtgagtggaccaggtatactcaccaagttgtgattgagaaaatggttgtggagactggccttaaagtgtgacaacttctggagaaaggtgatagtgggaaatgcttttgactcaagcctttggaaatggtcttagggttaggctatggcatgatcatcagtgagataaggttcccttaaagcaccatcttctagagcccttcattatgattgctcaagatgcttgggtggcagatttttgggatgggacttgttggaatcctagttgtagaaggaactttttatataaggagaagctagaagtgatgtggaggacactaatttggaagattggtaaatttttttttattttcattagatcttactactcagccttgatctctaaggagtctctctccattactgcaatgtttgatttagaactttagagtgccttggcctctaagagtctctccattcttgcaaagtttgattcagaacgtcagggtgccttctaaacttgttgttggtgttttttttttttgcttccttttccttttttttctttctttccatgagaagcagttttggagaaaatcttgactttagaccaacttatgaagagaagatggaacttggtcaatagttgtccttttttttttttttttttttcctattaaatgtatttattaaggttaaaaagaataggagaaagatgaggagtcctccactcaattacaaaaacctgatcaaaatatgattgaactcctccactatacaaggagtctatatagaaggttttagactacaatacaatatacacataagtcatctcctcaagtcctgggtaagctcttctcattgatgtccaaagtcttttaatgtacacatcaaatgcaaattgagttgaataacattgaaggaatgcctttaaaagcctctatgcatgaggcccacttggaggaatagaagtgaagttaatctcacacctctcttacgtcctccactcatcttaaaaaattctaaaatctctctcaccacacaatccatagcaatatgagacaagcaatttgccaatgggtcttacctctaaaggagcttctcaaatcactatatgaaatgatcatgcatacactcctaggtagaacccaatcaatcttgacttgtttgaatagatagtgttgaagtcctaaagttatcggataatgcaagaagagatggttaattgattttccactcccttcacataaaatgcacctatcaggacttggggatttgaaaggttttctcaactgtagcatgttgttggtccttgcatgaccccaaccaagcaaaaggcttgaccttagatgagacttaagattccaaataaattttgttagggagaaaggaactatatatgatgtattggacaaagccatgaagaatgatttaactgagaataatcttgaagaggttgatgaccatgctctagcatttgggatggatggagacaagtgcacacaagtgagggatagataacatgagtctctcaaggtcctcaatctccaattttgtaaggttgcgacagaaatcaagattccaagaaaaaaaagaagaatggctaagaatagctgcattggtaagatttttaattgttaaaactctataaagacttgaaaatttgaacacaaaagttggtcccccttaccacaaattctcatctgttacccaccataaagcaaatgtgatggtaaaaaacatggaacacctgtgcattaaccttccaagggcacaccatctgactagaatgtcgctgtttcatccatcagtatgtgtcccataattgctcataataacttgatgtttatgggcaaatttcccttaaggaacctttaaagccatttgcttaggagaacacgattcttgagagttatcatctcgaattccaaacctccagacttcctagtcttacacactaggtcccaactagtgagatgataattttttctctttgtaatttctcaagcttacacgctattgactttggaatcttgaaaagagatgagaaattgttgggaatgtgtgacaagtatgattaaattagagttattctaccccctagagacaaaaatgcctttttccatacatctaatctcctcaaaagccggtcaatcattggatcttaaaatgcatttgccttaggatttccccttactggaagacccaagttagttaaaggctaaccttagaccttgcattcaagcatcaaagccaacctggtgatcaaatcttgacttgtgttgataccaaatagagttcccttgtctaaatcaatctttagccttgatatgttcccaaaaaccaataggattagtttaaggttttgtagattttccataaaagctatagagaaaaagatggtgtcatcaacaaattataaatgagacactcgagtcctatctatggccactaggaacccttctaaaagaacactctcctttgctctcaccatcatcctacttagtacatcaactgctatagtaaaaaggaacagggaaagaggatctccttgtcttagtcctttggatgccttgaccctccctttgtcattttcgttcaccaagaccgcaagacttcttgaggacaaggaacccctcatccaagacctctatattgtactaaacccttttctctctatgacatggtctagaaaaccccaatccacgtcatatgccttctcaaaatctattttgagggctacccatcctttattgatcctctcttcttatccaccaattcattggcaatcagaactacatccaaaatttgtctgccctcaacaaaagctcgttggaagatgtatatggtttcatggaggactcttcgaatacgtcgtgataagactttagatatgatcttgtatagactcgtggctaggttaataggtctaaaatttgaaattttgtttgttcgtctcctttttggaaaagggcaatgaaagtagcattggtgctttggttgataatcccattattgtgaaactctgaaaatacccttagtagatcctccttaatcacaccataataatggtgtggtcttgcatggagttgaaagatttggctaaagtttttgtttttgtggtcaggcatggatttgggttcttgtaagttgctttattttttgaattttatggataatatagggattggttagctagcttttgtgtttgttagctttcttatgtgttgcttgtatacattgtgtgcatctaggttgtgcttcttatttttgctagtgctttgtaatgcattatgtatgtttgcctataaaaaagtgaaattctttaatgttctcataaaacatttttagttaccgttcttccacaaactctttgtattgttaatgtcttattgataaaattaagagtgttaggtgatgttggataaacaaattaattgaaaagttggtaaaagaaattgtagtcaacacaaactcaacaagttaaaagtattttttttccctttaattttgccatctataaaaaagggatcgtgccccccacatgtaatctcaaaattaataattgaagcatcttgtggtaaaagcttttgatgttttatgaacttaggccaacaattgccattaaaaaactggaattttgtaatgggtgaatatcaaatattaattttttcataaaacttctttctatcacccctaagtggatttaggtgtgcttaaatatttattagataattgtttttttaaatatgtgattgtatagatttatttcaaatacaattgtcaaccatatattggtttcttaagagcttgaaatgatatacatatattttttttggaagtgtttgaatttatatacatatgtataaatttatatataggttacaaaaatgacctcaaaaacttgtgggggcacacccaacatatacggatagtatacacaaaaaaaccaacccaagcaccggaaaagagagaaaaaaacctagaaaagagccagactggccacaataaagaaacgtgcatccttcccaaaattccaaactcttatgaaaagaagatgaggagaaaccttctctaaaatcctaggggacatgcatcactagaataccataagaaattacacaataaaaacttctcaatatcccttaggggggtgtgaaccctaccaaaatggatccaaatgttcctccctttgctatcctaaccctttaatctacataccattttcccttcaagttgaatcacattgagaatagtgtccttgaaagctgtagtagtaaaggcctagaaggaggaacggaaataaaataaggttctctatcgcttatggtactccccacttgtcttaaaaaaaaattcttacaattctttcttgctacactatctaaatcagcataaggcaaaaaatttccatcaaattttgcctcttataatactccccaaccctccaaagggtggtcattatgtcacttataattctaggaggaacctagtctagcttgactaatctaaatagtttgtgccaaagtctcaaagtcactggacaatgtaaaaaaagatgatcaatcaattctccacctttcatgcacaaggtgcaacgatcaaaactagagctttaaaaggtcttctcacctaaagcaagtcattgcttttgaccttcatgttggtcactaaccaaacaataccttgacctttgataggactttagatttccatatgaattttgttggagagaagaattgaaataatgactttgataatgctaagagtttattgtgaataaactagattgactagtagtgtgtagctccaatgggatggtctagccaagaaagattgtttcgttgtttttacattttagcttcttgtttttgttttcttgttgtttagtttttctttggtgggaggattcctcatcgttcttttgtacttcttatttctatcaatatatttctttgttgtttcctatcaaaaaagagtttattgtgaataagcttgaagatgataatgatcaaattatcatagctagaatggttaaatggtcagaaagcaagagatgacatgagtctttcaagatcctctatctctagattagcgaggtttctatgaaaattaaagttccgagaaaaagggtaagagacatcaagaatggataaaataatttttttttgattgcgacaactctaaaaagatttgaaattgagaacaaagagaccgatctcctcaccattagtcctccaaaaaaatgaatatttgttccatctcccacattaaccgtgataggagatatcttggaaaacttgtgcaatgactttcaaaagacaacaatgtgaccatctaactaaaatgttggtgtctcaatgattaggttgtgtcctatagatacttaatatgaccttatgcagctatgccaaagagcaatactctccttagaaaacctcccaggccactaagagggatctattcctcaaagaatcccacctgaaacccaaacccctaggtttacacacttgatcccaacaaataaggtggccattctttcccttcctaacccttgaccaaagaaaaggttttttttttttgtgtgttttctcaatcctagtcattactacggatgagaccttatataaagagggtatcaatgtaagtcaagacctaattctcttgatttgactaccatttaagaatgtaaggtttctgattagtctttgttttatccatgtctccctttggcagggaaccttagagttgtctctttttgggatctatttatgatgtaggttgtttaggcttattaagattgcttgggtttctcctaggagtatggtgagatgtagacactttgttatcaaggttttggaggtctaaagctagttatctaatcttctagcagagggagattctacactagttctattttgggtaagtcataaggaataagtcttgttgaggtttaatatgtggcttcaccaagttttttattttgcgctagagttagggtgatccttctatcggatttctcatatagctaataacttgacaactatgtaagaggggaagcaaaaaaagtaattgcttttcaggttttttttttcttttttctttttaaccccattgagtattgactttgtaaatctaactaattgttcaattctgtagggtagatgggtttttggcttttaatcaaggttatgtaatggtgtgtttagggaaggagttccattattctttatatttacatatttcttgatgatgaattatttgtttttgacaaaataaatagagaaataatatacatctcaccttaactacactagtaccttgtcttctccaaaatccttggtctatcagtgtagattcactcctattgcacaggattcatcatctctctattttttaataggcataaaatttgcctttctcccacaaaaccctgttgaccaatgtctccccctctatctataatttttaaagatgctccaaccatgtgagtttaattttttacatgctatcatctgatgcatgacataataacacatggatctttttcatgtacacaaacaacaaatattgactctattggactaaaaaaagaaagccttaaccaccagcaacttggatttggctgcacta

SEQ ID NO: 13464 - DNA, 1742 bp, Vitis vinifera
  Intron number 3 from transcript GSVIVT01017497001 (locus G SVIVG01017497001) derived from phytozome v7.0 (chr-ID chr9 ; pos 9476798 to 9478539 reverse strand)
cttggcagacttaaagaagaaagaggtaaagctattatcttcagttgtttgtagttattatggtttgaaaatatagccattttgtaaaccatcttgattggagtaacaacatgttatcatatggaatgtgaacctaatgtgaaagaaaatgatctaatttgttgcattcatacttgggtgtaatgtatagactgcacattttgttaacaaatacaattttttatctttttttttttttttttttttttgtttttttcatcggagttgatatttgaaagtcatatttaatttgggttgaaggtccattttttaccgctgtgatcaaggaaactttaaatttgttaggaaacactacttatggtggtatatctcctttgcaaaattgcaaaggtcctggatgaaagcatgaggcaaaatggtttacccttagtttatgaaaaaattgattctcatgattatccagcaatgaaagaattgcatatataaatggtgctatgtcctatatgtgtgtgcattttttgtgcttatgtatgactgggggttgttgtgccaatcccaagtagtggggttttaagtctttggtgaactaaattgtatatgttgaatgtatgcatattttccatatatgacatagtggccagtgtgacacaaggacggtagatatggagttcagtcaaaacctaaaatccattaaagtattcttgaatcacaaagaatataaaaaagggagtgctgtaaatgaggtaagggtgttgttttttgtgcatccctccccttttttttggccttgtatacattgtgtacactttgggcgctctttaggcgcttttaatgcaattgctcttatctataaaaaaaaagaatataaaaaccgagcgtgggaaattttataaatccacagaagcataatcctgcttttactcttagtgtgaaatttataggttttataaaatcctaaagataattagaaagattgttaaaaaataattaatataatgccctatgaggactcaattttgaataataaaacaaggagaagtactgacactaataaaataaataagaaactcctaaaggtttgaaattatagaagtgacatcttgcaaaaactgtaattagtaatcgaagaaagcttaacctttattatacacttggtgcccaatttataggcttcataaaaccttaaaacaatttggaattttataagacttttccaagtgatagataacatactcaaactgtttaagaaagaaatccttaaattactgaaagtcataaaataaaatataaagctactaaaaagtgaaaaatgaaaaaattggaataaatttcttctagcaccttataatggaaatggatatttgtcatcttctcatgaccatttgcttgggtgataaaagtgcagagggaaaaggagttttgttgtttggattttgtcatgaagaaaacaatgataaagcaattcttagaaaaatcaattcatcagctagggtgatgtcttgtgtaatattagttaaattggagcatccatatcatggattacaatgtagaaatagctagtagacttgaatggagagagcaattatatggcttcttggagttgtgattctttgggttgtatgctttcaattgtaacctctcttatatttgactattatggtgttttgaattaaaactgatgcatgtagttttaaatttatgctgtaggattgccttctttgccctacagggtttgcagccaa

SEQ ID NO: 13465 - DNA, 4994 bp, Vitis vinifera
  Intron number 1 from transcript GSVIVT01025950001 (locus G SVIVG01025950001) derived from phytozome v7.0 (chr-ID chr1 8; pos 26790490 to 26795483 reverse strand)
attgtttccaaagtagcgtttcaattctttagcaggtagccacccaaaattcgaattccccatcatctattatcagattctctctgggtttctttcattttccttcattgtttatttgtttctggtagttggtggacgtgtttgattgctaaattttcatgaaactaacaagaatttagaggacccattttctgggtttaaaattgtttcatttgccccatttcttcttttgagtgttccaggaaattgattgatgtgtttggagtaagttctgataaactgagcaactcttagaggatccgtttgggctccctgcttttattaggcattaatatttgctagaaatatttcattttcatggttcagtctactggtgggtgtgtttacctctttgtttgtttctgtcaggtaattgaatgaattttgtcatacctaacaaccatcgagaggatccatttgggctctctgctctgttgggtcatcataaattgatgaaatgatttcattcatatagtttaatttagcagtctgttcttttatttgtaagtgtatttttgttctcaggtacttgattgatgtgcctgttcagtcaattttggaggagcaattaggctttctgttttgttgggttattatcatttgccatcaatcgtaggcaaactaaaaagcatttagaggactcacttgggattctgcctcattgggtcttcatcatccgcaaaaagtatttcatttacatgacttatttgctaattggcaggatggtctatttttgagtttgctttgttttgtgtgctcttctctctctctgtctctctctctctttctgtttctgtttcttttttgtttgttgggtttttatgattcgtagcaaggtggtattatggggtgtgtataagtgttatcatcatcactcaaataattggctgttggagaagaaaaggaaaatgctgaaagttaataaaaatggagttctgtctcaagcatttccatcatttttttctttattcttttggagatccaaatggagcctagatgatgctgaggaagaagttggtggaaataaatattaccatcaaaatctaaaagtctgaacgaaagctaagatccatgttaactggtggaaggtatgacaatactaacaatgagagtgaaaagaggagctcttaggcaacttacgacacttgtgagggggaaattgtagtttctgggaggatgggaaaagggaaaaaagttcaaaattaaggctggtaagaacataacacagttgctttaattctaggatagattcatttggggttagagtaatagctgcattattaagattgtgggtcttttgctgcaagctagtgggcattcttatggaacttataaaatgtaaagttgattatttcttatagtcattgagcttgcaggtccactgaaatgaaatgtttctggagtttgcggtgaattctaggaacaactaatttaccattcatttggaccaatctgtactaacttgcttaataattttttgaattcttaaatcccagagtctgtgagtatttctgctttaacatagtcggctgtgatgtgagaggtgaacaatgttacgagtttgatctctaaaaaggggtgatcttggatatttaacagttgattccctaagaaaatttatagttcttctgcgcctggtataggaaagacatattgtctaatcgtaggttatagagcttggatcaggccatgatatcccttgagagtgttaaatttcagagaaaaactttcaaggagactaaaattgaacaagtgatttccagaagacatagtgacaggattacaaatctgatggactctctatggcattttaccaagagtgcaggaggatcatcaagccaaacatcttttgaaaccttagggagctccaatctaacactatttcaattttcaccgccttagttccaaagatatagtatcaatatgatataggattttagatattttagcttcatggcaagcctatataggttaattaccatgtctttttctgaatatctctacaatgtgcttttagacattatgtcttcctcccaagtggcactgtcggagggaaaaaattcttaatgtagtgcttattgctaatgagattacggatgagagattagatctactcaggttggagggaagagtcgtatccaaagcagattttgaaaaaccccataagcatgtggagtaggattccttgaccatactatgagggaaagaagatttggcaagggtggcacttatggattctaggtattttatcaaatgacagtgatctgatgcttatagcaagccaggctttcagtgttcttacacaagggggcccctcctctgtgttattacctttggcagtaaatgtcatttggcagataatatttagagcaggaggcaaggattactggaaggttttcatgtggattggtccacactccaaatgtcttctaatccttagagccttcaggatgatctttggatttaattatttggttgagtgtggcattagcaagtggcctacaaaatgcctgggtggagcctcagaggtttgggtttctggaaccagttatctcctgtgggggtaggattggccttagttcagtcttatttgtctcatatctctgcttattaaatgatacatgtatactttaaaattcctatgaaggtcacctctactattattatttgatctggcatggggagtttagatgttattatcattagtaagtgtggtctttagtttaataggtggggtcagaaggaattctcatctctgccttaagaaaccatttccaaatgtcttaggttttccctctaaatgagacttgttttccataatggcattaaaattcagttcttggaagtcctttgcgggttaaacagcccttgaaaatttcccctttctgtctttattgagttttgaggtcgagagaagcttcctattgtgaacctctattcccttctaacaattcttcttctggaactttgatttgaaggaaaaccttactgattgtgactatccttttgtctcttgaagacatctgcatgtcctcatctgtcctgaaagtgttgttagactttgtaggtaaatggggtttgtttatcttcaattctttctataccttatccaaatgtgaaaacaggtcttttttctgcctgattttataggataagaccaaagcccttctgaaaattaaagcatttgcactatagcagctcaacaagaggatcaattgctctccaagcaaccctacaaaggtaatagcccaaaaatgtagcccttgaggcttggctcaagtgcttggggtgggtttatgggagtttctaggttcaaatcccaatggggacaaaaaaagaaaaagggaaaaaaattacctataaaaaaaaaaagcccaaaaatgtacttgcacatgagaaatggagtgaaggcacatttttttttcctttttcttttgtctggggctgcttctattgactgagaatttatttgggtggctagaattgcttgcatggctttgaaggagatttgaattatgatggtttatctccatttttttggggggctttaggaagggggaggggggggggggaagcactcagtgcagtatagtcctctggaacagtggcttttcagctcctatttgggtcatttggttggaaattactaaggggtggtagaaatttcatttatttatttgtttgtgttttttatacaagcatataaactaatagagaaccacgaacatcgtgtgggatgcatccctgccttttacttctctggctgttttgggcctttcagaaatctaaggaattctctgaatttccatttaacatcatggttattagggggttactttctggggaaatgagggtaaaacaaggaataatcttcagatgattcctctgtaagttttcttactctcaagtgggtgttcttaagttatctaggccagatgggcttggaaggggttatttggaactatttataacctacttttagcttatcctaaacatgcaggttttgatttgctatgcagttggagatttgagccattttagttgctttgacaatgggaatttctaatattactgtagaggcaggttctttctggtcattccttgggcctcttttagtggggggaagcccttagtggttgagtcaccagatttggagattaaggatgtttgaggatgttttgcttcttcgaagcctagattgtctaagaaattggctaatgtgctgaccgagactggatcttggactaagatgtttttgttgggtttcatgtatctttatgaggattttggtggttttattgtatggttttgtgctttccagctcttctctttcttctcaaagccagatctctcatcctccctattgcttgtaccatttattcttttacttagtgatcatctgttatgaaaagagaaaaacatcctagttttcttacagagatccacttcaaccttaaattagttttcttggttctattattacttcatcaatctaaccatatgttctactgtctaaatcattaacataatttttaggcacttatgatttggtcctagacacatgaaaatatacaatgcagatatagtctgtttcaacttctatatacctgttcttctcattttatcctaagcagtcatcttatggtgcactatgcatctgtcctgcatgggggactacaaccctacttcatatttctgtgcaatgttaattccaaatttgctaattttttctattcttttgtatggcattatgcatgggtaatttcttcatgcactaggcttctctttttccctctccttattactttatggagaaggaattaaatcttcgagtgataaatgagcaatgcagaaaagaaatattgtattttcctttgattgaaaaagctcatttatgctttcattttttaattctgaggtttttcagtgcagtgtttccaaggaagatagagaaa

SEQ ID NO: 13466 - DNA, 4927 bp, Vitis vinifera
  Intron number 12 from transcript GSVIVT01021589001 (locus GSVIVG01021589001) derived from phytozome v7.0 (chr-ID chr 10; pos 7583207 to 7588133)
ctgaagccctccaggcatgttctatttaaaccctcaaaagcatgctctctctctctctctctctctctcacacacacacacacacacacacatatgtgcgtgtgtttatcagctctaattcaaaaaccagtgtgattcatatgatcatcctacaatatgaattgtatgcatatcagctctaattcaaaaaccagtataacttatatattcatccttacactttgtgtattgttgtcaaatttatgtatacaatcatatttcgaaacactaatataaaacagacatgatgcatgtactgagagaaaaaataaataaaaattagtagatttaagattaatttcttgaaagactagtattttaagagaagggttactttcatcattagggaaactgaatcaaacaaaactcttgaaaacaaatactatctcctcaatctttgagaacaaaagagggttattctcataaccactataggagtaccctttaagcagttgcacattaattggttaggtcatgatatatgggttttaaattcttaaattacaacctaggcagaaagtttgccttcctataccagttcaagaaaagaaaagaatgtgctatcagaatctccaacatatcgttttttccccttctagaaaacaataatttattgataatatttaggaatcagaagattacagagaaagcaagaaatcctttgaaaagaggagaagaaaaaagagaaagataattcctcctagaagtgcatctaaatatcatatcttattaacatctatggtatgcaaattgcatgaaataaaatgcaggaactaaatgacaatagagatgactacttggaggggtgaatttattataaacctccaattgcctagcaaagttcattccccatattattctgtttggatcttagatcatattgaaacagaaatagtggaagtattttcctttataagaaaaaagctttagtagaaggaaaagaggtgagtgattatttttcaatgcctttgtaaaattaaaaatgttgtccaccctataatctccatctctttatggtttaaataagacacaattatttttaagtcatctcaggggttgtgttgttgatggaggaggagaatggattgttaagcttgctggtttgggtttctccaagcttgggagagtttctgttatctaattttctaagcttctgaggggattagagggccttagagatatggcagtggattcactgcattattgacctagccagaatctaaagaaatttttctggctaaagaaatttagagtgtaatctctcttttattgtttgtttagtagctcttttggaaaaaagattctaatacatggactggaattgaacttggaacctttccatccccacctaatatctcttgccacccgagtgaaatcttaaaagctacttttcttctcttttcctattaaagaagtgagtgatttactttttcaaggcacatcaaggttctacacaattaaactggattatgtttaacttttcagctttaagggcaacagaatctaaatgaaagttcagtccctggaacatagaaaattaagggcttcctcttcttttcttcttctttttcaaacttgaggtgaactcccatgtttatgcaatgttttcaggtaaggaaaatgatgaccattagcctcccaaactttaggcttggcctctctaattgtggatgacaaacctcaactcttccactatccaatttcaggttgttaacaagttgaatgcattttgactaaggttgaagaggaggatttgatatgatatatttaagcttcaatgagttcttgtcatttttatcacaatgaagtcttgaatattgttacatctcttggataaagaaaaaagtattgttacatcatcttaaaaaggacattgttaagcttatagatggtgttcaatgtgtttaaaactataaaccataaaatatagattttggtgaatggtcaactgcctgaacccaagcattctagttcaagcaaatactaaccagtctttgaattgcctcgtgaaaaatcattagtaaactatctgaacccgaattttctggttttctaattgcttaatgaattatgcatcttttggtcggtgtggaaggcaaggaatagaatggccttcatcaatggtgtgcttttgatacaaagacaaaaagttattttgtatgctttctttggtcagagacaaaattgtttatagacgattatcctccgactttagttagtttctttgattggttgggctcttgttgaggttgttttagtcccttctgtcatgttgttctttctcttatttaagccgttttggcggtgggtgtataggtattgtttaccttgtgttgctcttttggcgcctctttttaatatatattctcctttatctatcaaaaaaaaaaaaaaaaaaaattatggaagtttttgatttattaatactgcatgataatggatttgcagtatttttatcagaaacacacaatttattacaaatgaattgaggacacaaggagggttgtgcgctatccttcaagtcaagaactacattttggacatagggaaaaggaaataaaaagatgcaaagaatccttgaactggtacgacttagggaggcatatattttcccagaaaagcctttagcagtaaggcaccgtacttggccaactaatctgttttctggttggctattccttttttttctttgttttttttttttttttaaatttatcaaaaacgataatgtgttagaaatggataaagcaagtacatgagaagaatgcaggattctccccaaatttacaaaagctgataaaaaaaatgaaagattgaaccttctctagtttttagtacatctatatagaaccacttgagaatattctatatgaaacctctcatctcttcttgaggattaacttgtctcctttaaatagaaatcaaaacaaatctcttctattcatcatccaaacccttctggcctgcacatggaatgctagtcaagctgaacaacattgagaggaatgctcttaaataccatggtacaagaggcctggaaagatgaatagaaatgaattagatcccacagtgtctctgaagtcctccacttgtccttgaaaattctagcatttctttctacacaatccatatcagagtgagacaagcaatttgtcatagactttacgtctaatggagcctcccaaacccttatatgagatgatcatcatattacataagctcttggaaggaactcaatccaaactagctaatgtaaatagcttgtgccaaagggttaaagatgatcaaccgtttcttcactctccatgcacaaaatgcaccaattagggcgaacggctttgtaaggtcttttcaattgtagcatgtcattggtgtttaccctcttgtgtgccattagccaagcaaaggctttgaccttagacgagacatcaaatttttggttgtctattcctattattggaatagagagcaatgcaagtccttggggagattaatgactttgcacaaccaaccatccagtttctaagcccttgcttcctgtaagataatctagaaagaacaatggtggaattaacttccactataaattgctaaaacccaagtacctcacctctgcaaaccttccaatggttaatatctgggtctcaacggttaattctctaatggttcattgatggataccctgatgctctccaaaaccatatttagtagaagtctaagttttgatggcattgcaatattaaaggaggatatctaaggaccaatatgaattcaagctaattatatattgagaagacttcaagatccagtttcctactacctggactctagggaaaaaatcaattgaacctaatatctagtaatgatttaagttactgattgacttaaaaagcttaagctgttacgatttgagcccatatttgtactaggctaacaacttcccttatgtgtgaccgcatacctgcacacggagggacaattagatgtggagatgcaagtcgagtgacctaaaagcttaagttattaggatttgggcctgcaatgagcatatggggacacaaattgatgacctaaaagctaaagttctttggtgacctaaaagcttaagtttttaggacttgggcccacaatgggcatgtgaagaaacaaattagtagcagccgtagataaatagatgggaatagtatcagtagggggggacttgaactcaagacctctagctttgatactatattaagctaacaattgacttataagcttaagctgttagggtttgaggccacaatgtgtaccaaactagcaatttatattccagaaatattttgtatgtgttttccatttgtgtgtttataacaaaagtatgcatgaaaatcaatttaaggtcaaaaaatctatttgtcattataaccacttctaatcagttacaaacatggtactgtaaagttttgaataaggaagtggcattaatcctgcagttttgaactgtagttcaatttgttctatttgtctacattcaacttatagtaaaatcaatgatatcttttgtgtatatgtttctttgcataatgctatttgctgaatttgttatgatgttgcaataatgaaaatgaactaaggagctatattgccgtgatattattattggaaataaaataagaagcttgtaatgtaactatgcaactgacacaacggaacttgtttttaggctatttcttttacatggaaactgatacaacatgatatcatttgtatttcaaaaagtggtatatcaaatttttttatgtactttttgatattgttcttgaaaaaccttttgctctgtttaattatgtgtagaagtttcttggttgatcctatgactgaatcgtctctttattctacagcaaat

SEQ ID NO: 13467 - DNA, 2332 bp, Vitis vinifera
  Intron number 2 from transcript GSVIVT01036034001 (locus G SVIVG01036034001) derived from phytozome v7.0 (chr-ID chr4 ; pos 7644216 to 7646547)
ggcctgttagcggtggcggtctcaggttaactctctttccatatacgtgtattcctattgtattctgttaattttatgtatatttagttagcattgatggtttgcgtgtgttgatctcatgtacatatcatgagtttatgtaaccttgaattttgttagtttagtttatttattgttaatttaatgctcaattatgtgatagatctcaatttggtagattagcaaatgacacttttagatgggtccaatgaaaccagaagaaaagcatgacagataggaagtgatgagtcttttattaaatgatatgttctaagaatttaacatcttttatgataattgcttgtctcgagtgcccttaaaggttttaatgtcacatgtttccaacctgacctgttggctagcagcattcaccggtagcatgggtatttccagcattcaagttttgaataaaatgagctttttatttatttattgtttatttatttaatttccctattgctgaaaaacattcttctgttatattaatgaaatgctggtactatcaccacattatctggcatttctggtcattattttctgtagttaaaagagttttgattgcttttaatttttttgtaaactgttctaccccaaaatatcatatttggtgaggagcagcatatatcaacctctcttctgttcttcatttcacatttgcctttctactactagatatgttattctgtgttatctgagtgcatgccactatttatattatgggaatctgcatggctggagatgctcatgctggaaaatcacaccttgtcgtgttaggcgcgtatggtcgttgccttgggggaacaaaactagttatctattttggttgtttgcaggatcttacaatattcaatggattgataagtaacatgattgtggcgatatgattttggacacgtgggatgtgcccctaagttatgatttggaaatatcatcagtgatcatgcatgtgtggttaataactcttttaaattgattatcaaatggttgctttttcatttttctggttcactgataagaaaatttaaaattgatgtcacaaattctctttttggcaaggtttgatgcatatttctctgttattttgtaccatttttgacttcataatcacttttgtattattaaatctggtgtccactattagatctaagtgcatttatatgagtatcctatcagtttgtgtgatgagaaaaggtcatgcttaaatcacattttgtcatgttgtcacacgttcaaaccactttcaactgctcagaggatccaattctgtaagtccgacaaaagtaccattttggcattttgaccagtcagtagtatcgcttgctgtggattgaagaatcatatggcgtcgatgatgtaatcttcgaaacgtaactttaaaaccaaaagtttccttagttctggtgttgaaatatctcaactttttcaaagtgataataaaacaatgcccttttgtgtggaaaaaaaaattaaattaaatttgttatcatgagatgtggttttcatacaatttttattttctatggatgcatggaaaaaatatcaggatgatttcattgaaagttttctattgggtcaagcggacatgtgagtggttttgtgtattagatggtatttagtcttgtgttgttggtgtgcatgctgcaaaattttctgttataatgttgtgcagtgcaaaatttatgcaataagaaaatccttaaaattcatgaagaaactaacaagtcattagaacaatggaagagtgagtgataaagaaagtgtattctcatatataacttatgactgagaagttcatcatatgtcccctactaaattggcctataatattattttggaagattgaatattaaatattccacaccatttaagaaatggccaaagctaatctaaatgaaaaactttaatcttaacctccaccattattttgtcaactagctaatatgatgcaggaatgtttatgctaaattttcttgtaacatgtcattatcaatatatggtttttaattttagtatgtttaagatgagaaggactcatcacccaattctttcatgaaatcttgttaacattttatttatttatttatttgggattaacataatcatacttgtcaactgtgctaatcaaattaactgtgtaactggtcccaaaaatgttgttgatcccaatctgattgggactttggtagttttgaggaccttataatgtttggttttatctttctaatatcatctacaacaataagagtgcacaggatcttcctaacatagtgtgagatgttgtctaacagtcata

SEQ ID NO: 13468 - DNA, 7131 bp, Vitis vinifera
  Intron number 3 from transcript GSVIVT01005136001 (locus G SVIVG01005136001) derived from phytozome v7.0 (chr-ID chrU n; pos 18485189 to 18492319 reverse strand)
cttacaacattttggacttgcaggtagacattcccattttctctttccagacttatggatgttgctgtaattggcaacctataattattatcatgtaacaactttctattttctgtatcatgtcatatatcatgatttttattttatatcttgaaaaatgaatagagaaaatacttaggttatatttggtttccggaaaatactagggaaagaaaaaaactgctaaggaaaatggttttcttatgtttggtttcaccatagaaaaatatgaaataaaataaaatataattaaaattagttaaaatttatggattttaaaattatttaatctttatataatgaagaaaaataaataaaataaatttaaagaagcatataaaaataatttattgactttgaatctattttttattttccttcgttttttctttccttccacttttcctctctattttcttttcctcacattaccaaacataaccttatagaaaaagaaaaataaatagaaagaaatatgtctacatgtgtaaaacacataaaattgcaaaaatgaagtaaagaaatagaaaaccactttcttgaagtgatactatagttaaagaggtaagtgtaaacctttatccgtaccatacatctaaactttataacttttatgagaacaacttattataatccaatgttttaatgccatataattcatggtagaatctacaaaatcgactttttaaatttttgactgggattttaagttccaaattccaactagtttgctattaaatattgttatgctaaagtttctaagttcctacatgtcctcagccgatataccaaaaatgaaactatcaggtataactataacttgcttggattattgagacaaatgtttttgtgtgcctaatatgaagttctaacttttcaaatttgtctttagcttctacatgttattgaatgtatcttagtgtatattgtaatatatgctaaaaatgtgacacttatgggtgatatgttattttttgcatgaatatgcacttatcctatgtaccatttttgtatcattagttttcaaaggctatggatatgaccttgtgagaatctagtatagggtacttaagtcaatttatcaacaataggttggattcattagttttgaatgagcaattcatctacagactagagctcagttcaacaaagccttaaataaaagtacttggagtttgacacgtgtatccttttatcaccgatagtgcttgccttacctttaggtaagtagggcaaccgcctaaggcccctactccataaaaggctgtaattttttttataattattcctttatttatttttctagtttttattagatatctctaaataattattgatagatttgttatgttagttaaatgataaactaaaagagaaaaaaaaaaagacccaaatttttataattatctaaatatgttttgtattgagatattagcaaatactaataggtaaacttttaataaataaaatgatttgttttaagtgattcaactacctattgtagccattagcatttattattctaattgtattgttccaaaacaaactattgattttttttttttttgaaatagtaaaaacttataataagtttttttatttgcttcaacttccttatttttatgtcatactatcttctcgattttttttttctcacttctcttttaattctttctttctcactcacttttttttctcttttctaaaaaaagaagaaaaaaatagatagagtaattgaatctaaaaaatgagccctagataaatatattagcaataataaacaagatttgggtaaagatttaatagaccatgaagaagcattagttcttcaaacaattagaagatattagaccaacaaaattataaaatattgacataataaaaaaaaatcgtaaaagtaaagatactcattatgatgatcaaaaatataatgtcaacattattgataaaaactctcttgtgaattgatggtttctttgtatggaagaggaaggtcagtagaccacattctccttcattgtgtttgagctcgaggattatggaatttgattgtcttcttgtttagggtggcatgggtggtgctacaattggtaaaagagactttattatggtggcatggttctttcgtgggtaaaaaacagaagaaattttggagagttatcatgtcctatgttttttggacattaggaaaggagaggagccaaagatcttttgaaagcaaagaaatgcttgatcaagcgctaaaattagtttttctttgcactcttttgttatgggttaggatgtacatagatggaggctccttaaccatgtttgattttataaactagttagggtcttcgtgaaagagaaggttgctttttgttgctttcttgactccctttgtacacaacctgtgtactttcgtgtgcctttagatagtgctttcaacttgtgtaccttggtgtgccttcatataatgctttcaatatatttattttacctatcaaaaaataaaaataaaaatttaagattatgagaataatttagaagaaaataaaacaagtgaggacaataaatttattaataaaatatttaattctactccccaagtatttgaaaatattgattaataaaatcttatttacgatctaccatgtcacaagaaagattaagtgaagtagctatattatctattgaaaaagatattttaataaaacttttagcaagtttgcatctcaaaagcaagaaaaataaattttaaataaaattatatattatataaattgataaataatactattgtatataatattagaaaaggcccaattgaaagttttcgcctaaggtcccattttatggtaagttgctttggtcattgagccagactatcatgtctattcattcataggctatcatgtcttttcccacagcatagactcacattcttttctatttttctctttttgtagtgccttcaacttgaatcaagttgtgtctcctcgctgttgaatacatttgtcttggatgaatagttgaaactatgatgttgtatagcttatgcttttctaaattgaatatgcttatggcctctttctcattaactgtcatatgcttatgacatatcttttcttgcattggaagcactgtagagagtatcatgggtcttagcttgtccacttttagaatcttaaggcattctgaaattgatgaagaaactggtgagtcatgaagaatgcatgaacatgctgtagatgccaaaatgttctaactcaggtttgactaggagaaactggattttgtcctattgtgaattggtattgtttgtgcaggaggatgacaggtccattgaccatgttttgatccttggttctgtggtctgagcctttggcctgtggtgttacgctttttgggtcgactttggttttgtctagatgttaaatgatattgtacctagttggcatggtaggttaatgaatatgaggaggaaagtgtaaataatggcttcatcatgctgagcctggtacttttggaggaagaggatttgtagctcaattggagtgtagtctaatgttagaaagtttacttactatgaattgggaatttgctcctctctttctttgtttggcacatctattaaatgtaagcattacaaataggcacatcagaaacaacccacatccaagccattttcatgtcatgcctgacacaggtacacacagtaagttaatacttcagggtgtctgtgtggcatagaaaagggagaacaatttgagaggaagttttgtaagcatcctcatagaaaaaggacatttaacacactaccaagtggcagacagtaaactaatctagtagtcttggtccaagcccatgtcaactaccgttcccaagggaaagttccacttgtggtaggtatgataaaattttccatagtggctagtctaatgggtggcttgcaaacatcaagttgaaaattcctataaaaaatatcaaatggccatttcctcatctagctcatagtgaacttgcaaataccactatctcaggaaggtagtagccttcccataaggcctagaggtctataataaatgaaaaaaccttcaacaactgccccagtgattctaatgagagcagtggcacctctgggtccattggtagactaggcactgctattgagcttaaaccatcctcctaaggttaactatccatcaagtttaatgcctaatggacttgctaaggtattaatgacaccatgtcaggaattccttatccctttgagaaatagatgagataatggtgttgatggggtgatgagtgatggggaaagccttttaaagtatattcaagaagggaaggaaggacataaattaaactctaagtagggttagtattagttggagttcaataagaatgagtatttgttatataaattttctgcttattgatcaaaaaagaaaaaaaagaaaagaaaaaaagaacgagtatttgttggagtcaaattagctaattaggttataggagaattagaataagagtcatgataggttattagaatcttggtagaatttggatttcttagagaagcctataaataaggctaattgatataaatcaaggaaaaaaaaaagagtgactaaataatattagttttttttttttttcaagtaatgcaattctcaatggggacactatttttttttcctttcttctggatgagattcatattccaaggttctatcccttgttcttatcttctttctttatatttttattttatttttttagctgccataaagctttatcctttgttcctctcctcaaaccctaaaagataaaaaaaccctaccccaccaacttgattgtatacatccattctagggttgtcctacatcatggggattctgcacttttgggaaattggccaaactgcttataaacccaaatgtcaaaacagaagatggttgtcctgtttacccatgtgctggcatgggtgagagccactcataaaataatccaaccttgatggtaatgcttttatatgtaaagctgaccccaaaaaattcttgttagtcttgctcatgttgttggttctgctgcattaatgtgatgctgtcgatggagaaaaatgagaaccaattcatgggttttatggagtgtgtgatgctgcccccaccacccccaccccacctctccctccacacacacaatagaattgctgtcctgagtcctgacataaggaaagtagttaaatggctagtttatgctttggcagtttgtaaatccgccaaccatttgaagctctaggttagagttacttaggattttcggaaatgagaaaatagttggcatttgatatgtacataaccctgaatttggccccatttttgagaagaaaatgatacattaattatatgcaaatgatccctgatgaaccatgccaagatggagagaaaaaaaagaaggaaaaaactcatgaaacagatggaattgttggattcctccttaagacaaattagtttatgcattcctcttctggttgatctacaccttactttattcttttaagataacacacactggctaacagtccttgtcccatcataggcacattgggagtgtagatgataaccatactcattaaaatgacagcaatggaatgccaatccttgagtgttttatttgtgaagtctctactgcttgataattgaagcccaaatacatgtaaactagtccatacatgactagctaggtaaacgaacaaccttgcatctttttaacccgtgcacacaaaagatgaattgctgttgtaagtcctgacatgacgagtgtcaccaaatggctagtttatggtagtgtgccaactacttgaagcttgggattagagttgcttgggattattggaaatgagaaaatagtaggcatttgatggtacataaccctgaatgtgtctccatgttcgacaagagaataataggctaattatatgtaaaaatcctgacatactagaccccagttcagcacatctagactaaccatcagaacatgcctttgaaatgtttggataacctctctggaattgttgagataacagtggtcatagtcacatttttgaaaggtgcaaggtcatttaaaatgcaaaagtcttttgaggcttaggtgcaaggcacaatacaaggtgcatgcctgaatgaattgaaacataacctaggaagcatgtaaaaaattatgaccaaaattctatcaaactaacaaaatttcaagattctaagtatttgaaagaatcatcccaacaaaaaattaatgaaattatataaagtaacaatttactgtcagaaattccaaaaataaaaattagaaaggaaaaacaatgaggccggcctttccaacaatgtgtgcgttggtaggtgaggctatagctagggactggttttgccttgagcctagatgcgcttaaagcacctcctaaaacaaccatggttatattagtctctgaaacccacagacaaagaatactgaaaatttaacctgaatattaagagaatcagaatctcagattgaactaggttcaaatttttacccaattttcaacagttcattctgaatttttgaacaaaaccacatggactggtgttttccctgccaagaccagtagttggcacaaagaaggggggtgagggaaagaggttgaagtatttgtggttcctcactggaaaagggtattgcggttgtgtgacgaatgagcagccgaactgttggtggatcttttctaccgagcctgcttgggggctggtttttttttttttttaatttttttctcaggtactatactattcttttttggtactttcccggcttcaaccctattttaaaatatagttgttaatagagttcttgatgtatcacacacaggcagatgcagactgacttacatttctggttcctttttttcccctcctgtcatggccatctaggttctgatttattccttttaattagggttttgccagttggacatggttaatctactgcaaaacacattgtaagtaggtttggctgccatcaggaatgtctgactgaaacatatggtgtttacccactgtaatgtgcaggatt

SEQ ID NO: 13469 - DNA, 5411 bp, Vitis vinifera
  Intron number 1 from transcript GSVIVT01034520001 (locus G SVIVG01034520001) derived from phytozome v7.0 (chr-ID chr1 8; pos 19951378 to 19956788)
tccgctccgaccgtgaactccgaggcaaacttcatgtatttttctcctttctctctctttttttttttttccttctacatatgcgtttaaccttttcaacgttttttttttcctttaaatttcttttcctgttattttccggcagccaaagcagaccctcaatgctcttgtttgtagtgatggtttccttgatctccgcttttaggacgtgggttttgttgagtttgtccttatgggttttgtgtgtggttgccatcatgttttcaacgtctagggttttgccaggggtttttctttggttttgtgagatttttttttttttttttttggtatttggggaaacccatgtgggaattataatgttttagtgtattgcaatgtgattagggtgtggcaactcatcgattattgaaattagggttcttaacattgtgagaatttgctctgtggttcatttagtttgattttttatttatttattttattgaattttatacatagaaaaatcatagctgatggttttgtttatcctttattatgctcctgttggtcttttggttctggaattttatacataggcaaatcatgatttgcattttgttttagctttgggaatgtcatatattttcattaaatccctttgggaatggtctagagtcccggaggagatagaaaactgtacattgatagatttcattgatgctttgttagagaatcttttggcagataccccatatggtttttcctgattagctatatgtattgaagaggcaccgatataattcctgatgcttatataagagttatgtctacaaaaaatctgattgatttttgttttggaaaaaaggcaggatgctagaaccatttacagaaatactattcttaaatactctaatcccttttatatgtcttcaaattttattcttcttccacttgtaaaagctatttttatttttattatagttcatttttttctcttctttaaatccaatggatgaaaattgtggaagacaataagaacactatagtatggtttattgcacatttatctttggaatttgtacatgcatgtaaatttaacgaataggagtttatggaaagatcatccattggtggttttgtccattatgatggatagatttgggatgtgacattactcttattaccaagtctctggtcataaattaccaacccttttgaccacttggcatacttgtttcagatgtatttttccaatgtcgaccatatatggaccataattgataggtatgcagaagaataagatgactggatgatgtcaactgttaagttttaacttgaattatttgaatggttaaaaagctttgaaactttataggacaaaaaagtatagaaatcatatggttaagactaattgaaaataaagtggaagcaatgaaattatcaaatttgatttgatatattggacatttaatcctgttgttattccatgtttggataactactcatgattttcaaggttttttggatgcaaaagacttaattgcatatttcaactcttgtaggcaataaatggtagtcttctaggcctcctcttggtggggataatatggtagtttataacctgctaggaattctttgcattactatgtttgtactgtattttccatataatattacactaatatgtattctttgtatgcttagcggtgtgcattctttatattgaagttttactccttttatgagtgaggtgagatcattgataaaatgaaatatttgcataaaattggcataggtcaattgggtatcagcttaggccaaatcatattgttttttgctaacattgactgctagcgggttttagttaaaattttaatcaattatgtccacttaacctttattataaagcccttaagttatttgtcaaaacttggtcattggccctttgtaaagaaaaatattgtttccttagttctaaaaggcttaaggcttatttaaggtgcaaagatcttatgtgcctaaatgaaaggcacaacctaagaggctttcttgagcaaaatgatgtgcaacctacgaagtccctgcttgtccttggaagaagccttcctgatgttattttctatggcatctaacaaagaaggttgggtagcagaggcattggagcaagctgggaaggcatttaggatggagcccctgctttttaggacagtttggtgattgagaactcgagaatgtggagagattcttaaggaaattgcacatttttccaattatagtggaagatgaggacaagttgacttggaaggaaaccaagtgcagcaattcctcggttagatccctctatgcctccttaaccaggggaggtagggagcgtttccttacaagcatagtgtggagtacttgggttccaatgaagggaggcttctttgcatgggaagtgacattgggcagaattctgatggtaggtcaactcaaaaggagagggatggattttaccgaatagatgtttcttatgcaaaggcaaggaagaatcggtggatcatttgcttcttcattgctccaaagcaagaaatgttgtggtaactaatttttttttttttttaattttagagtggtttgggtgatgcactcttcagttatacgaaacctattgagtttacaaggctaattcatggggaagaagcagaaaaaagtcaggttgctcccttgtgtttgttttggactcttaaggcagtaaagaaataggaagttgtttaatgacgttgaccagttggatcaaacagtcaaatcgtactttaagtctaattttttggattgggttagagtgtatatagaagaccattcaatatctatgatagaatttgtagattggttgagcttcaagtaaggggagggattttgttttttgtttttaccctttccttatttagcctaggcaacttttgtatacattgtgtatactctggtgagtgtcctcttaggtgctttaatatattttcttatttacatataaaaaaaacctagggtgcatgtcaattttataaaatactagaaattagacatgttcatatattaccaaatgtgatccaaaatttaagctaattattgccctagtgcctaattggagacaaatcaatagtatatctggctttaaactgtttaacttggtgactagtctctacaaaattattgctaaggtgttgcctcaatgactacagtgggttttttgtaagactgttcatatttttcagggagccttcattgagagacaaattttggatgcaattttggtgacgaatgaagtggtggatgataaaagacattataaaccagaagttgtctttaagattgattttgaaaaagcttatgataatatgaaataggtttttttggatcatgcattagaaaagaaaggttttgagtgaaaatggagattgtggattcacgtgtgtatttcatttgttaggtttgtagtactaataaatggttgcgctaaaggatgggttgaggcatctcaggacttaaggcaaggtgatcccctcttcccttttccttttaccattgttgtagatgtgttgagtagattgatgttaaggatagaggagagtagaatttagaggtcttttgggtaggtagaaagaggacaaaggtgacacatttacaattccttagggacacaatattcttctcaacagccaaagacgaggaatgtacaaccttaagttaatcttatggtttttagacagatttctaggcttaaagtaaatttgaatgtatcttattggcatcaatattagttagactcaagtccttgagttagatactattttagattgttggatgtcagattatcccccttttacttgggtcttgctttaggaaagaatcctagagcagtatcttttccagacccaattgtagaaaggatttgatgtggtttatatggttggaagaaagcctatgtgtccttaggtggtagaatcactcttgtatggtcatatttatcctgtatcccccttatattttctatatttgttcaaagcttctattatagtagcctccatgattgagagattacaaagattctatttagtcatgaggaagggaacagagattaccttgtaggtttgaatgaggtgtgtaagcctaagagggaatgggctttaggcattggaaggatatcttgaggaatagaatccttctaggtaagtggttgtggaggttccttatggagaatgatgctttatggcataaggccatcttcagtatttaggggtcaaaccctagtggatggaatgccaactatgttgttaggtggtgacataaatgcccttggtagacatttacacaagcctccttagactttttcatttcactcattactttgtgggtgatgatacaaaaattcgcttttgaaaaaatctttgattgggtgataaatttcttagtgagtagttcccaaacatttatagagttaggagggttaagaaaccttgtttttcctcgatgttagtttttctcctacctgtctatatcttagtgctttcatcataacttcttagagcaagaaattgaggaactagctcatctagtgattgctttagcccatatttatttgtcacatgagagtttaatccttgacattcgtaggattgttgtcatttaatggtttctctatttcgaccattttagttccctttattcctacaaatttcatttggaaatccagagctctactaaaagtgaaggcctttgtagggcttgtggtaaataaggtcaatactaattgactagcttcaatggagaagaccttacaaagcagttcaggatggtgtgtcatgtgcatgcttttttacattgctttgtagcattaacattaggtgtagactattttggcttgtaaggattgattgggttccatccaaaagggtggaggagatgttgattatgccatttaaaggttttggggaacttccttgaagcaggactctgtgtcgcattgtctgcctttgatttggactatttggtgggaaagcaaagattttttaggataggtggactttagaagcagttcgggacttgctttacttctcttcaatttgagctttcactgatgaagcttttgcaagtgtccccttgagcctcattttgctagattgcaacctagtttgtagagccacgaggttgactaaagagacactttgtgaatggctacctatcacctcctgtgggtattgttacgtttgaagctttgtgcagtaagaatgaaaaaaataataataatatcaacatttagacttgttcattaatcggttattaaaaaaaaaccaaaaagtttggacttatttattacataacaaagaagtttgcaatcctcattaacatatgtttcttctttgtgtggtttggcaatctggtttttcaggcct

SEQ ID NO: 13470 - DNA, 5308 bp, Vitis vinifera
  Intron number 1 from transcript GSVIVT01024328001 (locus G SVIVG01024328001) derived from phytozome v7.0 (chr-ID chr1 6; pos 1009932 to 1015239)
gtcctcttcgagatcatccctctcctctccaaagagttaggcctccctccctcttctctgtcaaatttgaaatctacaatttcacaattttctttattcggattagtgagtgctttagttccttaggtttttcattgattttttttttttcgtgataatttctgagattttgagttgattctgtggcggatccggctctgatgtttttatttatttatttatataaatttagcttagttgagatttctgccgtgtttttgcttttagttgattttaatgtggtcatcggcgacattttgggtgtgtattcggaattttgactctgtgcggttttggtggctaatttttcaaaatgtagcatagttgaaattagtgttttagttttgtgttttttagttgattctgatatggtaggggttagattttaattatgtgttctgaattttgattttgtgttgatctggaattgttgcttaatttttcagtatttagtttatctgagaccattgtgtttctagttgattttggagtggcaactggtgagagaatttgaccttgtgcggatcgcctatttggtgcctaatttttcaattttttttcatagttgagctttgtgtttttagttgactttgctgtggtaattggtgagatttttagtatgttttccaaattttgattttatgtggatttggatttggtgcctaatattctgtcattttttttcttcaacatttagcatagaggagattagtgtgttagttttatatttgcactttctagttgattttggtgtggtaattggtgagattttgagtatatatttggaaatttgattctgtgataacctggttttgatgcctaattttcaatatttagcatagttcagattagtgatttagttttgtatttttagttgattttggtgtgataattatggagaatttagagtaagtgcttagaattttgattttgtggggatccagtttttgtgcctatttttttcaaaatctatgatagcagagattaatgctttagttttgtgattttagttgattttggcgtggtactgagtcagatttgagtttgggttcagaatttggttttcgagggatccatttttggtgcatagtctcacaacttggaagagtttagatcagctgtttgatttcatgtttttagttaatgttggtttaataattggtgagttcgagtctatgtctgccattgattttataaggatctggatttgttgcctcccaaatttagcaaagtggagactaggttttttattttttattttttataaaaatcttctttcattcttttttcttgtagagatttgatagtttaagcagttttagtgtggtaattagtgagattttgagtctttgttgagaatttgattttctagagacctgttttgggccataatttttaacaatttagcatagttgagatggtattttggtttttttttttcactattttttatagggatttcatagttctatttgatgctcgaggttgactctgtattcacaattaatttcatgtggatctagttttgtcaccgcaaagttttggagatttagtgttgcagtagggaatggggagagaatccaattctaagaagatctatggtggagtgaccaacctttgtgttcacaattcccaggtctttatagagttatctcagtgaaaaatctcactatctcaattgttcttagtaactcctatctgctttcttagaattttaactttcatcctaatctcactgatatagaaattaaacttcttgaaagactcatgtcttcctttaattcaatgcacttctctctttctgctataatttcaaaagcttggtctttatcctccttagacttatttacaataaaacttttttttttttggtcttgtttaatttctcaaatcctatcctgtttcttctagttcatattctctgaaaatcaaaagctccttcaaaggttaaggcctttgcttggtttgtagcatatgggaaggtaaataccaatgacatgctatggttgagaagaccttacaaatctcttagtcttcattggtgcattttatgcaaaggaaatggagaattgattgaccatctttttttacattgcccattaactttggggttgtggcaaaagctcttcagtctagcaaggatggattggattctacttaggagtattggagatatgatgattatttgttttagagaatttgggaattccatcagaggcaagactttttagcaaattgcttgcctcactttatcgtggattgtgtggcaagagagaaatgttaggatttttgaggaaaagtggagattggaagttatgctgtgggatttacttcacttctactcctctctttgggccttttgtattgtcaatttttgaggagttccacttaatgttattcaacttagctgactttcagtttgtgatttaaaattttaagataattggaggatgcttttgtgtatggtttttgtatagagggggtgtctactcttactttgattatgatttgtattttgaaggaagttttgtacctttattattatcaatatatattttgtttatgattaaaaaaaagggttggaaacaaaattattatggtcatgcttaaatgcactgccagttgtgattacaagtacaagaagtgcataggagctttcaatagaaagggcaagatgccaaatatttttctaagttagtcactagcaaaagtaatggtaaaaaaagtaagggggagatcttatttcacagcaaaaaggaacttaagaatggtgcctcatgtttgcacaccaattgatggggcaatttgttgatatagactctttgattgatttaactgtatttgctatgatgaaaacttgtatttctcaatggtaagtggtatgaaatgttacatattttagattttcatttgtaggtggtggaataatgcattgtagagttgtattgagtttattaattggtaatataagatcatcatgttaagttattttctttatcatatcccaccattttgcatataaggtggtgaagaagccccactaaagaatgaggaactgctaatttaaagaatccacacatttaaagtagtaagcatgccatgataagtagaagttgtaagctatgctacatgcttagatatgggtgttggtggtggtgtatgttgaaatcttgtggtgcactttgtatactcccatgtatgtgggtatgcctccttttagttaaaagctcttctataatatcctatttgcccataaatgagaaaaaagagacgctaggcatgtttgatatggatatatctcaaaaaacataaacaaagtgtaagagtgtccaatgaatgggttgagggtaaatgttttggataggcaaactagagatattatatgttaagttattttagccactaagttagtagaacttaaggaaaagcacaaactagctggttcaaaatatcaacaaagtcaacaaaggtgagatctacatcccttcttgaatcttaaggccacacagaaatttcaaagaaattttttcttaacaagaaaaattaattgcttgaaacagttaaagaatcttctattccgctctttccgttttttttttttttgaataggtaattagaatcaatttataaaaagtaatgtcagaaaaagagttccaaagtacataggacgtatacaaagaaacacctcaaaggatagaggactaggaactatgtgcagcttgcaccaagcccaaagattacaagcaaaggaggatttgaacccttgaattgactgcccctcattatcaaatgccttgctatttttttccttacaaacagtccaaaaaaggcataaaggagtagcctgccacgcctttttctttttctttcccacgaaagaaccatgcttgcctaacaaagcctttctaactaataaggggaacacccacgacacaccaaaaagggagaacaaaagatgccataaaactcttgttttagcacaatgaagtagaatgtgatccatgattcttcctctttaaggcaaaggaagcatctatttgccaagactacactctcctttgaatgtgatctagagttagaactttcctccaagtagcctcccaagcaaagaagaccacccttggtggcacccatgaattctatatcacacttgttgggaaaatgctttgttttcttggctccaacaccctatataaggatttgacagagaaagccacatccttagactcgacccatagaatttcaatccttggacaccctcctcccatgcagtcttagaaggaagcgctccaagctctccatctcccaatcattgattcgcctagaaaagcaaggggcccaacaccccctccctcataaaaatgactccaaacctccttcacccacgcctccttggaggaagctacaacaaataataaaggaaaagagatgcacaaagactcgtcaccacatcgcttatccttccaaaaccttaccctcccaccatctcccaccaaaaaggcaactctgcatcttaacatgtccccctccttcatgatggctttccataaccctaccctatacgcttccctcacctcccgggtacaccaacgtccttcttcctccctgtattttacgctgataacttgcctccaatatattttccaaaacaaacatttatcctaaatgtaatttttttgtatcatttctttgaaacaaattcattcattcagtcactcagtttcagttgatgcattcttttccagtgtggcaattaggtatgtactaagcagcagaagtgttgggcatatataatgcacccaagcttgtatggtattgagtcaacacaatgtacctgggtaaagtgttcacagaacaccaccatttcaagtatcagaatttttttccctttctccctctttctttcttgctttcttcttttctttttgggtgtgttgtcatggggggaagagggaggggtggtttggtttgtttggtggggtgctaattattttgagacagaaatgtggttgttatatctttgttttgttatacatttttatctagtctttttttcctttggtatggaaaaaaaataatgttctatgctaacacaccaaaaaaaaatgtgcttatctgcaaaatgttcatcagctgtttgtccatgaggttataaatttgctttgaattaattttacttttatcgtcaaggtttagtgaatgatgaagaatattggacagttcctttctaatcttacagcattttatttctttctggctatagggcaag

SEQ ID NO: 13471 - DNA, 8561 bp, Vitis vinifera
  Intron number 3 from transcript GSVIVT01031825001 (locus G SVIVG01031825001) derived from phytozome v7.0 (chr-ID chr3 ; pos 4712589 to 4721149 reverse strand)
ttggggatataattcaagtaccacccaagaactttgaattagtacctgataaggaaaatggttcgtttgaaagtcaacttcaatctctatcaaatcctccgtgatcgtctctatatttcagtaatatgtacagctaatctcctatatttgttttggtaaccaaccatgtatagttccctttattgtggagttaatttggtaagtctgtaacgctaggttgtatactatatatatacttcttgccttgatctatagaaagaacaatctttaactctcaaagcctgtatcgtctttatggtatcagagcaaccatagctcacatagttgattctcatgcctcaccaaacccataaaccaacgaaggctctagcccttccccctcaattgtttcctccatcgacactgctgccaacatctctatatacactactcaaaacctcatagccataaacgcctcttcccaaacccccatcaaactcactcaacacaatttttctgcatggagactccaattttacactctcctagtcggttatgatttactgggatatgtcaatggcactttaccatgtccttctagcactcttacttctgaaaagggtactacaaccccaaacccagcttacacccattggattcgtcaagaccatcttcttaatgctattgtttcatcacttagtccaacaattttctcattcattgcatcagccacaacctcccttgaggcttggtctacacttcacaacacctatgctaaagcatctcgaagccgaataattcattatcggactcaactcgacaacttgtccaaaggcactcagtccataacacagtatatgcaatttgttaaaatttgcgttgatgttctctatctcatgaacgtcaccatagaccctgaggacttcattattcaaatatttcatggtttgcctgagatgtacaaagatttacactcaaccatccatgcccatgaaactgtttttcctttgaggaactttatgagaaattgcttcctcttgaggctcaaactttatgagaatctgccaagtattcttcttggaatgtctcattgcctgcttccaccaatgctgctaccaaacaaccacaatcgcatcgattcttcaatcaacagccttactcttcgtctcaataccgtacatccaaacaacctcaaccaatgactacctcgaatacttcgaatcacacccctcatccatataaggggacttgtcaattgtgtggtgttcaaggacactcagcgaaaagatgtccatcatttcgatatattgccagtcaacatcatggtgttccacccaattacagttaccgcccctcttctgcacaaacacatgcgacaactcaaccaactgttgtctctccaaattgggtcttggattttggtgcctcacaccacatatctaatgatcttcagaatctatctttgcattccgactatgctggcccagacgacataattattggtgatggtaaaggtctagaaatcacacacacaggatccaccaccctcccaactgcattaaagctacttcaacttaataatatcccttgtgttctcaccatgaaaaagaacttgatttcaatttcccaattttgcttaacaaataatgttttcattgaattcttacccacttgtttttatgtgaatggtctatgtacgggggcaagaattttgcatggaccaactagcactacaaaaaaatagatttttaatgacgaatctttagtcacggcccaccaaagatattattgggtaaggttgtgactatatgtgttaaatcaaatttggaaaaaaaaaaaaacatgtttagtcacggtgattttatcaaccgtcaccaaaaggattaataagaggtattttagtcacggatttatttaaaactgtgactatttgtaaatttatggagggaaattttggcgccaataactttagtcacggttattttatcatccgtgacaaaaagtgtaatgaaaaagatgttttagtcacaggtttttgtgaaaccgtcactaaatagatattttgtgactttgagtgacgtgattgattgaccgtgacttttagtcacgccattgattgaccgtgactgtataagaacctgtagttacaaatttcgcttgaccattaccaatgcatagagttttttttaaatattttgaacctatggccacggggttcacacaatcgtgaccaaagtctattatttattttaaacaatttttgggttacctattataattttttagaaaatcttatatatatatatatatatatatcataaatagaaattatcattaatagtaataataatagttcttattaattataaaaagtttaaagttatattactatttttttttaagttaagaaacaaattagtgtgttacctatttttctttagttaaaattatttaatttccttgttataattaatgttttaataagaagcaaaataaagtttaataaattagtttaaaaatatgatggttcaatttgatattatttgataaaaagtttaaatgcaagtgagttagcaaattaaaaaacaattttgattttatatatgataaataattcttattatatttaaagtatcaatagtcatgataactaaattttactatgaacaattactagtaaaattgtttatagttttatttaattttcaatcataaaatattatttaatctttatgatttttgcaatacaaaaacaatttataactacaaaaataacatcctctgtttatgattaaaaataaaagttctaaacttttataattcttaaatttgtaaaattaacaaatttataaagttaaaattcatggaaaaatattcttaaatgcatcattctctgtttatgtttattatatttagtaccaaatggaagtctgaaattctgttgtccaaatgtataatgaaattaagctacaagcatatgggataaggtagaaattaatatcatcaaatatgaaaaactgataccatatgataaaataatagtagattggtataagatataaagggactgaaaataatgaagacagagtaggagtaggatgcacatataacatttcctaacacctaaggcccacaaaaataccaataaattatagttttatttgtgaagtattttttatttttttatttttattttttatttataaccgtggatgtccggaccagcttaagcacatctcgactaatcccacgaggccctgaggggactcgaactggtttatttgtgaagtattttgacattttcataaacaattatacaaaaaacggttttttaaaacatttttaaaaatttttttgccgatgtattttaaaataaaagttgatttagaaacctaaaatattcttaatatatattttttatgtttttaaatatgttttaaaaaataacatttatatgttatattttatttttaattattctttgtatttatataaaatttttaaattttaaacttgataattttaaaacttaaaaaacttgataaaacttaataaaaattttagaataacactttgagtaaaacattgaactttcaaaattaatttaaatttaaaattttaaaaataattgtaaatttaaaattttaaaataattgtaaattttaaaaatttgataattttaaaacttgaaaaactttttaaattaatagttctgaacacagaacaataacaataacaataaaaaaattttagggtataacaataaaattaaattattttttttgggtataacaataacaataaaaaaagccatgagacatttttttctaatggaaaaatgtctttcttttaaccatgtgggtataccccacggccacatcactttcctaatcgaatataaagcctttctttctctctcctgccaacccattttctcttcctctccaaaacccacggccataaaacccacaaaacctacccacaacccccattgcttggaggaagctattgtcaaaaaaagcttatggaagccatgctgaagaagccccatggaagctatggtcggtaaagctgaagccacctccaagaaactcccgtgaaaatcatctctctaggttttggtgagttttgggaatttttttttttttttgggttttgttagttggtattttggaaatgtttgtgattaggtttgagattccattgttatttggtttatttccattgttattgggtttattttcattgttatagggttttggtgcttttggaaaaaatgaaaatgatatatgttgcgagtgtttgaaatgtttttatacattaaattctattagagtaattcattgttcttagaataattaaatttgaaattcataatataattaaatttctctctgatttaacactacaaaaaccacacttaatagcttccctaatttgatatccaaataatatttcccagcaattgattgggcatggtttacttcttaatttccctaatttggtacccctgctgccgcatgtagtggaagttatttttgctgtatttatgattctttttttcttcctaacttggaattcttggtagctacgactatgaacaataattataagaaaggtttgtgttaggtttctcatgacaacttcttaagcctgagggctgagggctgagagagaggcgaagtggggcttctagatgatgtaaacatctaagttttttgtttgtgtaaagctcatgaagattactacttaaatataaaatatgtttgtgtatctctattctctacattatatcctatatttcttaaatataaaattaatatctatcccagattactacttaaatctttttatggtatattcaagaaaggaaagatataaataatattaatattaattggaattaaattaggattactattgatttagtaattgaaatcttttttattttatttttctttattcctataaccataaaacattcatttttatcttattaccatcttatattatttaaatataaaactaatatctttatcatatattatttaaatgcaaaattaattaaatataaaattatattctataatatttaaatataaaattaatatataggtacacctcatgactggatgtatccttctacccatgtatttatttactacttaaatctttttatggtatattcaagaaaggaaagatataaataagattaatattaattgaaattaaattaggattactattaattaagtaattgaaatcttttttattttatttttctttattcctataaccataaaaacattcatttttatctcattaccatcttatattatttaaatataaaagtaatatctttatcatatattatttaaatgcaaaattaattaaatataaaattatattctatattctatagtggtggtttttatgtatggttgaattctcctactacgaaaaaacctttgattgtattttccaatgttaagacttcacttccaaattggcatcatcgacttggtcatccctcttccaaagttcttcaatatttagtttcctctaagagtcattctttatcatctaatgatatttctacttttgcttgtaattcttgtaagtgcaataaaagtcataaactacctttctctacatcatctattacaagttcatctcatttacaaactatttactcaaatgtttggagttctcccattgtatcaaatgataactttaaatactatgttatctttgtcgatcacttcaccaaatatgtctggttatatccacttcaaaagaaatctaatgtctatgatgtttttgttcgatttaaagctctagttgaaaactacttcagttccaaaataattcaaatctattatgacaatagtggtgaatttctagcgttaaaagattattttgctcttgctagcattactcatctcaccaccccacctcatactcctaagcataatggttactccaaacgtcatcatagacacattgtcaaaaccagactcatccttttccatcatgcatccattcctacttctttttggccctttgccttttaagctatagtctatcttattaatcgaatgcttaaaccaaacctctcattcctctcttcctatgagaaattattcaatcacaaacctaattcttgacaaattatgaatgtttggttgtctttgttatccttagttactcccatataatgaccacaaacttcaatccaaatctcgtccatgtgtcttcttaggttactctcttacacaaagtgcatacctttgccttgatcgagtttcccacaagttattcacctctcatcatgtcacctttgttgagataatggtcctcttttcttcaactgccgagaaacctccacccaccatagtcccatctattccattccctctcgtatcaattccctcatcacaggacaatacaatcttaggtaccactccagttaagcattcgaccattcatgataccactcttgctggccagtcaattatattaccccccaatgctgagactacacaatcccaacatagtttccctccaagcccaatcttgctttcaaccccacatcctaccccttcccccatcccacccactcgaccccctaccctcaacacccatcccatggttacaagatccaagaataatgtcttcaaaccatccaccaagtatgcttttgtctctaccactcctgatgttgcacctgcctatgttacccaaactttaaagcttcttgagtggtgttaagctatgtttgaagaatttgatgctcttcttcataatggcacatgggagttgaatccttctactaagtcacagaatctagttggttgcaaatggattttccgaatcaaacgcaatcctgatggctctattgctcaatacaaggctcctcttgtcgccaagggttttcatcaactccctggtattgactatgctaagacattcagcccggttgtgaaacctactactggtctactcattcttagtcttgcattttccttcaattggtcactttgtcaacttgatgtgaacaatgctttttcttcatgggacttttgccaaaaatgtgtttatggctcaaccaccaaggtttgttgatccttagtttccaagccatgtgtgtcatcttaagaaagctatttatagcctcaaacaagcaccatgtgccttgtatcaagaactgaagcagtttctactccatcaagggtttgtgaagcagtttctaccccaaatttgacacttcattgtccatccataagaagtctctatttaccattttcctacttgtgtatgttgatgatattattgttactagcaatgatgatggtactctcaatcattttgttcacacacttgctactcggttctccattaaagatttaggtgttgcctcttattttttaggggttgaagttattccaagctcatttggtctctttctttctcaacacaaatatgttttagatcttttggagcacacaaaaatgatggattccaagtcattcacaactcctatgtcaacatctcagatacctagccttgtggatggcacatccttgaccaattcgactaagtatcgatctattgttggtggtcttcggtacctcttcttcactcaaccaaacattgctttctcaatcaataaactctctcaattcatgcatagacttactaccactcactggttggcactcaaacatcttctccgttatcttaaaggtacaacgcatcattgtttgtttcttcgaaaaggatcccctcttagccttcatgccttctccgatgtagattggattggtgatcgtgatgatcgtactttaactagtgctcatgttgtgtttttaggtcataatgtcatttcttggagttcaaagaagcaacatttgttgcccgttcctcaactgaggtagagtatcatgttgtagctacaacttcttccaaacttctttggcttaactccctattacttgagttgggtatttcagttcccaaacccatgccaatctattgtgataatgtcggtaccacctacttatgcgccaacctaattttacattttggatgaagcatattgctatttattttcattttgtgagttcaagattacacttttcgcgtgcctcattttgctttcgcggatcaacttgttgatgccttaacaaagccacaatccttagctcatctacaacacttgtgcgtcaagctaggcattcaatcgaagtctatcttgaggggtcatgataaggaaaatggttcatttgaaagtccacttcaatctttatcaaatcctatattttagtaatatgtatagctaatctcctatttttgttttggtaaccaaccatgtatagtttcctttattgtggaattaatttggtaagcctgtaacagcaactatgttgtatgttgtatatatacttattgccttgatttatagaaagaacgacctttaactctcaaagcctgtatcgtctttagtacttgcttatcagtacagtttggctcaaggaattttacacacccatttgtctaattatcttgatattaaatcaggt

SEQ ID NO: 13472 - DNA, 6394 bp, Vitis vinifera
  Intron number 4 from transcript GSVIVT01023355001 (locus G SVIVG01023355001) derived from phytozome v7.0 (chr-ID chr1 2; pos 19393730 to 19400123 reverse strand)
gataaaattgaggtgcgtttatttttgtttataaatgtatgtttcaatctccattttgttaattgtaatatttctcctcaagtccaaactggttttgaaactaatctaaatgcatccctttccctggttggtggtgaggaactttgatttggcttttttcatcttttattttttggtttgaaaatttttgtcaatgttatcttttttaagttttattgtatttaatatttcttattatccataggaatataataatgttcttccaccaactatattccatggaaacttggatttggaacaatggccggaactttctattttttttttccttaacttcaaaaacctctttaccctcaaagatcctatgcgttttctcccaccaaaggcaccgagctaaacaacaagtatcaactagaaataactcccagtcatggaaatcttttcatatttctcaccatcaaatactccaatgctacttatacttttagtgtactgtattcaccattttacattggggcatttcttacatatatttatatacatatagattcttatttgcctatctccgcatcccctccccctccaccccacaccaaaaaaaaggaagaaagaaatccaatactacttgttttactcttttatgtggattatttttgtctttcatcaaatgtcctaatgttgtttgttgctctctattatgccttgacaatcttagtattgtttttatttataattttttgtgaacttgttgcgttctcagaactcatataatatcttaccaagaaagtgttcttagttaaaaagagcattaggattctatagttcttaatcagttgtctaacaccctaactgagaaggtttgttaggtattattgttaaaatctggagaaaataaaagaactaaaacttgcagaaaataaatattttgagagtactgagttggagaaaggcacacaatatttcaccaatgagaatgcctatttataggcttacaccaaactgaaaatgctaaaaaatctcagctactatgactacttctactaacagaaaaactgaaaattatggagcaaaacagagactgagtctaactaagacattttcaaacttcaaaggcaaactctcatgaattctaacactccttgagatttgccttggacataccaagcttcaaccttaggaactccagccttgatttaggaagtcctttagtcattatgttagcaagttgcacatcagttgagcaatgatgcagcttgacaagtgaattcttttcagcttcccttatggagtggaattttacatttatgtgcttggttctgccatgttggacaggattttgagcaatggaaatggctgacttattgtcacaataaagctcaattggtgagctttgttcctggcctaaatcatcaagcaattttctcaaccatattgcttgatttgcagcagttgctaaggagatatactcagcttctgtagttgattgtgccattacttcttgctttcttgaattccagcatatgacacctgaaccgattgtaaatacataacctgaagtgctcttcatttcatcaacacttcctgcccaatcactattagcatagccatctagcttaactcctcctgtctttaaataccaaatgccaagatttgttgtacctttaacatactttagcaccctctttgcaactcccatgtgaacattgctaggtgaactcatgaaccttgaaagaaaactagctggaaacatcaagtcaggtctggttactgtcaagtatagtaggctgcccaccaagcttctatatgcagagggttcctcaagtttctcaccatcattctttgaaattttctcattttatgccaacagagttgctacttctttgcatgattctagcttgaatttcttgagaatatccatagcatattttctccgtgaaatgaagataccccaactgcattggtatatttccattccaaggaagtagttcataatgccaaggtcaaacatctcaaatacatcctacatttccattttgaaattagctagcaattttacattgcttccagtcactagcatgtcatcaacataaagtgatactactagttgcaaaccatcatcattttgtttcaaatacaaagtagcttcattttcactcctcctaaatccaagttagatcagatgagaatcaattctgctataccaggcccttggtgcttgcttcaaaccatagagagccttatctagcttgtacactttgtgttcatggccaataacctcaaagccttctggttgttgaacataaatttcttcaagaagtataccatttagaaaagctaacttaacatctaaatggtacactttccatcccatttgaccagcaagtgcaagtagcagccttatagtgtcatgtcaggctactagtgcaaatgtatcaccatagtccactctagcaacttgagcaaaacccttcacaaccaatctagccttatgcctgaagattgaaccatctgaattaaatttggttctgaaaacccattttacaccaattgcattcttagcttcaggtagttctgtcaacttccaagttccatttctttcaatagcatcaatttcagcttttatggcctcaatccattctagaaatcttgcagcttctgtgtaatatgtaggctaagcatgtacaagattgcacttctcatacacatcagataatggcctcatcttaagcactggtgtgtttgaagttgcttcaacatcaagtggaccttcaatgattgtactttctattgctggttcaagaatagatggagtggtttgatcacatttatgaactttcttcaagtcccaattccagtaggagttttcatcaaagtgcacatctctacttatcacaattttcattctactcaagctataaattctgtaaccttttgattctgctgcatacccaacaaagacacttttctcagctctttcatcaagcttgcctctcttgatagatgacacatgaagataacaaaatgagccaaaaactttcaggtgcttgacagaaggttttacaccagaccatgctctattggtgttttgctctgaaaagacttagttggtagtctgttaagcaaatatactgaggtgttgactgcttcagcccatagaagcttttgcagcttcttcttgaatagcatgcaccttgccatttccatcatgattctgttcttcctctcagagactccattctgctgtggtgagtatggagctgtcagctggtgtacaattccagcttcttgacaaaaaacattgaactcttttgaggtatactcacctccattatcagttctgagcaccttaatgttctggccattttgagtttcaaccattttcttgaagcttttgaacacaaagagcacttgtgacttggtttttagaaaataaacccaagtcattctgttgaaatcatcaataaatagtgcaaaatacacattgttgctcaatgaggttgtgctcattggtccacaaatatctaaatgaactaattccagcttgtgagtagctttcttggacatattttgagggaatgactgtcgatgttgcttccttagctcacaactttcacaagtttgagcattaattatgatttcaagcatgtcttcaaccataccaggttcttgcatgaacctcaatgacttcaagttgaaatgaccatatcttttgtgccaaataacactctcatcaatcttggcactaaagacatgaccttcaactaaatcaagcttcaaataaaagctatttccattcattttaatttttgctatctctgttccatgcacatcagtgataaaacaaaaattttctttgaaagagactgcatatccatttcttagcatttgtgcaacactacgaagattctgatctaaatctggaatgtaaagaacattagtgacaatttttgtacctctcttggtgctgatagcaattgtccattttctttcagcctgcacaactttaccatttcccaacttgacctttggttgaactgatctatcaatggaggtaaaaattgacagatgtttggtcatatgactcgtgcaaccactgtcaatgagccaagtattcagttcatgagaactgagtgcttgtgatgccataaataaatgctcatcatcatttttgtcttctttagtcacactcgcatgttgttctggttgctgttgagattgatttttcttggctctgcaatacttctcactatggccaagtttattgcagaaattacaattaaagagaggtttacctttgtgccaacaatctttctcaacatggttggttcttctgcaatgagagcaaggcgaaaattttccttttcttgaagacccttcagctttccctttgttgttcttaaagaacttctttccttgcaagtttccagaattctttcccttgtgatttgcttgaaaagcaccttcagtagcttcattacctctcattaagaccctttgctcctgtgcatgaagcttgctggttaactctacaattgtgagagtttgcaattcacaagactcttcaattgtagaaatcctggcttcaaacttttgaggcactgaaaccatgatcttttctaccatcttttgatctgtaaatgcctcaccaagaagccgcatttggtttacaacatccattaacctgcaagaataatctttaacagattcatcgtcttgcatcttcatcaactcaaactcttttttcaatgtgaggagtttaacagttttgactctttcactgccctcaaattcaccttggagcttgccccatacctatttaggtgtttccaagttcatgattttggtgaagatgtggtctgcaagtcctgaatgtaggcaggtgatggctttgtctttcttaagtttttcttcctcatatgctttcatctgagcaactgtaggatttactcccaatggtggtggatcagcttcagacatcacaacattccacaaaccttgagaccttaagtaaaatctcatcttgacagcccaaatgtgatagtgttcaccattaaacattggaattacagaggaagtattgctagaaggagacatgtttgcaccacaattgcttgaaagaatagatcactcaacctcactagtgtttgcactcaacctcactgtgtttagtactcaaaacactcaaaaactttgcctcacagcctataagaatattgctctgataccactgttaaaatctggagaaaataaaagaactaaaacttgcagaaaataaatattttgagagtactgagttagagaaaggcacacaatatttcaccaatgagaatgcctatttataggcttacaaccaaactgaaaatgctaaaaaatctcagctactatgactacttctactaacagaaaaactgaaaattatggagcaaaacagagactgagtctaactaagacattttcaaacttcgaaggcaaactctcatgaatcctaacaattattatatgtcatgttgaatgaagcctttagtgcccttgaggcttggctcaagtggtaaagggatggtgagggtttgtattttttttttattatattttttaatgttagttgtgaatctctgataactggatgcatgtaaggtaatattatggttgtgcctttaatgtaactatccattttaaggcatggatttgtcaacataattcaatttgattggattttaacatgtagatccaaagtattaaaattgcaatgtcaagttgctttggtgtttattggagagtatttcttttccggtgttttgataaggttttgtaaagtaaagaaggatttttcatcttcctcttgtacttccattttttaaggcctaaaaagttatggtcacaatgttaataaaaataaataaaaaaagagttatggtcacaatggactaccgttttagatctctataacatctgtggactttctgtacttcaccttctatgagaacagacgggttttgccttcagttcttgacataaggagatattggcaaataaaactaacatagtaggaattagtctattaagatttaaatgactatactgctaatattaattcatgttttgtgttccacaacaacattttttctattcttctgaatttattttcaaaattgttagataactaatctaataaaatataaaacttgttcactaaaaaaagcaatatggtgtgtgtgtatctcatatgccaaaatattggttgcatataatcctgatctattgcagaatgtttggccatttacaaaaattgacttaaggtatgtagtttaattttatcatctcatttaatcttcctgtaactgtaattaaatctcccttctgcaggttattgatttccatcaaactttagaagtaa

SEQ ID NO: 13473 - DNA, 13044 bp, Vitis vinifera
  Intron number 4 from transcript GSVIVT01012941001 (locus G SVIVG01012941001) derived from phytozome v7.0 (chr-ID chr1 7; pos 14001414 to 14014457)
gggtgcaacgtacaacaaagttgcagttatatcaggtttgagatgctgcatagtgtttcaaattttcgaattgctacttcaattggaaatgaagcatcagttacctaattgaaatgcatgaatcgttatatatttaaatagtttctgccttggaaaagcgctatggatatgggtagatttattgtagtttgcacttttatttcccatgttttgaacaagaaatgataaatgatatttggagctttttgtttaggtggtgttcattttattattgtttttattatttcttaggcaattaatgatatattaaagtgccctaaaggggtgaacaaaggccaggcaaaattagagaaatggaaagcccaaaagaaggcctggctagaaaacatgccaatgccatccaatcaatatgatcaagaagtgataaactcccttcttgaatgccagcaccaggaatgccatatgatttgtggattcttagaacttcaaccctgaaagctctgccaaaaaaggccttgtgcagctgtttactggaccttcctccttttacacccaaccaaactaccttgccatgacaaaagggtgccctttaaagcttcacttgacaattgactttcctcttaaaaattagaagtaacacttgacctttgctgcaaaaacttccagaaccagtttaataaattattagaataactttgttaagtaatgggaatctaattgaataccaatttttagttgatcaattaacacaccgaagaatgaagggccattgacttttgaggaaatcctgtatgatttgggaggtgatttgtaggatattgtggtagaagattgaggccccaattagatctgatatttaagctaaatgtttggtttgacttttatttttccatattttgctctctgtgtatatgttaaatagggacccgattatgtaaaaaacatactattgaatatacaattttattattctcagtttctacatggtatcagagcacaaattgctctaaaaccctaatcaatccatggctgcccaaaaaggagacaaccatgagtccagtcaattggcaacccaggaaagagagtcgaagataaactcctccatgggctcggtcggtgcatttgacaactccccactccatcttaccgttgaaaaattgaacggtaagaattacagagagtgggcacaggcaatcaagcttgttattgacggaaagggaaaactagggtttcttaccggtgagactcggcgaccaccttctactgatgcaacagcatcccataaatggcggtcctaaaactccttcatcacctcatgcttgatcaactccatgaagctagccattggcaaaacctacatgttcctcccgacgacaaaggatgagtgggatgtgatacgggaaacatacttcgatgtcgagaatgcttcctaaatctttgaactcaagacgcggctctggcagatgaagcaagaagatcgggaagtcacggaacactacaccgagatgttgggtttgtgacaagaactcgatgtcagttgcaaagaggaatgggagtgcacgggtgacaatgtgcgattcaagaagaagatgaagaacgagagagtcttcgagtttttagcggggttgaatcgcgagcttgacgatgttagaagtagagttcttagttgttggctgttgccttccgtccgagaggtcttctctgaggtgcaacgtgaggagagtagaaggaaagtgatgttgcgggaacatctcacttctgtgcccgaggctttagcacttgtaatccgtgggccttacgctggatctgacctaagatagtctaagaggacttattgtgagcattgtaagaaaacgggccacactaaagacacttgttggacttgacatggcaagcccgcagattggaagcctagacaactcattaaagcccatagtcatcaagcctccaccgaaacccagacagacaaaacacctacagaaaatcatcaattagcttctaatgtgaggtttaattttgaccagcttgcgaaattatatgagcttttttctaatttccaagcctctggtcaatcttctactactctgtcctctggttctttagcctataaaggtacctttctgacaacacttagcaccacgtctcatattactccttggattattgactctagtgcatctgatcatatgattgatgttcatcatttattttctacattctccccttgtgctggtaatttaaaagtaaaaattgtagatgatactttatccccagttgctggcaaagggagtattcgtatttctgagtctattactctcaaccctgtcctacatgttcctaatttatcttgcaatttgctgtctattagccaattaatcaaacagtctaattgcttagctaaattcctaccctctcattgtgtttttcaggacctatcatcggggaagacgattagcagtgctaaggaatgtgaggggctatattacttcgatgaagctaatgtgcgtggatagtgtcctcttactgtttgtaattctacatctagtcctggggaaagtgaacttttgttatggcacaaaaggatgggtcatcctagttttcaatacttgcaacatttatttccttcactatgttcaaataaaacttcatgggatttttagtgtaaagtgtgtgaacttgccaaacaccatcgtgcatcttttcctaaatataagtataaaccatccataccatttactctaattcatagtgatctatggggacgctcacgtacccctaataggactcataaaaaatggtttattacttttattgatgatcatactcgcctgttttgggtatatttgttgactgataaaactgaggtttgattagtcttcatgaattttcactctatgatacaaactcagtttcataccaaaattcaaattcttcgtactaataatggtaccgagtatttcaatcactccttgagcacttatttacaagaaaatggtattattcatcaaagttcttgcgttgacacccctcagcaaaatgaggttgcagaacagaaaaatagacatattcttgaagttgctcgtgccttgctgtttacctttcacatgccctcacaattttggggtgactccattttgacagccacataccttattaatcgaatgcctagttgggtcctatcttttgtcacacctctccagaaattccaagagttttttccccattttaaacttgttgcacatcttccacttcatgtctttgggtccactgtgtttgtccacgctcacgcacctaagcggaacaaattggatcccagagcacttaaatgtgtctttcttggctactcttccacacaaaagggctacaaatgctatgacccaatttcacagaagctatatgttagcctagatgtcacattctttgagcatactccctactactcgcttaagggggagtccgtgagtgaagctagaccaaccttaaccttagactaccttgatgttgctgtgttcaaatccactctgttccttatatctaccccttcgcctaatatagaaggacacttgaactcaaggggagatacggaaatatagacaaatagggaaacactcgtctactcaaggaggccaaaatcgaagtctaatgagacactcacctctgaagcactaaaagagtcagaaccggtgatagttccaacccctcaggagtctggctccaatcctaatcaggtaacaaatgacttacccattgctcttaggaagcaacctcgttcatgtactctccatcctatctcgaaatttgtgttttataatgctctttctgcaaagtgtcgtgcttttacgactaaccttgatagaatccagattcctaaaaacattcaagaatccttggagattccagaatggagagaggcagtgatggaagaattaaggacattggaaaaaaatgggacttgggaagtgatgactttgccgagagggaagaaaccaatgggttgtaaatgggtatttacagtgaaatataaggcggatgacatagtagaacgatacaaagcctgcctggttacaaaggagttcacttagacctacgacatcaactatactgagacatttgcaccagtggcaaagctgagcactatacgagttctcttatccttggcagcaaacctagactgaccactccatcagtttgatacgaagaatgcctttgtgaatggtgagctggaagaagaagtgtttatgacgctaccaccagggttttgtaaggaagaagaagaaaccagggtatgcaaattgaaggaatctctgtatggtcacaaggaatctccgagagcatggttcaatagatttgcaaaggtgattaagaaccaaggataccaacagggatagtcggatcatactatgttcttcaaacagtccaacgatggaaggatgaccatcctaatcgtgtatgttgatgacattattctcgctggagataatgacaagagaagtggagaggttgaagaaggtcttagccacagagtttgaggtaaaagacctgggtcaaatgcggtatttcctaggaatggaggtcgccaaatcaaggaagggaattagtatctcccagagaaagtatgtacttgacttgctgactgagactggcatgcttggttgcaagccaagcgatacccctatcaaggcaagaaaaaggacggaaagcgacggaaaacccgtggatagagagagatatcaacgactagtaggtagaccgatctacctttctcacactagaccagacattgctttcgccgtaagcgtggttagccaatacatgcattcaccaaaggaaagtcacctggaagcggtgtataagatcctcagatattcaaagggttctccaaggagaggactattctttaagaagggtgacagtaagaaggtagagatttatacagatgcagattgggcgggattaacaaaaatcagaagttctactatcggctactgtacctatgtctggggaaatctagtaacatggagaagtaagaagtagagtgtagtagtcggaagtagtgttgagggtgaattcagagcagttgcacaaggtatgtgtgaaggattatggttgcagaaactattggaagaattacacattacagtagagctccccatcaaactttattgtgacaacaaagccgccattagtatttctcataatcctgttcagcacgacaaggccaaacatgtagtagtggatagacactttataaaggagaaaattgagaaggggactatttgcatgacttatatccctacaagggaacagttgacagatatattcactaaggggctaaagaaatctagctttgaagattttatttgcaagttggatatgctatctatgatcctacttgagggggagtgtggaaatcccatatgatttggggggtgatttgtaggatattgtggtagaagattgaggccccaattagatctgatatttaggctaaatgtttggtttgacttttatttttccatattttgctctctgtgtatatgtcaaataaggacccgattatgtaaaaaacatatgattgaatatacaattttattattctcaatttctacaactttataacaccatttgtgagacacatctctcctggcctatgaaaaaaaaggcacatttctcttgatcttaacaattttcaagagtggagtatttacctatctctcaagatggttctaatcggtgttgacctttgcctagatatttgctttattttctttttctcctctttttctgtcaggaagctgaaacaatttgtttgaattggcttaggcatttgtttagaatttgaacgtccctagtgatccaactcttagttttaatcaaatatgtattattgtttttctttatttattttttggtactgtcgacaacaataagaaccttgaaagatgttatcattttcgacaatcctgcattaatgtgtcttcacttatgatacaaattatgagatgccatgaaagaacaaagcaaattattatttgatcaaatatgtattattgtttttctttatttattttttggtactgtcaacaacaataagaaccttgaaagatgttatcattttcgacaatcctgcattaatgtgtcttcacttatgatacaaattatgagatgccatgaaagaacaaagcaaattattattagtgttatttttattttgatcagaaacaaactatttgtttattgaagtgcacaaacatatgcagcaggaagatgagttatccttcccaggaaaaagaaaacatctgaccaaaaaaaagagtgaaccatagaaagaaaaacatacaggttgaggtggaaggatgctaaaaagggcctttttttttttttcagtcaaatctttttatttggtattgaaacctggaaggttaatcccctttccaacaagcattatttggaatctgtgagtccctttcaaggtgagcttttttttgtttgggaagccacttagggaaaagttttgattttaaatcaacttaaaaaaagagggggattgctagtgatagacatttccattgtaaactagagggagaggatcatgttctatttcgttgcaccaaagtaaggattctatggcagatgttgtttccttatttagtgtagtttgggtgatcacttcttcggtgaaagataatctgttaagttgacatgactcttttgtagggaagaaaaggaagaaggtgtggagagccgcttctctttgcattttttggacaatttggtgggaactaaaccaaaaagctttcaaaaacaaggaaattgttagatagtgtacagttatttcagttatttacttttccttttctttccttattgtattgtgggtcccactaacatgtatatatatacccaagtccaatgtgtattattaacagttttttaataacaaaaattagggattctcccttttctctcttttcacatggtattagagcctagggagaaaaaaacctaattatttccggtttatctgtgaatcaatattgggaaacctttcagtgatcttgtttcattccggtcacctttcccatctcctaaaactttgtggtcaaccgtattgtcgtcagaaaatcctcaccgccggcgacttttctggcaacttttctcggtgaagtcctttttcggcaccgaccataccatcaaggaggagatcttcaagttttgtcaaagcactagagggagaatctcagtcacgctccggccacgcgcttttcttctctggtggcctgaacctcacgtgccggcgcgtgagggcgtgtggagcacttttcggccacgtgcttccacctccagcctcgcctgacgccgtctagccactctccatctgtgcttgtgccatccgagccctacaagtgcatttttttagggttttttgtctccgtcggccctctaaacagccttttcgatgacctccgatgacctccggtgacttcctctccaccccgagccttgcacgtgtcttaggaagtgttcttctacccttccagtagtgccacatttatttttctttactatttggtctctcacagtcgcggaatccggtttttcttctttcagtcgcgatctgaagccgtattagggctctcttcaatccaaacatattttgttctctagataagtagatatgactactaaaagttccattttttcctctattatatttggatctcctatgattacttcagagaaattggttggcagtgaaaattatttgtcctggtctgcctttgtggagctttggtttatgggtcaaggttatgaggatcaccttgttacgcaagaggcggatatccttgaggttgacatagtacaatggaggaagatagatgcatagttatgtagtgtgttatggcaatcagttgatcctaagattctgcttcatcttcgggcctacaaaacatgctttcaattttggaatcaggcgaaagggttatacacgaatgatatccaacgtctttataaggtggcttcttctattgtcaatgtcagacaacaagacatgaatttatctacttatattggctagattgcctctcttaaggaggaattcttgaccgtgatgcctcttactactgatgttggggatcaacgaacacagattgacaagttcttcatggttcttacgcttattggcctccgtctagatcttgagaccgtccgcaatcagatttttggcagttcctctgttccatccttggatgatgtgtttgctcgcctcctccgtatctcctccactcagactttgccatctgataacacttcagattcttttgtgttagtttctcaaactaactctcgaggaggacgtagtggtaaccgaggtagaggtcaacatcctcattgcacctattgcaataagcttggccacactcgtgattggtgttatcagttatatgggctgcctccccgcactacccacgtggcccagtcatctgatcctcagccgcctcagcttttgagttcctccacatctcagggtatttccctcactgacagtgagtatgatgactatctccgctctcaggtcaccaagtcagtttctattgattttgttgcccagattggtaatgcttctgcttgtcttacccacacatcttctcttggaccttggattctagattctggtgcttctgatcacatatctggtcataaatatcttttctcttctattactactacctttgccttacctacagttatcttagctaatggttctcaaactatggctaaaggcattggtttggcacatcctctcccttctctgcctctcacttttgtcctttatactcctgagtgttcctttaatcttatctccatcagcaaaataactcatactcttaaccgctctattactttttctgataaatttgtgaccttgcagaaccggagtacggggaagacgattggcataggacatgagtctcaaggcctctatcacctcacctcgccttcaacttctacagtttgcatttccattgatgctcccctccttatccacagttgcctgggccaccctagtctatccaagttccagaaaatggtccctagtttttcatctttgtcgtcgcttgcgtgtgagtccagtcagcttaggaaacatactcgtgtctcgttcccaaagcatttgaataatcgggcaaagtctccttttgaacttgtccacactgatgtttggggtccttgtcggaccgcttctactttaggatttcagtattttgtcactttcattgatgactattctcgatgtatttggttatttttaatgaaaaatcgagctgagttattctctattttccagaaattttatgctgaaatccaaacctagttcaatatttttattcgtgtgttacacagtgataatgttagggaatatttttctgcatcatttacttcatttatgtcccaacatgagattcttcatcagtcttcttgtgctcatactcctcaacaaaatggggtagctgaacgtaagaatcgacatcttgttgagatagctcgtactctccttctccatagtaatgttccttttcgtttttggggggacgctgttcttatagcatgttatttgattaatcgtatgccctcatctgtattacacgatcaaattcctcattcccttcttttccctgaccaacgactttatatccttcctcgtgtttttggttgtacttgctttgttcatattctcactcctggataggttctggataggacaaactttctgtcaaagccacaaaatgcatcttcttgggatactctagactttaaaaggattatcgttgttattcttttgagattcattgctactttctctccgctgatgtcaccttctttgaggactcaccattcttctccacctttgagtcttttcctgtttctgaagtcttaacccttctcattatttccccacctgatgcagtgcattctcgcccacttcaggcttatcatcgccgtcatcgtgtcgctgttcctccttctttggccgaggtacctgctaactcacttcctatcccttcggcttctcctgccccggctctacctccttctgctgacttaccaattgctcttcggaaaggtaatcgatctattcgtaatcctcatcccatttacaattttttgagttaccatcgattatcttcaccttattctgcatttgtttctgctatatcttctgtttctcttcccaagagcacccctgaggctctttcacatccaggctagcgacaggcaatggtagatgaaatgactgctttacactccaatggaacttgagatgttgttgttttaccctttggtaaatctacagttggttgtcgttgagtctacacagttaaggttggccttgatggtcaggttgattgccttaaggcccgcttagttgctaaaggttatactcaggtttatggttttgattatggtgacactttctctcctgttgccaagatagcttctgttcgtctattcctctccatggctgctatgcgttcttggcctctttatcagttagatattaaaaatgctttccttcatggggatcttgctgaggaagtttatatggagcaaccacctggttttgttgctcaagggtttctcgtttagtgtgcaggttacgtcgttctctatacgacttgaaacaatctcttcaagcatggtttagccgctttagttgtattgttcaggagtttggcatgtttcgcagtacagcagaccattccgttttctatcatcataactcttcagggcagtgtatttatctggtagtttatgtggacgacatcgtcattacaggtagtgatcagaatggtattcagaaactaaagcaacaccttttcacccactttcagactaaagacttggggaaactcaagtatttcttagggattgagatagcttaatccaattccggtgtggttctttcccaaaggaagtatgctttagacatcttgaaagaaaccggtatgttagactgtaaaccggtagacactcctatggatccaaatgtcaaacttatatcaggatagggggagcctttaggagatcctgggagatatcggcgacttgtaggtaaactgaattacctcaccattactcgtccaaacatttcttttcctgtaagtgttgttagtcaattcctacagtcaccatgtgatagccattgggatgctgtaatccgcattcttcgatatatcaaaagcacactaggccaaggtgtgttgtacgagaacagaggttatacccaggttgttggttacacagatgcaaattgggttgactcactcacagatagacattccacttctgggtattgtgtttttattggaggtaacctaatatcctggaagagcaagaaacaagatgtagtggccagatctagtgctgaagccgagtatcaagctatggctctggcaacatgtgaactcatatggctgaaacatcttcttcgggagttaagatttggaagggatgaacagatgaagctcatctgtgacaaccaagccactttgcatattgcatctgatccagtcttccatgaaaggaccaaacacattgaagttgactatcacttcattagagagaaaatcgcatcaggatgtgtgacgactagttttgtcaattcaaatgatcaaccagcagatatttttactaaatctcttagagatcctagaattaaatacatttgtaacaagcttggtgcatataacatatatgctccaggttgagggggagtgttagatagtgtacagttatttcagttatttacttttccttttctttccttattgtattgtgggtcccactaacatgtatatatatacccaagtccaatgtgtattattaacagttttttaataacaaaaattagggattcttccttttctctcttttcacagaaatgattgaccaaaatttaaaacattcttttctttgtaatctttcaacttgggtatgtacataagagaaggctcaatgccattgattgattttcagattgggttaggtcttttttgattgattttgttaagggtggttttttgtgtcttttctttcaaggcctttctttttggtgctcctcgtttatgtgctgtgtactttggtgtacttttcttcattattaatctacacgtatgtatctttacctatcaaaaacaaaaagaaagggttcgaacaataattgcaaaaacactcgataatgaggaactccaaagcatacactagaactactgctcaaggaggtaaaaattctccacaaactcaatggagatagaaacttggagacttggttttgttttgggtcattatttgttttattagtcaaatattagtaatcatatatataagattccattatagattggttgagctccaagtagggagagtgaaattgttttttgttttctctcttcctttttgcttgcctcatggtgcttcttgtatacatcatgcttaccttggtgcgccattttttagacttttttaatatattttctccttttgccttcaaagaaaaaagagagattctatagagaatttatcaagtacccggaatatgtgttcaattttcaatctgaaatctaaataaatgaagtatctagacgagtaattaattttgtgagtcctaagtatgcgtgagttcattaagtagttgaactctttaatcttccacttttaaagtgttgagagttcccatgattctacaaaagagcttcatgtaggagtttgagaggaatgaatgcagatgaataagagtgcagcagagatttataattcttgtgagtgattcacagattcagagggtatggagccttctctatgtgtgatacctaggccctataagtgtgattgtagttggtaatgttaccctagcaggtagtactctcatgtgtttcttcttttagatagacagcatggaatctgatgtcctcttgcaaatgaattgggtctgtcttagttatacagatgtgttgcatgatacaggaggaggaagtggtc

SEQ ID NO: 13474 - DNA, 3966 bp, Vitis vinifera
  Intron number 3 from transcript GSVIVT01033123001 (locus G SVIVG01033123001) derived from phytozome v7.0 (chr-ID chr4 ; pos 7946959 to 7950924)
aagcatttcacctttgtttcccatagtgctggaaggtactccgccaagagattctggaacactcaaatattttagttggaagatttctaatgcttcaatagcactcaccctatgatgaagactaagtttatgatgaaagagtggagtttctggcatccacctatacaccgaacgcagaaccaatatttgcttctctcatagaaacaaacggttttcactacaaaccaagtgatcaagatgatgcaggccgtaaaaatttcccagaagcattgcaaatggccaaacaagatgatgaagctcttctctaacagctgaggcaaatactattggaaatgggaaaatcgaaacagaagttataatgttcttcttccctcatgttcaaaattaaaatggattaaggtaggcgatggaacataactcatttgatagaaatggttttatttgaatcataatgtataatgagtagttcgacaatggctggttctagtaattttgcactaaagctggatcaaagccttgcatctcttggtgaatttatttcacttcttaaaccaaaaattgcaatttgaagactgtgtagtctgattagaaattggctcccttcagagccaccttgtcatccaaatcgtaagggttcagaaattccagttgtttgaggtgaagttaagaggcagtcttgtccatcttccagcatagacatagctcaaaataattctgtgggtgcttcaatcctagaatttgatgaagcagatcgtgatgaaagatcaagtgatacattcaatgatgattttttcctgtgcaaacagaatataatgggcttaatctaagataataaaaaccacaaaagagtctaaaccaacatccagaatagcaagacctccacaaggactattgctaactttatctctaccagcatggcaatcatacatgtttcaggagaggagtgaatatgctcagaacctaattctcgggaggatgattagtggctatgagtcaaggtagaactttagctagagagttaggtgacaatcttttgaaatctatcagttctcacagtggactaacaaatggaattccaagctgatttttgcatagaaatttaaagatctcttatctgatcatgactattttaatgatgttaatctagaccatgatttaatgcctagcatcgcctattcagaatttcagtacaaagcacattcttaagcgagaaactcctactggaaattcatagcattggaatctttcaagaattggtgtttggcaaagcatagatgaaggaagaagaaatcagtgaagacattaggagattggaagagaaacatctctgacgggctttcaaagaagaaacagattggtagaatactgaagatattgtgtagaaatttaaggccatttgggcttggtggcaaaatagggttggacagatccacaaatattatgttaaaccaattgcttctattttggagagcttcgttcttagcaatttctgcactgacatccaaagaagaaatgtcccaaagcttatgtagtactagtactgaaccagttaatcaattgaacaccgcgtgccctcaagatgaaatgagtagttccttctctgcaccgttagcccagcttgactaatgaaaatcattcatttacagattcagttcgattatggatgaaaagtaaaaatgagaagtctgcttagtgatggcaacgacaaggatacatattctagtggaaccattgaatcaaaccttggtggtgagaaattaacacagaatgcaggaaatctgtcgatgcaaaaaattgaggattttggaccttctatttagtgtttgaacactgtcgaggggaatttagttgagctttcaaatcaagtttccttgtaaattgaagcatattcaacagttgaacactttccagtgaattggattcttctatccagaatttctaggatccattccatcatggttaccttgatgtgcatcatcctcctaatgttttttttatttccttgtgaacttacactttttaaatctggatttcaaaatatttttcattaaacactactacaaaaataatttatggtgtcactatttatggtgtcacttttaaaataatgacaccatagggattataattaataaaagtgacacatcatataaaaaatcttcaattaaggtagttagatgatattagttttatatctatagtgtcatttttcgggaagtgacatcatataaaataattttttttaagtattataacttaatgagcccacttttagaattaataatgagggataatatataaaaagcccattgtttccatatgtcacctacaatccaaaaaatctcaatatataaaccctatataaaatcatgatcttcttctaccttttctttcacccatagtcaacacgctcacaaaaaccgacattcttcactttgtgaactcccaggtaacccaaaatctcttagatctataattttttttcttttattaatgtcattatattaattgtttcaacatttttgtattatggtttttgtgaattgtgttttcttgagttgtagggaagaaaaacttaggtttaatcttctagcatagaagaaaaaattgtagattaattgattttttaatctaaaccaaacacatgatcaagtccttaaaaaaaagtgaaaaacaggaaaaaaggaatgatttttaatatgtatgtgtgagaatgaccggtacagaatttttttgagatatactatcacataatcttcatcccttttcaaaaacgagagaggaaaaaaaaaagaatgatttttctgtttttatttaagtgggaatgagatagaatttcgttgagaggatgaccaatccgggaagacaatatccatcacttgctcagtagcgaaacaaagacgacaccttcttgtgcatatgcattaatttatgggtcttaagatgtaagattttgaggaaacctattgctgttagtgacagaaacctgttagtactagagtcaattgtttgactgggtgggttccaatcaaaccgtaaggaatgggtccaaaggtcatccattagagttaaaggaattcattgttattcttgtgccttaagacaaagttaactaactcatatgctttgtatccaacacgtgtagaggggaaaaagaaggcaaaaacaaatggtgtcattgattcattttttctagttttaaattcagaaaacatcgttttacttttaattttccttttcagtttttatatttaagtaattgagttttggaaagtttttatattttgttaatagaaatagaaatttttatatttttttattattatgaatttctattctgttaaattgtaagtatctatctcaataagagattattaatattcaaatgaaagtgatgaaagagagaaaatattttaatactcaattatattttaatgttatttttttttacataaggctttatttatgttttcaattttgaagtttgatttttatttatttatttatttatttatttattttttacctaatattttttgcagctcctgctagttttggttatttatgttatgtatgttttaaagcatgggttgttgttgcctcttcttcttcttgaatcatgtgattaaaaaaaatggtgcattgttattgatccaataatatttggagggtagttagtgaaacgtctgattaaagtttcctgaactgaacttctgagtccactaattttgttgtttagtccactaaattatggatcttgggtgatttagaatcatatccaagaattaattagtggaggcagaaatatgatatgtggaaggaaaatttgttctgagtgttttcatagtggtgttttttaatgatgcctacatctggctactcggtcttggtggagaaggctagttgggccaggccatcactttactaaaagatcagcataagtggctcttaattgcttatctagat

SEQ ID NO: 13475 - DNA, 13156 bp, Vitis vinifera
  Intron number 34 from transcript GSVIVT01029870001 (locus GSVIVG01029870001) derived from phytozome v7.0 (chr-ID chr 8; pos 806304 to 819459 reverse strand)
tcaccctgtataccttttttctcttttatagtgcattagcttccttgcactctcatatccaaatttttcctttgcttttcctttttcatcttgcagattctgccggaaaaaaataaatatcagtaaggtatatttctaggatattataattcttgtgcacctggttctactagaactttgtgagcatgagatcaagttgtgtagaccctggatctgacaaagatattaggcatgtccttggaaaaccagtttctgagtccaacatatcccatgtaccgaccaccaatttagcactttcaagattatgaacttgaaccatcctgaatgttctcttggtcctctattgcttctttgagcttgcttgccaagttaagattccttggagaagagaagcttcgatttggaggaggccgaaagaaacttattccttttgatcccccttccctttatgttgtgtttttgacaagcagcgagactaaatatattaaaaggcacctacagaagagggtgcaactcatgcccccctttatgttgttgagaggttctccccatgtcaagttgaaataaggaccgctttagtttggttgcagccaaggcaagaatgttatggatggtggttatttgagcatcctggggccactgtttctctttagttgttataagatctaatggctggaaatttacattgtagccttctaggattatgcaaaacccttgattattccttccagagactaaaaatgaatttatatccttgaaaggaagcatggctcttagtttttgataggataatctatgcaatgagaatttgaaacttctaattggtcattcttgtttaaatttttcattaggagtttctatttcaacaaatttcttgaacaaatccaattagctttttctatggtatcatttgcttgtactggtggggggttcactttctatttctttggagggacttgtggtgagaaagttcatttaaggacaattgaggaaaaataggaaaaggaagaaccttattgaaagacaatgttcagcatgaaaattcaataggatgtcatatgatatttctttttcattcatacaagttactctatgtcaaaccattggttcggtaacgcctttattacaaaattccaagtcaaattactgtagaaaacccccaaaggaagttactattgtttaatagtttttcaaattcttaatttagttctactcctattttatttcttttggtggagaatatttaaaaaggagaattcccattttcatatttcctaatgaaaaaatatttccttattaaggaaaaatgtcaggaacaactctataaattttctacataattgagggcaaaaacttatgaaatggagatagtcttgtaagttgtagtatatagagatgtgcagaagagttgagagacacctagtggaatagggaaatatgaaatgttttgaggctccgatttagggcatagatactaggagcaatgaaacatgagtttcttttgaggtttaggttgtatatttgttttcttgtctcctgtgcaatgttctccaggatatgcaagttaattctttctaacacgaaatatgggatgaaaaataataagttctgtttattagattgactatacatagtttatataggagattacaagagaagaaataggaaacaagagacataataggaaactaacttattcctaaatcataaaactatttatttacaaaaataggaaactaataaaactatctattcacagaaataggaaactaatataataggaaaataattctcctattctatttacagctcaacactccccctcaagctgaggaataaatgttttccattcccaacttgaatacaagatcgtgaaacattgaactgttcaacccttttgttaggatatcaactaattgatcttctgatggaacataggacatacacattacttcttcctccaatttttctttgatgaaatgcctatcaatatcaatatgttttgtcctatcgtgttgtataaggttatgagcaatattgatagctgacttgttgtcataatagagcttcataggaccatcccacttgattcttaaatcatctagaataatcttcagccaaagtagttcacacaacccttgagcaatgaccctaaactctgattctgcagacgaccttgttactacattctgctttttacttctccatgttaccagattgcctccaaggaacctgcaaaatcagcgtcggtgtatgtttctagagcaagagtattgttcttcttgaacaaaattcctttcccgaggttgcctttcaagtaatgcaacaccttgtaagtagcttgaagatgaggttctcttgaatcatgcataaattgactaatcacgctcaccgagtaggcgatgtctggcctagtgtgagcaaggtatatgagcctaccaaccagcctctggtacattcttttatccaccactggttcttctttaacttctcccaacttgtggtttggatccattggggtaaatactggtttacacctaatcttccctgtttctgccaataaatcagtcacatacttttgttgagagatgaagatcccttgtgtggaatatgccacctcaataccgaggaagtacttcagtttccctagttcctttatttcaaactctgttgctaatctctgcttcacttcatgcttttctctctcatcatttccagtcactatgatgtcgtcaacatagactagaaaagcagttactccccctgcagccgagtgcttaatgaagagagtgtggtcaccttggctttgtttgtacctaaactctttcatgacttttgcaaatctcccaaaccaagccctaggagattgttttagccctaggagattgttttagcccataaagggcctttttcagcttgtacaccttgttacctgtgtttccctcaaatcccgatgggatgttcatgtaaatctgttcatctaaatcaccatgaagaaatgcattcttaacatcatacggtaggagttgccaattgtagtgggaaaccagtgacagtaggattcttacagtattcatttttgcaactggagcaaaagtctcctgataatcaactccataagtttgagtgtaccctttggctaccaatcttgctttatgtctctcaagagatccatcagccttatatttcagtgaaaatccacttgcaatcaacaatgtttttccctttcggtctttcaacaatctcccatgttttatttttttctaatgcactcatcttctctctcatagcatccttccattccctttttgtcaatgtctcagaaacagtgttagatatgatagtggtgtttagactcacaataaaattcttgtgggttggtgataggtgcttaagagacacatagtgtgatagtggatagaattgtctgttagtgcattctctggtgccttttctgacagcaatgggaaggtctaggtttaggttgtctattgagtcagtggaagtttcaccaggttgtgtatgtaaaggtgggtttgatcttaccgtgatttcattcccagggtttgagttggattcttggacctgcttttgttctgaaatggccttttcccttgaatacaccttaggaaactgtggaaaattgtgagtgacactggctggaataggggatgacacgggttcagtggtaaaattgggtgactcaggtgtgattgactcagatgactcaggttcttcatcaccatgggttaagacatgaggaagatcaagaggttcaaaggactcacaaggactatcttccatcattgaaatctccccctgaagagaggacttggtgaaaaaatgtttattttctgtgaaagtgacatttgcagagatgtaaaattttatggctgagggattgtaacacttgtatcctttttgagtggatgagtaaccaaggaagacacattttatggctcgggggtctagcttgtctctatgttggctgtggacatgaacaaatgcagtgcacccaaataccctaggagtgagcccatttgaggttttgaagtgtggataaaaactcttaagtatctctacagggcttttgttgtctaacacttgtgagggaattctatttatcatgtatgtggcagtaagaacagcttccacccaataggacttaggaatattcccttgaaagagtaagactcgggttgtgttgagtaaatgcccatttttcctttcggttaccccattttgttggggtgtgttaacacatgatgagtcatggagaatgccctgtgattgaaaatagggtgacaaaatctagttgaagtaatctctagcattgtttgtcctaaagctttttattttaaccccaaattggttttgaaccattgagtggaaattaggtataacaatgctaacatcagatttttgtttaagaagaaagatccatctaacccgagtgtagtcatcaattaaggatacaaaccaacgagccccagaaacattaggtatagccgaaggaccccatatgtcactatgaataaaatgagaaggatgagaacttttattgctaatagaaaaagatacacgagtaatgttttgccaattcacaagtttcacaatgaaacttagaaatatctaatccttggaacaaatgaggaaacatgacctttaaaaccctaaaagatggatgacctagacgtaggtgatacaaccaaatggtatctttatttgaggaattgagaaaagacaacgacaaattattactagttttttgagatgattcaaggtggtaaagaccgctcctttccttagcaagttcaatcctctttcccgagccttattcctgaaaaacacaataagaagggaaaaaaatagcataacatttaagatcatgggtaagcttttgaatggaaacaaggttggccgacaattttggtacatggaggacatttttaagaataagggtaggtgtgatgtatatgtctccgaaacctgcaacggtagctaaagagccattggccactgcaattttcttgttacttgggcttggggtataggtatggaaaagttgagatttagaggtcacatggtctgtggcatcggagtctattatccaagagtcatcataaaccctgtgtgaggaatttatgcaaaaagagagtgaaggtgtacctgaaagaaccaaataacaagtttgagtaggtttgtcaagggatcccaacaagcttctcaacttctccatttcttcactattgaacaagttctagtaggtttgtaaagaacacatgaataaaaaaaaatccagctatgaaggccaaaaaaatggcgatgaaggccagaatgatgcccaagtcttaaagacctacaactctgataccatgacatgaattatgggatgaaaaataataaattttgtctattagatggactatacacacaatttatataggagattataagagaagaaataggaaacaagagacataataggaaactaacttattcctaaatcataaaattatctatttacaaaaataggaaactaatataataggaaaataattctcctattctatttatagctcaacactttcatctatgaatatagacatgattatttgattcacgttaaacatcatattttttgtaagtggaattgttttgtttttagtgttattgcagaatatatatcacatcaacgcttctctagtgatagcaactgcaaccaaataactgggaactaaaaatttcactatttcaagatttgaggaaataaggaattaaggttatggtatgggcaaagaaagtaaaagcaaggagaagaaagaaatggaaaagaccttcgggtctgattagggccttctaagagtttgacaagagaaaataatggaatcttcccataaaggatgtgaagaattcaaaaattattatcattcctattattttcacctaccctaattagttgtatttatttagaaactcctaaggactcaacaagaccatataaataatttaaaaaaaataccatacatattagagctctaaaatgaaacctttttagaataaaaagcttaaattataggaattacatgaaaatttaaatcataaaaaaataatttaagtttggtatgctattttcggtgccctttacaaatccttttcatttgcctattaaaaaaaaaaagaaaaaaaacactgcatgtagacttgtgtaagaagttttcattaaagaaaactttctaaattctaaaatggattcaaatgggagcttttggaaatttggaaaaacgaaagtttcgcaaatagaaatctaaaaaatataggaattttttagaatgagaaattccaaaaaaaagactttttaaattctaaatgagggaagatctaatgtaagacaacattaggaaggtttacaacatcccttctgatctccatagcaccttcctccatgtagatgagatgagagggggaaagtgttgggttgagatagaatcgaagtcgtttgaagtttcggtagaggaagtctgagggaagctaaaaggtaccattgtggagaggagtagaggtctttcctcttggatccggtttggagttttaagtttaagaaacttattggaaggatttgaagaatgttgtagggaggagaaggaaggaagaatggtgaaagtctaggaggaagaaggaagaaagttcagactggataggcgtgtaaacgaggcggggagatacgtcttatgttctgttgttgatttagagacttaagagattttgcttagttttccctgaaggaaaaggattgctagggggatgggccattctcactgagaaactacgggctttgggggtagttactcaagctgaagcaaagactgcagcggtggcttcccgagctgaatcaaagacgaaagtagtgacaatagaaggcaatgacgagaagtgccttggaaaaacggtggagggtgagaagaaggctttcatggatgttgctagggagccagctggaaggctaggagatgcattatggcttcaggtgggagggagagagttgaggggtagggaggaagtgttgggtcggtgcttagttggtaggtggggggtgtcggggcggtggtggagacggagatggcttcatttaggaaatggggggagtgcttttggaatcttaaaaaaggcgtgaaagttttgaagctgctgcacttagagagatggagtgaggaggcggggtgcttgcgcttaggaaaccaagcaaaagaagtgtgggtgagggtggtggggctcctgcttcactgttggagtggataagtgtttaacaaattggtgactgctgtggaggttatgttgaggtggatgaagaaacaaaaaaattttctcagcttcaatgggccagaattttggtgaagacggggggcgggggggaggtttttccggggacgttgcatttagtggtaaaatcttattgttatgcagtccagttgtggtgggaggtgctgccatggatttctgcagtggtgccgatgaataaattgaaaaggagagatgggaaaaaggttagggaagagtgggatgtgggctcacgcgcagggagcaacggtggtatggggaaggagatttggcatgcaacagaggttgatggggcaggttttttcagaaagaaataggggggaagagaaggtgatggagacgggacaacaagtttagttgatggtttttcaagctttgggaagggggttggagaaaaagggagttgaggggtggacttaagtgagaaaggggggtctgctgcattttttggttgcaagcccatttgtgaggatgctcaggcccaagggattacaggcctggtttgtgaaggcccttcaaaccctttaagttctagaatgggctgggctttaaaggaaagtgagaggagcgggcccaagtcatattgggaggaggggcagcccagcaaaggtgcggagcgggcttcttgtgacaacccttcaaaccttttaagggatggggctgggttgtgctttaaaggaaaatgagaggaacgggtctaagtcgttttggaaagtggggcagtccagtaatggactgaatcgggcttcggatccagatcaggctttcttggacgagcctttaaaaaagggtagggctttggtttgtcgaatgtgttctaaggggtgttttctctagtggacatgtggcttatggaggaagcttccaggtactccttctttgcgccttttttttgtttgcgtttaggggggacgtgactcttcttctcctttctatgaggtggagggggctttgatcgaggtagaggagggccatgatgttggtgtctttttgaaggaaaacgaaagggagctgtttgtaaatcctttgagtgtgtgtttggcggaagaaaaggttgttgagaaggttgatggcgggtctttcccattaaaggaggggaggggatgtggagttgtggaggtacagttgtgtggcaaatttttgtcattgtttgggaatgcccactaaaggatttgaaagtgagattttgaaacatctttatataataagggaaagaagagaccgatttgagagggtaagcagaaaaaagaggaaaggacagagatcctctaaatttgaccgagagttgaagaaacttgaatgttcggtaaattacatcaggttaggaggggattggggtcatccagagtgtgttagatgaggcttcgaatcctttcgtggaatgtaagggggataaatgatagagacaagagaaaattgataaagaatgttattaaaactcagaaggtggatttagtgtgcctccaggaaacaaaaattcaggagatgactagtgggattatgagaagtcttaggataggaagatgtttagagtggggggctgggaattcaagaggtgcggtggggaggaaggagggggtggtggttttctgggataatatggtgctacaaatggcggagatggaggtgggtaaatatttagttgcttgtcacttcaagaattgtgaggatggtttttgctggattttcacaggagtgtatggacccactgtgaagttggagggagaagattttttgagtgagctgggggccattagaggtttgtggaatgagctatggtgcgtagcaggagattttaacatgataagattcccatctgagcgtagtagaggaggccgtttgtcctcggcaatgaggagattctcagaggtggttcaggacttagaactaagggacttgcctcttcaaggggggctattcacatggagtggaggttttaataattggttaaagtcgaaaattgatcggtttctcatttctgaagattgggaagttcattttcaggggccattcaagttgttttggctaagccgatttctgatcactttcctattcttcttgatgggggagggatgaggagagggcccacaccttttagatttgaaaatatgtggctgaaagaggaggactttaaagaggtgttgagaaagtggtgggaggggatttagattagcgggtcagccgacttcattttgactgaaaaattgaaggccttgaaaccgattctgagaagctgtaataaagaggtttttggttagattgaatcttagaagcagagtgcttggaatttagttgatttttgggacaagaaagagagtgttcgctaactgtttatggaagaagagaaagctaggaaggaggcaagagaaacgtataaaaagtgggtccttttagaagaagtgtcgtggagacagaagtctagagaaatttgggtgaaggagagggatagaaatacaaggttttttcattaaatgactgatactcatagaagaaggaataaactgaataaagtaaaagtgaatggaaggtggctcactgaggaaagtgaaattaaagaggaagtgagcagagctttccaaggtctattggcagatctcggtggttggaagcccaatatagacggttttatttttgagagtttggaagagttggatgtggaggggttggagaagcctttctcggaggaggtcttcggtgcgttgttaggtttttgcggagagaaagcgctaagccctgatagtttctcaatgacattctgacagttttcttgggattttgtaaaggaggaggtgatgaacttcttgagacagttccatgagtttgggagttttgttagaagtctgaatgcaacctttctagtgttgattcctaaaaaaagggtggggggttgaggacttgaatgattttaggccaattagcttggtgggagggttgtacaagtagttagttaaggtgctggctaacaaactgaagggagtgttagctaaggtgatctcaacgtctcaaaatgcttttgcggaggggcagcagattatggatgcagtgttgattgctaatgaagcaataaactccattttgaaaagtaatagaggggcgattctttgcaaattggacattgagaaagcctatgatcatgtggactagtcttttcttttagcgatgtttgagaaaatggggtttggggaaatgtggcatagatggataaagtggtgtttatccactgctagattctctgttatggtgaatggaagccctactggattttttcagagttcaaggggtttaaggcaaggagacctctttttgccttacttattcataattgtgatggagactttcaactatttgttgaagatagcagtttctgaaggttttttatcaccttgctcggttcggggaagaaagggtgaaggggttcaggtctctcatttgttgtttgttgatgatacgttgattttttgtgaggcaaaggaggagcagttgacgtatttgtgttggttgttcatgtggtttgaggcaatttcagggttaagagtgaatttggaaaaaagtgagttgatttcggttggtagagttgagaatgtggaagagctggctgatgagttcggttataaggtgggaagattgccctccacctacttaggaatgccattaggtgctccttttaaatttgttgccacttgggatggaatagaagaaagatttcgaaagagattgactatgtggaaacgtcaatacatttcaaaagggtggaggattaccttaattcgaagtactttgtccaatttgccgatctatttcatgtctattttctagttgcctagggtggttagaatgagattggagaagattcaaagggaatttttgtggggtggtagggcccttgagcaaaaactgcacttagtaaggtggctgattgttagtgtagaaaaaagaaaaggagggctgggggttaaaagtcttgggaccttcaatagggctctcattggcaagtgggtttggtgctttgcaattgaaagaaaggccctttgaaaccaagtgattagaaggaaatacagggaggaaagaggagggtggagctcttgtgaggctagggaggccaatggagtcgggttgtggaaagcaataagtaagatgggacatctagtaaccccttcttttgactttgtggttggtgatggaaagaaggtaaggttttggaaagacaagtgatgtggaaacacccctttgtgcgaggcattcccttccttatttgctctagcaacttccaaagaggcttgggtaaatgaagtttggacagccgcgggggaaacggagggaagttggagtccttgtttcaatagaccattcaatgattgggagttggaagaggtggaaaggttgttttattgcttggatgggaagaaggttagtgtggatgaggaggatagggtgaggtgaatggattcaaaggatggggttttttcggtaaagtatttgtttagggccttgcagccggtttctcttgcttctttccctttgaagattatttggaactcttgtgtgcagtccatattaagtttctttgcttgggaggcttcgtggggaagagttttaaccttggaccgtttgcaaaagaggggttgggctttggctaatagatgctttccgtgccaaacgtttgaggagtcgattgattaccttcttcattgtgaaaaaacaagggaagtgtggatgttgctcctttctttatttggagtatcttgggtgtttcctttttcggtaaaggaaacccttttagggtggaggggctcttttgtgggtaagaagaggaaggaggtgtggcaagtgggaccattatgcttgttttgggtcatttggaaggcaagaaatagaattgcttttgaaaatagcgtgctgtccatccaaaggttgaaagcttcttttgtgtatttactttggtcagaaaccaaattgtggataaaagacgctccttcgaccataatagattttgtagattggttggattcgcgttaagggagaaggttttttgtttttccttgttttgggtccttttgtaagggggtgagtgtctttatactgtaattctgtgggtcgctattttagcgcttcattgcaatataattcttttgcttgttgataaaaaaaaaaaaaaaaaattctaaatgagactcaaataaccaactgttgccgactttgaccctacacaacctaaatctgaagaattacctgaataccttgatcgagttaatttaggatgtgttccacttcctttttcttgactaaccttaaggggatgacctcattagataaaattcttggaaaacctagttaagtctacactaattatgattttttttcttaatatgtggtagacaagcattacttggacatcttctgctgatatatacttaccttggatggtacatgaacaatcattgtacccaaactactatcacaacatgctgagggtttaagtatggaatatgtgttttgactttgttgttgcttgatatttgatggaatcatgaccactcacttcaagtttattataggcagcttagatttagggggtaacttttttagtatattagtcatgcatgcatatgattgaatccatgtttttgtgttatcttgtgtttatgaatcttagtacttgagattgaaagttgattttttagtttttatttcaccatttttgtcatttaaatctcatcataatgtcattcattattcaggacacatgaactttccatgttatgttttgccttcaataactctcaattggtttcatttacaggctccagggcaatcctat

SEQ ID NO: 13476 - DNA, 10135 bp, Vitis vinifera
  Intron number 4 from transcript GSVIVT01036470001 (locus G SVIVG01036470001) derived from phytozome v7.0 (chr-ID chr1 4; pos 22455269 to 22465403 reverse strand)
actgtgtccactggtgtctaccgggccccattgacacatggagtgatttcttgctcgagatgctgaagatggagggcactagaaaatatgaggaaaagcttcattccaaggtgaaaaggatgagagcccaataggtttatttattttagttcattttttattttcaaggctttagtaattggtgtcttttaattagggtctgtgattcatcggatctctgattttttttccttttcttgtcaaatgctgtggtggtatatatgagtgaatattatttatgatcttaattaaaaatatagtaagaatttggcttctcatctagtatttgaacttgtacacagccaaactggcctttggctttttccaaagcagaaagtggctgccttcataattgaaggatgattggacaaatttaaatcattgagccagtttcgagtgttcagcaaattgatgattaagccactgaaagaaaccaactcttacctacgaagttttaaattaacagaaaagaccccccaacgaccaagttttaaatttcataatactataaagcaattgaatggtgtaaaaagttgacgtgacttaatcaactttttacatatttttctttttcttttaacagaaaacaatttttaacgtttcttctaggagggttgactagaaagtgagtccagctgacaaccatcataaacttagctctgaagccacgtcaggggtcacttaatgacaggtggcataagacaattgggaggcacgatgagtacacatggatgcctgaacttttagaaacattgttccatgtgagacgtttttctctttagagttagcactactcgaggccttttttatcttatcatttcctgctaagatagaaccatcacgccactagtggcccgcactctctcgtcgcagccaaacaagaataatagcatagggtcatttgggtgccataattcatgtgttgtgggtccgatctatgtgccttattcatggggtcatctctactttttaagtttttaaatacctattttgtttgattctcgtcatcaatcatatcatatgttacatactagtattcaaaatttttttttaaaattatttttagtattttagaatatttttaaaatcttttaactagcatattaaatagatgcaagatcgaggtaagtggatctcgagaattaccatattaagtgacaccaacgactttgaaccatactatcatatgcattacccaattttttatttccatttacatattaaagaagaaatcacaactttttaaatatcttttattcacacttttctaacaacttttgttcggagagaggatcattacgccatttagcatattctttaatttctactgcagaaaggtcaatccttacataaatgttggagatgggcacgttagcatgttcttttttagtacaaaaatggtcaatccttactagagaagggcacgtacatgtatgagctgggtgcttgtaagtgtatttcaacgtgcaagacgaacttgatcaattcatgtggaaaaggaagggcatggctcgatgatataacttaattcccaaagaaggaaagaaatctaagagcatttcaaggcctatcgtatcattcaaaattcatgtgtattgattcacattggggaaaaggtactacggaatcccacagtcaaacttctcctccatgtcaccatagttctcctagccatgattccttaatttctaccttaacaattttgtttcaccttggctgtcttggagccaacatcgccagtgtaaaactaggaaataaatatgacatattccgattaaggtaccccgcagcctacaaagaaaggttcaaatgaaaagatcttgttataatcttcttgttgttctcatctatttcctattttaaaattattatatttctttttaggagtaagagtaaattagtcattttcttttgattggaaacctatttaaactttatttgctttgtacatactttaatttttaaatgatcctaataagaaactctagacatttttttttcctttctccctttgtctatgattcttttaaatctcacatggtaacagagttccttttggtgagaggtcatgtgttagagctttactgatgataattgcttcaaagaacttgttcattttaaagccttgttgaagagcaagagccaacttctttccaaaacttaatgtctaattggggttagagcagacaatctgataaactattccatagtccaagagcaagtctggagttaagatcaagtcttcctggttgcatggaaggcagattggtttgtaatactgcaaattcagacaaacatgactgattatcaaatttctattgcatttgcaaaacagttgcttaagaccttgttggtaaagaagaaagtccttaacaattctacaaaacttagaatcgtcgaattcaatatccttgactaaatttaaatctagaacatgtagtcctaggatagctaagatatacaaatgaaggtcttgaagataagaaaatatgaaaacttgtttatcttccgctatggctctaaccctttcttggatcaatagtcggacatccatcttaagggaatatgaaatttccctcttataaaagtacattattaacttaaaattgttccactcatcctcactcaattttaattcatccactggtggggtggactacttattttcacatttttctagtaggaaaaaagaggcttgattttgaaggacagcgagttaggacttaagaaagtcaaccatttccagtttactttccaaagtcttaaatttttcttgcaagtcacaaagactcttgaaataccaaaattctttgtaaacagggttagcatcataaatagataactttgtgggaaaagaatcctccacagaaggtaaaaaacttgaacttgctcttttatccttgttaggggatgagaaaatcttaaaggcttccgaatatggtaaatttggggacatgcttcaagaacctacaacatcaaaaggcttatactataacgacatgaatttttgtgaaataattgaaagggtttacttagattcttgggatttcttaatgggcttaaaaagttatttttcattttcaggggtcatgatctcatggattctacaaaaattcatgagataggaaatcagggattgagttattttctcctttaatatactcaatttgaaaatcaaaattacttaaaataacttatcatcttgcaaaaatatacttggaagctatatttttaacatttttttgtaaaactaattatgcttatttacaatcaactcttaataaaaactcttagttcaaaagatcatcttaaattttgaaatgcttaaaatctcttttttgatggtactgtaattgagttgggcattattccaagttcctaaagtaaacctaaccaatttttcttggttaccatttctctacttaaagatcccacaataacctatgtttgaagcatcggtctcaacaatcttaaaggcttcagggttggctaaggatagacatagtaaagtcttaactctagacttaacagtcttaacaatcttggtgtgttgttcatttcatggaacaaggttcttcttaagtctttgtcttaattgggcacataactggcttatgtccttaaggaattctaacacataattaaggcttcctaagaaatattgtaattgtttcttatccttaatctcatttggaaacttatcagcaaattggaatgacctttgcgtaggggttatggtttcttggtaaatatgataacctaagaatcttatcttagtttgaaacaaattaatcttaaaggcagacaagcttaaaccattttccttgacagtttggatgaacctattgagatgtttccaatgttcttcaacaaaaatagaatatatcaaaacatcatcaatatagacaatgatgaaatttgaaaatggattaattaaacctaaaacatgaagtcttgggatagctgagacatgtaaatgaaggtcttgaagattagaagatataaaaacttgtttatcttttgtcatggctttagccctttcttggatcaatagtcaaacatccatcctaagggaagataacatttctctcaaattgtaacttcacatgcttagagacgaacttgaacttgcttcattatccttgttaggggatgaggaaatcttaaaggcttctgaagatggtaaatctgggaacatgctttaagaacctacaacatcaaaaggctcatagtataacgacatgaatttttgtgaaataactgaaagggttttcttaggttcttaggatttattaatgggcttaaaaggttgtttttcctttttaggggtcatgatcctgtgaatcctgcaaaaattcacaagttaggaaatcagggattgatatatatatatatatatatatatatatatatgtgtgtgtgtgtgtgtgtgtgtgtgtgtgtgtgtgtaaaatgaagtcgttgggcatgggagtcttaaaaagaaaaaaaaatgaaatgaaagaaagaaagaaaaatgggagatgtagtcgtacacgtgcctctgacgatgaaacgacctccgattgtgacgaaatctcaaaaagtgatagtcttcaacgtggtgaacacttgtgtggagtcgaattctcgattcgaaaattggattctactgtacaagtaggggtgtgttttcctaaaatttttctgtcgactttttttgggctttttgttttgcttttatttactttcaaaaaccttcatagaaacgggtgagttgttgagttgtagtagatcgtcatatagttttcatttagattgtttttggaaaccctaaacatgtaaaatgatttggttttgttttgaaaatgttaaatgagaagtgaatgaaagtttaatacaaggtcaaaatgttagaattgttggtatttagttgttgttcctgtgatagaatttactggattgttttggttgtgaaataattttattcgaataatggttgatatatttttcttattgttttcatgttagaaattatagaaattattggtgatatatatatatatatatatatatatatatatatatatatatatatatatatatatatatgaattatttgttgaaaatttttagtatagatatatgtttaaaatgattattttatattattgagattgttgggaataagtaaaaattagggtataaattatttttttgttgatatttgggatgatataattgaagagaaattgttatgttggttgttggaaattattaagcatattaggaataaataaaatttatgtggctaaggtttaaattatgtttgatgatatacaacttgtttgtgagtttttctttgatgtttatggtaattaaggtaaaaaaaaaaaaaaaaaaatcgttgtgtggattgttggaaattaggaaacataatagaagtaaataaaattatgtcttgaaaaattatggatattaaaatatgatttaattgcacttcatatgcacatggttgtgtgaagaaaaagaagaattgaagaaagtgaaatggaaatgaaaatgaaaaaaccctaaagaggctaaaaatgaaaagaaaagataaataagaaatgaaaataccttagaaatggtgaattaagaagggagtgagatccttagggtaaaagactcaaaagtttacctcgagaagactccgaatgaggagtgtatttgggtacaaatgcatatcctttggtgaaagcttcagaaaaacaatgcattgtgtgtaaacatccacatcatgtttgcatttgaaataaggaattgtattatttaatggattgacattaattgtatgattgaatatattattcaagactaaaatgacttatatattttgtaaatttagaattgtttgatatgttatacacatgattgaataagaaaagtgataattttgattgatttaaatttgtatggttgaaatttcatttcagatatgcaatgtagatgtactattatatttttgtgatatgattatgttctattgacctagaatctcaaacctacttgggtgtaaaaacattttactgagtaatgtgaaaattctaacccttttattttctaaaatttttagatgcaaatatagtttttgaggaactacatgaagaacaggaagtgttccaaaaagccctaaaaagtaaaagaaccataataatgattgtttttcagttatattaccttttggcatatactaattcgagttatttgaacttttgtaacttaaattatattttgttaatttgtaaaacctttttttggaaatattttgacttagagattattgtaaatatttaggttatcaccttgggtggtgagtgggttgacgaatttattatacttgggaataggtgatagtgtgatggttggttttggagataaataaaatgaaataaaataatatgatatagtaagtcttagcttaataaatttatttggggttagacattgttttgttgagaaaaaaaaatgaggttattaggattgattgtctacgtggataggtgtaacccttagggtcaaacctttgacctggaatcacaattcgaattatgggttgcctagaatctgaggcgggacaagaatctacagatgttgcatatggaaaagatccaaaattcaaacatcatctatataatgagtacaaattcaacttagaatcctcctggtctcctgacttggttaaagccattgatgcaaagctcaatggactgaccttcaaccgcctcgtgaatgtgtaccttgatgaggcacatgaagcttggatgagtcaaatcgagacatttagctatgtgatcgactcaactggaacttggctttttgggagtgttctatgaaaatggtgacatttttgggtgccatgtatgccataaaaaataaaaaaaaaataaaaaaaaatagaaaagaacatcgtgaaccttacaatgttctgcggatacagaaaggctttttagacaacatttagaaccttttttaggctaaaaaacttcaagggagtagcattttttaagacattgtcactggcacattttaataatggggagggaattgcatgaggactaaagccagtttccagtaaagtaatgaatgaagatggaaggagttgaaggcaacaacaaggttagagaggaagaggggcttaaaatttagattgttggatactactgaggcaatggtggtgaggccagatgggcatccaaaccattataggcattagccgcatgagaataagcgaccatagctgattgtgtccactggtgcctatctaaccccattgatacctaaaatgagattttgttttagatgttgacaatggaaatgtgatagctcatttgacaacagacttgaaaaaaaatttgaatgagaattgagtgaaattatgaattatcattccaccatgtacaaggataagtaccctttaggggatagatatatgtaggaaaagtgtaaatctaaaaaagtgttttagtgaattcggctaatttttacaaaattcaaaatatttttttttattttattattatttttattttaatttttattccatttgacttagtcttttatctttgggaagagttccattgagattgtactagtaaagtcccgttctgcttacaagtagaatcatgttccacttataagtagagtcctgttctgattacaagtaaagtcccactgtagaccctcaattttgtccctttagcacatgtctttaaatccacttccagtgctccacggtagttccagggtggcccattactactcgtaccacttacctttttctgagtcacctcggagattttggttgagggactatctgaccctttattgtgacctttggcagccctaatttagaattaggtttttcattcatttctaggatagttttgagattcacttggcccattaagcaccatcttaggtccacttaggcaccctgggcccacttaggcacttaagcccatttaggcaccctaggcccacctagattcaccttgactcgcaccgagacatctccttatttacacacgtcacttgggtcacttagacacctttttcagaataggtccatttagacatttcattgaggctcaacattttattattattatttcttatatatatatatatatatatataataatattattattatggcatgtatttgataattacacttattttgtctattcattttttacttttactttttattatttatttattcatgtatttaattgtctttattctttatttttatttttatttatttttattttatttatttatttacttaataaaaaattgattgaattgtttatactttaaatacgcatgtgaccctattatcgaacgaggaaatgatattatctaagctctccttattcctttgctttttctttgaaatgatattctattttattactaatttcattagtttctttaattttcttttaattttttatttttattttttttatactattattctattttgcatggggagaggaattttaaagaaggatcatccttaccaacaaagataacaaagccaaggacacgcagagggagatgggttccattgaggagaagatagaccttgaatcagatgcggagatcccttatagcacatcacaaggcacaagaaaagttcattcttttgacttcgagacatctcatattgggtctcatgcagctctctccacctcatggatctttaaaaaaatgaggactgctcctctaagaagtgtttacattgtcttgattaaagcgaagataaatatgttgctacctttcggtcccttagcaattttgctacattatcttactagaaagcatggatgggtcttcttcttcagcttattaggtattaccccgttagccgagcgtttgggttttgccaccgagcagcttgcattctacacaggcgctacagcaaggggatatattattttgctgaaacaaaagaagtggaagaataactgagcagaaagcaaggaagagagagaattgggtggagaaagggaaaaagaaaaataggggaagaagacgtgaagaatggagaaaacagagagcagaaaaagaagtccaagtagagagtaaggagggaagtcttctgaaaaatagaggtggagaaattctggtaaagatggttgtttgagagataaagaacggggcagaagatcttggggaattttcagaaaggttgagagaggacttcaccagagagtcgccggaatctggattttttcctgattgttgtggacgaaaacaaggtggagtcgcggtgaggaggtgattggaggcagaagtttaattagtattttaatgaattagcagtgttgtttgatttggtgagagaagattggaacacatggagagaaatagagaagcaatgagaacagtgatgacgacgatgaatggattatcgagacggagacggaggttttagccttgagactctgaaccccaccacagatgcaaagcgacccgggcacaatactggtttggcggcttcgagtagaaaaaaaaaaacaagatgggtctaatcatatgaagaacgggttggatctggagctcggtattgggatcacaagtagaacaattggtgttggtttggaaaatctgggtaatacctgttttcttaattcaatattgcaacgtctgacttatacagagcctttagaaccatgtttgcaaagcggaaaacatcaaaatgatagaagaaaatatgaagtctactcattatggggagggtttcaatccatgccagttggagcacccattccggtgactatcacaacatgcggctgcatccttgagaatctcaagttagccaccatgcaatgcactttccatatgtccaaatgcattaaaaaaaagaaacaaaatattccatacaaagcggggttgtcggcaaggagatggagaaatcgtgattctcggaacaaaatgctttatgggtatgtattggagaatttatggaaaacggaatttttaatgaggaaatatccaagttgcatgagatttttttcttctttttgggggacaaaatcatgattccatatgggcagtc

SEQ ID NO: 13477 - DNA, 1839 bp, Vitis vinifera
  Intron number 1 from transcript GSVIVT01024225001 (locus G SVIVG01024225001) derived from phytozome v7.0 (chr-ID chr3 ; pos 24505 to 26343)
ggagaagagcaacgattagtgcgccctgaagaaatgtgagccatgttcttaccttcaaatcgctaaatttagggattctttgtgttttttatggcctttacccactatttggttgccaagaaaatagaggggaaaaggaaggaaagtcgtattaccactcttatcacgtctcttgttctgattttaaaaggaaatcgagaacgaggaactcgagtttacgtggttgaattaagttccggtttctttctttggttttcttcgttgtttaatggctcaaatgatgttgaataagacctgaaagagtttgatcttgtttttatttcctgcattttctttgatacgtacggagcgttagggttaggtgctagccgggtaatttgcgggttcggatcacggcttggtggaaattttagctattttaagtttaaatgaagagaatgaaaataaaggcagagagggttttgagttttgaacaatggatagtctaacacacaaagatttatagtttgcttcccttgcacatagttttctgactaccaatcgcagtatcagagtttaactatccatggctaaagtacaatttatttagagtaattttcatttcttagtaaaagtttctgcattttgtgctgaaatgattagccacaataagatgcgaacatttttagtctcgatttatatcactgtttaataagtgttagcattttttgtacttaattgaaaggaaaggaaaagaaggttgttttcttgtggcttaaatccttctgggttattaataatagtatatattaatcaatttaactgtgttttacaccctatatctaaatgttgtgaacattttagattttgagcaaccaataaccatcaccatttggtgatctaggctgaagattttgtagcaaggagtgaatattttatatatgatcagtgtggcagtgaggccacaacaaagaggttgaagaacacacataaacttccacacaaagtagcacattcaactatttaagtcatatacttgaatgttttatagcttcagaccagtaaggttgatcaaaatttaaaaaattaatttttttaaagaataaaataaaagaaaattaccagcctattggccaccttttcatagactgcaatagcccattggtttttaggagtggattgaagaggtcagctacctcttccatggcttatctctgatctgtcaaagaccagtaaggcaagatattgaaaaacaatatttgagcattcacagcactatacaccaacactgggggatcttaccgagtcttgccgttcttttgtgttgatttccaagaaaatgaatagctcgattctgaagtagggggatgatttagttgagctgagagtgtgtttttttttcttttctttctagggttgtgaacaatgggcagatctgagacctctcagttcattttccttgcctacttgttttgacaaccaaacaacttgtggtttcactgactgtgactagattgtaatttgtttatagtgattttatccctcattttttctctgtgatcattaatcacattaaattggagggaaagaaatgaagttattgtttgattcttttggttcttgtgttgactctggagaaaaaaagagattgagcaaattagtttaaatggttctctttgattcagttgaatggataattttgaacaacatatgtttaagacctagagctttaatttatttttctttcctacattttatttgcaatcaaattgagcattagcataatttgtttataaccattcaacttgtgttgactttgcattattattttttcttttccttttgtttattcagtgatct

SEQ ID NO: 13478 - DNA, 1475 bp, Vitis vinifera
  Intron number 2 from transcript GSVIVT01014571001 (locus G SVIVG01014571001) derived from phytozome v7.0 (chr-ID chr1 9; pos 5305162 to 5306636)
gtttctgtttctgggatacccgagtactcttacaagtaagaattttcttaaatatttttggattcatgcatttatttcttcatttatttattgatatttgtactcacccttctcttctaggaattattttcttgatgttgcgtgaagcttggaatattgcttgatggtagattttccatatttagactgttgaatcatgaaactgggactttagttttttctttcacccctgagcatgcggaagagcggaatgattctagataaggggcttttatcagtaggcctttcattaggctatgtttggtttttggaaagtgcaaagaaaaaaaatgcttaggaaaatgattttctctttggttttgctacgaaaatgttaaaagatagtaaaatataattaaaattattatgaaattttgatatctttaaattatttaatctttatataaaatagttaaatctgtggaaaaagtatacaaaaataatttattaacttaaaatctattttttatattccttcactgttttttttttcttaatacttttcttctctattttctttccttcacattttccttaaaactttctggaaaccaaacatagccttggtgtttggatacaaactaaaaaaaggggtgcttttgtagtgtttttggtaatatgttatataaaaagtgagttttaggttatctatgaatcacttcaagtcattttctatgtttttgaaagtgaatttaaaaaatttgtcaaacatttaatttttgtgagaaagttccaagtatgaggaaacacttttaaccattttcaaaattactccacgggctctcaatcacttttttttttctttatatattattattaaaatttatatccaaaaattttagtaattttcctctaaagtgtttctaatggaagtactactaacaaaagtactacaaactaaaagcactttaaccaaaatcactcttaaatgggtttaaaatatatagcttgggaaaagggagaccatgctgaattgactttgcactgccgctaaccatctggtactagctaaatccttagcatgtaaactgaaagaagagacaaagatgatagttctcttaaatgtggcagaatggtttgaatgatttggaaggggcagaaaaagattacttacagttatgggtatacacagacctctgatattcaagtgtgtttcctgctgtcaaggcttgaacacgggattctttcttgatccatacattttgttactgaaagcagataatgctacttctgcctatcaataaaattcacaattatgtttgatttattgtgaaaaacatctatctcacacaccaagtgctttcccttttagtatgtttgctctcacttttggttcctgtcaatttataaatttcttgattttcttttatatttactgtgcttttggtgatattgatgcagggatctgcaaaaagcgacatataattttacaacat

SEQ ID NO: 13479 - DNA, 5580 bp, Vitis vinifera
  Intron number 2 from transcript GSVIVT01029103001 (locus G SVIVG01029103001) derived from phytozome v7.0 (chr-ID chr1 1; pos 19680836 to 19686415)
ctgccgagaggcaaggtcgaattagggctcagcaggtattcttctcccttttgccctctgtttggtttctgaggaagtgacactaccagcaatcaaaatgttctttttttttttctctctctctctctctttttccactcctgtctttactttatacattgatttgttgaggcttcactagtttatattgctttatgctgaaattttttaagagactcaattatttagaaatctgagaattggaagacggtgctctgattggatgcaaaaagtgttagggagcggaaagggcaaagacaaaaaatcaaattgcattgtttggtttgtattatggaaggaaaatgacatctcatgaaaatcattttaaaatgttgcattacaaattttttaattcttcctttaaaagggatcaaatggggggaggatttttttttttttttttttaatagataagaagaaaaatatatgacacatgggtggaggattgtagaaaaggtttattgagtttaaacatttttctttccttaaaatttttccctttccccaacactctcaatgttttaatggagcctagggaaatgtttggatatattctacaacttctaagttttagttgtgttaatgcttcttgcatacatcttgtgtactttggtgcattctttttcaggtgtttttaatatattttcctgatttggctatcaaaaaacttgtgttattatttgtgtaagcatgtgtgtcagtagatcttgtgatgctttctcatgtctaacctaaaactgaattcagggacaggaaaaatatgggtagaattgaattattctaaatgttatctctagatgttacactgatgcctgaggtttggtattcatttgatgctttaggatgtatctacttattttttcctagtattggttgtagtcatcatcctgatggcaatgatcatgatcgtagttataagaaattgaatcaaagtatatgctgctcctgattttgttagtttgcccaagctgccagacatgcttaaattgtaccttgcagtatttttcttaaacacgatttgctcagctggctggaccaatatgatttaatcaaacttggttgctagactaaatttgattgggtagactagtcaaaccagtaatccatttagtagcgctgctcacttggagtaataggcaaaaatttaatttttttggttctcctgacaagttagtgttagatttaaattctgccgaaatagagagcctggttcttgagccattttggaaaaatgctaagcctgcaactcaatgtggaaaccacatcaacatagatgtagtcaattggagagctagctaaccaaaataaatattagattaataatatgtggataacaaagctattatctaaatgaaacaaaataagtaaatgctacataaatccacaaatccagtctccaaactaaacaaattaaatccaactgcaaccaaaaataactagaacactagccatagttttaaaagatgcacttaaagcactcctaggtccaaggcacaaccactccctagttatagtgtcttgcttgccaagacatgcatcttgttgaagaggcatgcctcggctactctacttttatctttttaaacacttttaatgttgaaatttctaattgtatattttgaaatttatataatttcattacttttttgttaaatgtttattctaagtatttggaattttaaattttttattacttggattaggttttggattatattttataaaattgttacgcatcctaagcctagtttcacttcactgaggcgtgctccttgtattacactttgggcctaagctatattagacttttccacttaggtgcaccttgcgccttttaaactatgacaatagctaaagaatgttgctttattgcctactcataagcattccctacctaatagggaaaagaaaagaatgagtttccaacctactaaataatactagcatgatagagtacatcaagcaatcgctcaacatatattaaatagggaatatcattattctaagcattcttaaccaaatgtatttattttgaaggatatcataattgagcgatatattaaatagggaatatcattatctaagcattcttaaccaaatgtatttattttaaaggatatcacaatttttttaatttatgaaaacatagagcatgtttaggaactgctttaaaaacaattttttgttcttaaaaataaagaattgttttttaaactccaaaaatgtttgttaattttttgacagaaaacaattttctaaaataaggtatttcttagggtttttttaaccaataattgtacaaatttggagaattattgaaaataaaatattatagataaaagttatttttaagaaatatttgaaaacatagaaaacaggttgagaatatttcaagtttcctaacaaacttttgttttaaaaaatataagagaactaattttgaaaattgttaaaaaaactttttttaataactatttgcgaacacactcccaaacaggctcataaattttcagagatctttaatgttttagcattccaaagacatagggcctacttgggaacattttcgaaaatagttgtcaaaaataattctctgatgtttttttagaacaaaagtctttttaaaacaatcttctaaaaaaccagtgaaaataacttaaaacaattaaaacatattctcatagaacatcttgtcttcaaaacaagttttgaaaaaactgttttttgtcaaaaaattaccaaacatgatttcgagtttggaaaacagttttttttttgtttttaagaacagaaaactatgttaaaaaaagttcctaaacaggctatagtgttctcaaaaaatctctagttgtataagtggtgcccaaatatgggatttaaatgatgcatcaattacaagaattaactaattgccaacaagacaactccttgtactaaaaacctctgcctggaactcctagagactgcagcagtacatcacaacccttacctggatatgtgggaaaagtggtagcttaccccttaccgattatggatgaacagataaatggattcttttctcatacgttatttaatcatctgtatttggaactaaattataatatatccccaacgagcagttcaaatatagtacataattgattattcagattacaagttcaagaagaattatttgatatacattttttatcgttgctctagactttctatctgtgttaaaaagctgactcttgcatagtatttcggaaaaagatttcacaaaagaaggaagtcaaactgcagtaccttacctcagtttcttgatgacaaatctataacaaatgcaccattgagttggttagttttcccctagagtcaaattatatattggacatgaaatcaatttgttttcatatatcttctaatcttggggctcaaaatggtcaatatcaatgaatgtccaaaacctctcctaagtcaagctttttacccaattagtggcaaacaaaaaagtcaaaacaaataacatgagacggttgaggtggccttctaaagccttgagccttgatcattgtaaggtgtaggagtaatgaatgatcagccaacccttatttctcaattttccagtggcctttgtttttctcacggattattggctggaattgcttaggccttcctaggaatgttttagattttatgactatcgccttctaggtaacactaggagtagctacgcagcatggtaattgaatgatttggttagggagaaatttcagttttaggatagatggaggactaaggagtcactttgggtgtcatgattctctctctcctctctttggacttcagctactccagcatttcaaaggatcccgatgagtattattatgttggactgaagtttggttcggcctgttctggtagtagaaggattgtggaagttatcccagcgtggagacttctcctgagaggtacctcaagctctacttggatatatttttgccagaaaatcagcataatcagggattggtgtattcaaagctcattgaggatacatggtcaatgccaccttctgacctacaggtgctaggattggctattgagcctgagctccttgctttattggaaggctaacgtattgcaaactcattagtcgtcaacaacctcatggtggagggagacttggtaattggatttgcgattgcacaaatctcttgactttgcttcaataaccttatggtgcataggccatggaaattagatttatggttgcacaaatctgttgactttgcttgagctttgaggtgttccttcctttggatccctgggtcagccaaccacatttcagatttcacaccttgagtttgcatcttttacttttatgagcttagccctgagcttgtattgttttgacgttgttattcttttggtagatagccaattcttcttgtacttttattttcattttctattaaacaacttgtttgtttccaatccttaagaaaaaaattagtatcattttgtctgagaggttaatgtctcttgattgttggctgaagtatttgaagaaaccttttgttgaacttgctgtgattggtttttcagttctttggtatagcaactataatgaggttgagtcataagaatatatggtagatacattggagctgacagatgggcttttataacattcgttaatagcattttctttgtttcctttaaaaagggcatttgggtggagaatgtgccttccaagttagcgttttttgcgtgggaagctacttgggggaggatccttactattgataggcttcaaaagagaggatggcaaatccctaaccggtgttatttatgtggtagtgaagaggaaaatgttaatcatcttcttatacattgtacagtggctagtgtgttgtgggggatggttcttagcctgtttggagcccagtgggtctttccagaatctgtaaaggaggtgattatcagctggaagggttcttttgtgggcaaaaagaggaagagaatatggagatccataccgttgtttattttttggacggtgtggaaggaaaggaatatattagcatttaggggggggagctagttatacagaaaattaagtattcttttgtctgtaatatgtgggggtgggcaaaattgtataatggtgcggagtcccggtcccttataggtttcctggagtggatagcctctagttgagggctggtggattttttgttgttttttggtcctttgttgtgaggcctttgtcgcctcgtatactccctgtatgcttcgcggcgtttgcctttgctaatatattggtgtttatttatcgaaaaaaaaaaaaaagcattttctttgtttcctttaatttagttaagcattttactttctgttttggtgttgttgatcagtgatggaataatgtgcttttttttcctgatcatttggcttttatttccagcaatcttgttcttgctgtatttcatcttctgtaaactgaatttttttcaagtatttgtaggctttgaggaaagcaatagtacaacccaagtctga

SEQ ID NO: 13480 - DNA, 10133 bp, Vitis vinifera
  Intron number 12 from transcript GSVIVT01037358001 (locus GSVIVG01037358001) derived from phytozome v7.0 (chr-ID chr 6; pos 15123310 to 15133442)
aagaagcaaccatttcccttgcttttgcatacaaggtaactcaatatttcaactctcttgtggttagatagggtgttcatttcctcgttctcatgtaatgccaacttattggcaaggaaggaaaacttcttattttcttgtgtacaacaaatagtgcatctccatcaatattggttgcaaatcataaaagtattttgatcatgaattttgttgaaaaatgttttgacttttttaggagctattttctaggataattagtggtgataagtcggtttggttacttgtagtcttgtttttctttgatgggaggattcctcatccttctaattgtaccttctttttatcaatatattcctttgtcgtttcctatcaaaaaaaaaaaaaaaaagtctgtttggtagacctacaaatcatggatagttatctcctattttaaattagtttcctcttccaagtaggattactattgtaataaattctacttctatatgtttgtaaagtctatatatattccgtatctgttgtattcatttttttttttctgtatcaatagccttttaaaacactatatagcatgattggtcatttcaatgaaacttgatattggccacgcatacttttcttttcaatggaaaaatagatgtgggatgccatggattcaaatggggaaaacttggctcaaaattttgggataagaactaaaattcgtgaaatgaaatagggcagccaaagcgtgacctaatattacagtctgtgaaggtgtctatgggaggaaccaaactactattatgctgttgaatggcattacaccaatgatagtgcttggtataagaagatgcttgaaaaatatagggcttagattagatgaagctaagaggggagttattggcaagggccctctttcctcctatccgtggactgtttgctatattaggagggaagagagcaagaggaatgtgatgattggaggacaacaagtcaactaatcaacagaaaactctgctttgatttctgtaacacctaagcatgccttgacaagtggatagaaggctttcaagaagggagaacagaggagtgacaaagtttggtgcaactattgcggccagccaaggcatactagagagacacgttggaagcttcatgacaagcttgcaaattagaagaacacaaaattttgcaacaagaacaatcatactttcctagaaggacaagattatgtagtgaactagtgttcttcttaatccattgaggatgaattcatgttgtaacattgtagattcgagcaccctaaggatgaaatcatgttgtaacattgtagattagagcaccttagttttccttatttggcaaaagttgtttcctttgttattcaaaataagtctttctttgtatcagtgcaaaagttgtgaattatcaaaacatcaaagagctcattttccatcatagcctcatgaaactggaccatttgttcttgtgcatatagatattttgcacccttcacatgtgactaaaatttcgagaactagatggttcattacttttattaatgatcacatgtctttattgaccctatttgcttaaagaaaaatctaaggtgaaatttccattccatggtaaaaaaaccaatttggaatacttctaagaatagataatgggaatgagtaattttcaaatatcttggggatttttttgtcagaaaattgagttgttcaccaatcatcatgtgtctatgtaccataacaacatggtattgctaagagaaaaaagctaacatttattggaagttgaacgctcattaatgttcaccacttgggaagcagttctcttagcttcctattttataaattgcatgcctacacgcattctgaactttcaaactcctttgagtgcattcatagaaatttatcctcaaactaaactctttacctctctcccactcaaagtctttggttatgtagcctttgttcatatgtataatcaccttagaagcaaattagacccaaaggttgtcaaatgtgattctgtgtgattttcacctactcaaaaagggtataagtgctatgatcctgtatctaaaaagttgtttgtcattgttgatgtcacattctttaaaaagaagcctttctttccccaaacatcttttcaatgttggggggggaggaggaattctagggaagatcaattttgggaaaatctttctatgcctattgttcaaacctcgagtgtctaacatgaattgccactaagggtgacaaagtttgatacgattcactaacatgactcaaatctaacatatttttcatgggtttggtttcaacattatcatgttttgttcatattatgagtatcgtcgtgtttggatcgtattcgtgtcaacttgaataacctatttagtaaataagttgtttttgggtcaatctgaaacacgaatttgacctaaattgacctatttaataattatgttgattaacttgatcatgactataacctatttaactcacatttgattcatttaaaatttgattttgaataaataggtcaattgaaccaacctttgggaacccaatatccaagactatttagagtagtcttggataaaaacattcctatttctttagttctcggttctactcgtcctttctcttggaatttaatttttcgtcgtaaccttttagattctgagatagaggacttagaaggcctcatgtggtcacttgatggattgcatctatctccttcggttccagatgccagattttggccattatcttctttagggcttttttaagtcaaatccttctttctagcattatctcaattttctggatctcctcaagtttttccttctaagttcgtttggaattctcaagttcctttcaaagtgaagtcctttgtctggttagtggcacacaataaggtgaatactaatgacatgctacaagtgagaagaccctacaaagcccttagtcctgatatttgtattctgtgcatgaagcatggggaatcagcagatcatctttttcttcattgttccttgacgattgggttgtggcatagattatttcagttagctaagatggattgggtccccttgaggagcatctttgacatgatgtccatcaaatttaatggttttggttcatctaagagggggatagttttgtggcaagctgcaagcatcgctctaatttgggttgtgtggtgggaaagaaacacgaggattttttaggataaagcaaggaattcatagtatctttgggactctattgttttccttgcttctctttggactttttgttccaaggtttttaaggggactcctcttaatgtgttacaacttgattggttagcggtgtgtactccataaggaatggtcctttatagagagttcgcttgttttacagtgtaatttcttgtagtttagttttctttggcgggaggatttctcatccttctttttgtacttctttttatctatcaatatatctctgtgttgtttccaataaaaaaataaaaataaataggtcaattgagttctaaacatattggtttgagaagttaatcatattgattcaaacaagacctaacttgatctgattataaataaatcctaattactaaaggggttatatgatgtgttacctatttaataattttgtcatattcgagttcatgcttttaaaccaatcattatttatgtcgtgtttgggttggctatttaatggagtgcctgagttttgacatgacacaaacatgacctaccgacatgaattgcaatctctagtttccactttcatctcccaattctttagtgccacaaactatgattgaaagacaggttgtagatgaagtccaacgccttgagcttcatgtctattctaggcaacttaataaagaaggacagaacatgatcatcctctatgagtgcacaatcattacttagatccaaatgctacaaaatagaagttataggtacctctatcacttgataaattgttgaatgaatattcttatatatcttaagggtatttatacaaagtacacaagacaaatttaagatagccgattacacaaaataattgacaactatatagaataaaaataaatcataactacacaatcagttgtacacatacatcacactgtacgcagatttgtacacaactgactctctctttcaagttggtgcatagatatcgcacagtcccaactttgataatgatgcatagaatggacactagtaacaacatgagttatcatatccaccataccttgaggtagactttctatccaatctagatttgacaaacttaacccttaatatctagatgtccgtgtttagagaacataatacctttgcttagagaggacttctaggctgggatataatttaccacattcatgtgtcggtcactcggattatgtatgaattgacttacaatactaattgcatataataagtcaggtctagcgtgggtcagatagattaattttcctactagtctttgacatctttctttgttcataggaatctaattcctagtaaatgaacaagccatgatttatctcaatgggagtatctataggttgacaagtggagttaccaatttcatctaagagatctaatgtatacttctgttgtgagaggaagagtcgttgcttggaccaagacatctcaatacccaagaaatattttagagcacctaagtccttcatttcaaattccttggccaaatagctcaagagcttctctatttttgtagagttaccacttgtaacaatcattttatcaacataaacaataagcaaagtaatgttatcaccatctctcttataaaacaaagtgtaatttgtcattgcttgtttaaaaccatactccttcatcgagtagcttaacctaccaaaccatgctcttggcgaccgcttcaatccatagaaagccttttctagcttccgtgccttgccttcttttggtgtaaaccccagatgggggtccatgtacaccttctctaacagatcatcatagagaaagacatcttttgcatcaaactctcttagttgccggtccagattgaccacaagagagagtatgactctaacaatgttcatcttggctatatgtgcaaaggtcccttgatagtcaattctgtaagtttgggtgtattccttagcaactagtctaactttatacctgtcaattatcccatttgaattctcctttactgaaaacacccacttacatcccactgttttcttttcctgagggagctcaaccatctcttgagtagagttctttgggagagccttcatttcttctatcatagaagacttccacttaggatcttcaagggctttttaaaaatgactaggaatagagataaaggataactgaagagcaaaagcaaggtgagtcttagataggcgatgagaagagataaaataaaaaatgggacaaacaacattagaggatgattttgagaaattcaacctatcaagctctttacaatcacaaagaggatatctcctaccttgttcaccatcttatggattcaaggtagttgtttcagaagttaaaggtaaaggaacatgtaccttaggattagtttcgggaagagtcatccgatggcatggtagcatcatcaagaggagtattggagcctagagggggtatgacaataacatctttgttcttacttgtataaccttattgaaataatcgagttggtcttccatcccttcttttctcagatgcaaactcagttgccacagggttgggagtatcaaaagactccccctttctcaaatcaatcgaatcttccccctgacttgaaatccataacctcttctcttttaaccataacatgtcctcttccttaccactaatctctacctgaagaggaactaaagatacattcctagaaaaaataagactccctttcacaaaattaaacatccatatagacatagtatttactagtaggatgaaaacatttatagcccttttgggaattatagtaaccaacaaagacacatttaagagcacgaggatcaaacttatccctttgatgagtgtatatgaacataacatacaaaagaaaaaactttaggataaagattcaagtagaaggaatattgtgaaaccatgatattattctcaaaggagtttgataaccaatggcatgaatagcaattcatttgatgagagagacaacaatcatgacaacctcaacccaaaaacattttagaacatgcatagtaaagcataaagcctgagccacctctagaatgtggcggtttttatgctcttctatgtcgttctattgtggtgtgcatgtacacgttgtctggtggaggattccattttctttgaataaatcagcaagggactaattcacaaactcatgaccattgtcaaagtgaaaaaccttaacctgagtattaaattgtgtggcaatcattttggaaaattgggaaataacatgtagaacatcattcatagacttaaacaaatatacccagctcactttagtacaatcatcaataaaagacacagtatttatgattttgaagcagaaggagtagagaaaggaccttaaacatttgtaaaaataagggtaaagggaattggacttttattgagacatatgttgaaagacacaatgatttttaacataaatgcattgctcacatcttaaactaaaaactaaaatatttcgaaacaattgaggaaataagcgttctaaataagaaaaaaatgggtgacctaattgacaatgccataaaagaatcttttctctaccagacatctctcttgctacttgaaaaacacagttagagtcatattgtaactcctttgccccttccaagtagtaaagacctccctcttccctaccaataccaattgtcatctttgtaagaatgtcctaaaacacacaataagtagaatgaaaggttacaaaatatttaagatgtttgataatctggctaatagaaagaagactattagagagactaggcgcaagtaagacaaaggacatggagagtgtgaggaaagtgagatattctcagctcctgaaatcagcataggagtcccattagaaacttgaacaaacttaacaagtgagggcattagagagttaagtaaggaagaatgagtaatcatatgatcagtggtccttgaatcaataacccaagtgttagaagtagtagaaataaaggccaaatcagaattaacttcttgagaagataattgagagacctgagaagcagaagctggaggagtagcgttggtgagagcaaacctaagctgatttcttgttcttcctatcagcttgtttacgcttgtaccactccagataaccatccatcttccaccaaacatctatctatgtttggtgctattgcaatgagtgcaaaagcgagaaaaagagtcagtagagggagtaaaaggtgttggtcgtattttattcttatggacagccattgcagaagccttgagtgatcttctgttcccatggtgacctgcctctgcccttaatgatggactagtgaataggcttcctctagacttggtaaaagagaggtggccaaaacacaatcactaacttgatccaaattgcaatcaagacctacaagaaatatataaactcgatcctcagcagtatgcttcctttgtttctcaatattggctacacatgtcatatcattgggtctttgataatcaagctccatgaatatcaagtttaactcattgtagtattttgtgagagtactgccaccttggcatgattgaaatgatttcttcatcaattcatatgcttgagaagagtaagagacatcaagatagctccttttgactgtatcccatacctccttagctgttctaaactgcatggagtgtaacatcagttggttagtcatggaattgatgagctaagactttactaaagcatcttcggccttcctttcatcatagtttggatcatcctttgcaggtgcaaccttccttcctgtgatatattccttcttctttttgccaataatattcattttcaaagtttgagaccaaacacgataattagtaccatccaacttaatagaaattgttggagaggtagtctcatgattggtcaccatggatgactttttgctattagaaatactcatttattttttgcaaacattatatggtaacagagagggtgaaaaagaatggaagtagtgttagctaggcagtaccggaaattctctgctttctctttgataccaacttaataaattgttgaatgaatattcttatatatcccaagggtatttatacggagtacacaaggttattttaagatagccaactatacaaaataatcgacaactatacaaaataaatcacaactacacaattggttgtacacaactgtacatcatagttgtacatacaactgtacatcacagttgtacacgcaactgtatattgctgactctatccattatagtgcatccattcttgaaaaaataaatgaccttgatgtgcctatagctcttggaaaaggagctaggccatgtacttttcattgcattttaaagtttgtcttactacaagttgtcatcttcttattgagcctttactataagaacatagaaaagagaaggaaactcaaactaacctagccactggagctccacttgaatactaggattgacgtcatttgctctttgaatgaataatttctgtaactcaagtatcttcatctgtttcaagcaactcaaaagcatgccttctcaatgtgcccttcatttttctcccaaaacctttctccacattctctgacaaagatcttctgcagattcaacagcacaattaggtgctcttggctccattttgtcattctcaaccatgtttctccttagacaccttccttcattttgaatgttttcctttgggttgcacaaaatctttattccaggctcatcttctcacagggtgtgaagaagaatttcctgtattcaaacagattcatatcttaaatagaccattaagctacaatttcttatcaattctagattacattgagtgagcatattgtctatgccaagattttgatggctggtaatcagaaacacagaaagcttaaaattttgtagtaagtgctgaccaataggcaaatgggttgctcgaagaaatggaacttctaggaatttgtgagctaactttcttgtacctgctgctatatgtttgctgcttttaatgtctggttgatgttctgacttcatcttatttttaaacccctttttcatcttgtaagcctcttgaactgctgcaccattcatggtatgaatcatctagaagctaaactcaaagagattagtgagtttaatccctggtaatatttgtgttatgccatggaaattctatgtttgttaccaactacatacttatgcatatttcttggctggaaattttgaccttgttatgaaattcaattcttgactggaggaacaattaagcacatgcatgtggtagaggaatttagggataagaaagttgcataactttttgttcattgaagatgttctcatgttaattattggatgaataagaaggggctggctgatgaattttgttggacttacaagagacaatgatgttggactctataggatgcaattgtctctgtcatgacaagtaatctatccttgtagtttgcatcatttgcattctcacattcaaccgtggaagttgttcagcatgagtactagttctgttgactctctcccttgttgacttcattttgttcaccttcgacagtcattattattatctagattggttgggggttacaaatagttttaggcttctgaagaggatattgcttctctaaccaatttaaggtccatgcctttattctctgtcacaagttcataatatgatccttaagtttaatacttacactggcataattttgctcaattctaaaaattcaacactttatttacttatgcacttgacctatggttcaatatgcatctggtcttaaaaggttttatagagttgagtttcataattacttctattttattggtttcttatctgagcaccagggtgcaccaacaactgttttaaaggatttggaagt

SEQ ID NO: 13481 - DNA, 31355 bp, Vitis vinifera
  Intron number 6 from transcript GSVIVT01030857001 (locus G SVIVG01030857001) derived from phytozome v7.0 (chr-ID chr1 4; pos 17727383 to 17758737)
gtcggccatttgccttaccctcaagtcactctctcttctttctcatctacctccagtccattagctacttttaaaaacagttatgaaaaataatttttaacaacatattttgaaaattgttttatgatattttgtaaaataaaagtatatttgggaacctaaaatgtctttaacatgtttttaatatttttaaatgtattttaaaaataattttacgtttacaattttatttttaatcattatatatgtttgtataattgatttttaaaataagtgataacaattaaaagatattctttgaaaacactctattttatattcttgagaatagaaaatagaaaacactttttggttgtcaaatatgtttttcaatttttttgttctaaaaaatagaaaatggttctcgaaaatagttgtcaatcaagcccttaccctctcccaaaaaaatggaagcaaccaccactaaacatattttattctttttaacctatgagataagctttaataaaacttggtatggatcaaaattattagaacgaacagaattttaagccctatttggtaactatttggtaacaaaaaaatctatttctgtctaatttatgtttctttaaatagcaaacattttcacttgctttttttaaattgttttaagaagtgcttacataaatataaagaatggttagaaataaaacaatatagctaaatattatatttaaaagcaaagaaaaaaattaacaacatttcatattcttgcatatattttttgttttataaaacatgttctcaaaactattttttaaaaacactttcgaaatagaattatgatatctaaaaagagagaaaagtgaaaggaaatataatgagatcggtcttctttcaataaaaatgaaaagaaacaaatccatcaggcttaaggctaacttggaaaacaaaaaagttttcaaatacttttcaaattttaaaactttgcttttaaaaataacttcctaggctcgccattggaatggctatattgttagattccttaattgtcgggtaattctacacttaacttttttttttttttctattgaatgattcttaaaaatttgatcttcgaaatttaacaaatgaggctaacccatttgaaattatctttgaaaaataccaaaggcatgtatcaggagcatcaatgaacccaacaagaagcattggaccaatttttgtgaagcatatctgttgaggttttatccaagttcctcaataaaatgagatcgaacaccaatttaagaaaacaaagaaaaataataccaaaaattagaaaaatagagcaagactagcaaaatttacgtggttcagatccaagatttgaatcctacatcgacggatcaagatcacctccaaaaatccattaagaatgaaccattttacaccctctggaatctctgagaattttcaagctctctctacagtacaatgaagaaaattcaaactttgaaatcctctcacacttgttctataattcagaaaactcacacacacctctgttctgttttttttctttcttcacccttttatacaagtacatggaaaaactaaacgaaacaagtatgctttcagttagttaatcaactaactttgcttacgtggccaatcaatttttggaccaccaaattccacattctccacattggttcaaaaattgaatttggattctttggatgaagatctgacttaaacattagttgcacattacctggactaattccaggcaatacctgaatttgcttactggtagaactttagttgccatgtcgactggattgtcaattgtggaaatcttctccagcttcactgctcctgagcttacagtttctccgatgaagtgatatctaacattgacatgtttggtcctttcatgaaacacgggatttttacacaattgaattgcactctaactgtctgaaagtatttccactacactattcagcactccaagctgcttaacaagtccttgcaaccagagagcttctttcatggcttcaatagctactatatattaagcttcaattattgaaagtgccactatcgattgtagttgtgacttccagctaacaggtcctctaaataaggtgaaaatataacttgtagtttaccttctcttatcaaaatctcctgcataatctgaatccacataacatgtgataccagcaccctctttagaagatccaaacttcagtccaacaccaagagatcctcttacatattgtagcaaccgtttaactccatttcaatgttctctacataggttaaccataaacctactcaaaacacttactgaatgagcaatatctggtcgtgagcacaccattgcatacatgagtgaccctatagcattagcatatggaacataattcatcttcttcctttcaacttcagattgaggacattgtgtcattgacaatctgaaatgtcctactaatggtatacttacaggttttgaattcttcatggaaaatctcttcaaaaccttttctaagtagcccttttatgacaagaataaagtacgatcctctctgtttcttacaatttccatgccgagtattcttcttgcattctcaagatccataatatcaaattctgactttacaatcgtcttcacctcttgaatttgtgacttatctttgcaagtcaataacatatcatcgacatatattagaaaaaacatcatcagacttccttgtaacttcttataatagaaacaaccatcacaactactccttttgaaaccaatctttagtacaaaggtgtcaaaccttttataccattgtcttagggattgtttcaatccatataaggattttttaagtaaacacactagatgttccttttctggctcttcaaagccttcaagttgagtcattagaattttttcttctaagtctccatgtaaaaaggcagttttaacatctagttgctccaattcccagtcaaactgagctacaatggacatcaatactctaattgaggtatgtttcaccactggagagaatacttcggtgtagtcaatgccctctctctaagtatatcctcgagccactaatctagctttaaaccttatgggttcattctcaatggcaccctgtttccgcttgaatatccatttacaacttaccacttttttatttagatttctttctacaagcacccaggtctgatttttctgtaaggattcaaattcttcactcattgctatgagccatttcattgattctttgttgtttatagcttcctggtaaaagagtggctcactctcttcatactccatagcagtcaatagagcaatcaaatctgcaaaactaaatctgtctggggtttttatgttcctcttagctgtatcccttgacaaaagataatcaaaatcagcttcttgtgagttggttcttgcaccaccttcaacatttgaacctgacaccttagtatattttgtctctaagccaccatgtgctaaattattttgttgatcatgaccatcttgagatgataactccacctcaaactcaaaatggtctttttcaagtgtcaagctcctatttttcagaatatttctctgtacctacagtgttagttctcataaaaaacatttcattttcgttaaacacaatatcacgacttattattattttaacacctggagattccttattccatagcctgtaacctttaacaccctctggataacctaagaagatacattttattgaccttggttctaattttccttcactttggtgaacataagctgtgcacctaaagattctaatgtgttcatagttagaaggctttctaaaccaaagctcttctagagttttaaagtccattgcactagatggagttctatttactaaataacaagttgtcattacaactttaccctaaaaatgtttagataagccagaactatacaacatacaccttactctatctaacaatgtcctattcatcatctctactaggctattttattgaggtgtattccttactgttttgtgtcctaaaataccttgatttttacaaaacatttcaaattcctcattgcaaaactctagcctattagttgtccttaacacctttactcttttattagtttgattttcaactaaagtcttccactccttaacctttgttaagatagtatgttcatctttagtttttaacaagtatagccaaacttttctagagtaatcatcaatcaaagatagaaattacatgtttccaccatgagtagagactcttgtaggcccccataaatatgaatgcacatattccaatacatcctttgactagtgtattgcaactttgaatgccaacctatgttgcttgccaagaatacaatactgacaaatatcaatcttgttgatgctatctccacacaataggccctatttctgcaattcttttagacctcgatcacttaagtgaccaagtcttctatgccaaagaattgttttatcagttttagttcttaacactgatcccactaaacctttcaatgtgtgaccttctaggatatattagccatttctcttctgacccttcatgaaaaccatggcaccttttgaaattgttaatttcccattttttgctttgaagtcataacctgattcgtctaaagttccaagagatattagatttctcttcaggtctagtacgtgtctgacttctttgagagttcttgtcattccatcaaacatgttaatagccaccgtgccaattccaaccacactgcaattcatgttttttcccagtagcacctttccactattaacttcttgataggatgaaaaccaatttcttcttggacacatatgataggtgcaacccaagtccaatacccattcttcatgattttgattcaatgtaacaatgagtacctctgcactgtcataaccatcatctataatggtagcacttccttgtgcttaagtcttttattcttcttgtttatctaaacagatacttcttttatgtcccatcttgttgcaaagatagaatttgatattcctataatctttcttgatgaacgtgattttcctcattttccattattatttttattctgaggtcttcctctagcagttaaactttcaccactgttagttttgtcagaggacttcatatccaacaccttaccattcaaggcattctgaacatcatcaaatttaatggcatctctaccatatttcaaggtttctttaaaatgcttcaaagatttaggtagagagtttaagagaatgattgccttatcttcatcctccaccttgatatctaaactctctaaatccaacaccaatttattaaactcatctaaggtatcatcaattggcttggattcttcaatcttgaaaccatataaatgttccttcggataaatgcgatttagcaaagctcaggttctgtacagttcttccagctttttccaaaccccaacaacagttctctcatgagatacttttcttagaacctgatcaaaaagacttaatatgatcgagttgtaagcctttctttgaaattcttgcatttccttttcagtcacactttctagaagatctttatcaggcagtaaagccttttcaatgccctgttgaatcaagatggtcttcatcttcatcttccacaacccgaagtcatttctgccattgaacttctcaaaatcatactttgtagtcgacattcttctttctctgttcttgatttagctctgataccagatgttgaggctttatccaagttcctcaataaaatgagatcaaacaccaatttaagaagacaaagaaaaacaataccagaaatcaaaaaaattgagcaagacaagtagaatttacgtggttcggatccaagatttgaatcctacatccacaaatcaagatcacctccaaaattccactgagaatgaaccattttacaccctctggaatctcttagaattttcaagctctctctacagtataatgaagaagattcaaactccgaaatcctctcacacctgttctataattcaaaaaactcacacacacctctgttctgttttctttttttctttcttcacccttttatacaagtacatggaaaaactaaacgaaacaagcatgcttttagttagttaatcaactaactttgcttacgtggccaatcaatttttggaccaccaaattccacaatatctatataggactttggatctatatatatggcccaattattggagccattgcaggaggacatgcctatgatttactctgatttactgacaaatttctcatttagttaaccaaaattgggaacaccctccaagaataccaactctacttcctattaattcttcatgcatggcttgttccttttgtttcctttactggatcttcatgtatttctctttaaatttctttgttttagttgtaattattattaaataattagcgattcatccacagttgccatttcagtgaaaactagtgcgacttcataagtcacatccataattgaagacaagtaaacaaataaaattgaatttgatggttttgaccaataacaaataattttaaagttatgcttggttgtcaagaaaaaatttaaaaaaaaaaatgtgaagaaaaaaaaaagcaaagaaaaaaatacaaggaaaaaaaaggtaaatgaaaaaaaaaacatacatttaaagttaacaaattatttttatatgatttttgaaattcatttcaattatttcgttccattatatacatattaaatcattttaaatatataaatttctaactaattttaattatattttattttcttttatattttctcttattaaaccaaacacaagaaaaaccattttctttaaggtaaaaagtattgaaaatttactctacttgaatataattcatttaataatcatattagaattacctaacacgagcacgagtaaacacaacataaccctttcttttctttaaattccataaaaccaagcttaaaagtaggaattgaaaaaaaatttgatttgtaaattttccctactctggtatgaattaaaagttatatgatctagtttatgcaatactttggagggaggtgtttaaaccttttagccaaaaaaattaataaattaaattttttaactatctctttttaattttggaagcccaaagaacaatcatcacaagacacgttagattttttacatggaaaaccatccacataacatgcagatgtaaaaaccataagattgattacctctaatcaccaacccactatttaaaaatacaattcatagatttacctatctaatgtcatccacaagtcttactctctaacacctacattgaacttcacatctacgacgcaacaccatacattcccctagtggattttacctcaacgcctaaagggatgcaaatctccttctcaacccaaagcatctgaacataaacgtcttgagagcttggagattggagaagactaattaggtttttccaatattcgtataaaaataaaaaataaaaaataaaataaaataaaaaactttttaagcaaggtaaggatataaatacctactggactcaaattagaattttgaaaaacaaatttattaataattgtaaaattaattcaattataattgtaaaattaatctaattatgtaaaattggaattctgtcattagtgtttgaaggctcttaaaagttttttaaaacatttttactcaatttaaaaaactttcaatcgagtataagctttatataaatcctcttagtttttcctggacctttctatacttatctatgtcatttcaattgatcatgcaataaccttgagttttcaacggagtgtaagacacacaatctagaaatgtattaggtcaaaatgaatggaacaaaattatcaatttcaattacaaagcctaatgtactgacaattcttaatattaaactttttaagtaatgaaattataagcgatcaattagtatgagaaaaagtgttgagtaatcatcttaaatttaattgttaaagaaatattttttgtagttggtttattataaaaataataataaagaaactcgaatataattaaaattatttacaaacttattaatttaatttttatatagaaatttattcattttaattccattttttattttttatttttttctatgttattgtccatgtattttttttcccaaagcttcaagaaaccaaaaaatggcctaagagtggataatgaaaggaaatagtacagttaagacaaagtccccattcctaccatctaaattatatgagcagcaaaggtacaagaaatcggacgtataatcgatgagtacccataaaaagttaagatttgttgacacaaccattattgttcctcattagaaataggaaaaaaatttaaagaagtgttaaaaaagaaatacgaacaaattcctaaaagaaggtatgtgattgttagtttttgggcctaaagccattgcccagaccttcttcaatcttgagatatcttatgccacttcatcagcctttcttgccattgtcaaagaaagaaacagaaaaatctagaaactatcaagattttgttattatttaatttgctggcatcttttatggatgattcagaatgcccaaatcatcagttctaacctgatctttttggaagcattaattaattaatttcttttgataatttttacttattttatatacctttttgaattttttttagggaaaataatgtaatcatacaccaattataaaaaatatgagattttagaactattgtttgacatcactattgtttcataattaacctcaaaagtaaaggataaagtacacaccactttaatatcatctattaataagtacatgtgtaatttatttttattatttctctcacatcaatatatctctcttaccactcaccacattcctatttttttttcttttttttcctctccttttcctctcctgccaccatcatccattgtcacctattataatttttattattatttttctcttttccttttatattcttttcaatatgctcatgtattttctcataaaacttctttaattttaatttttttgactttctaatttctccatatttattgattttaattattttttgacatattaaacttaaaatgataatatataataaatagttaatataacaaattaaataaaaatgaaaatatataatggaaaaaaataaaaattttatcccacaaaaaatatacttgatgattttaaatattaattataataatacattttataagttaagctttaaattttaaaaatttattttattatttagaagtttatgatataagagtttttttcatattaatattaaacaaaagatttatttattttttaaattctatcacatgtaaaagtaaaatatcattgtaatactattttattatttgtattatttttcttttaattttcattttaaatttatcatatcaaaatcacaataagtgatgatgcttttatcatttttcttatgattttaatttgattatggatcttttttttttgttaaaatatttaatgtttaattaaaataaaatataaaagaaaatatatttttcataaaaaaaaaaattgtatttaaccttttatattaatttcataaaaaataggtacattcttaaaaaaaaaaaaaaaggtaaattcatgcttaggggaaccggaaacactatcatacttatcatggtgtatatattccttttgagccctctataaataattggaggttctcgcccaccccaaaaacgaactttggaattagaggaaccaagaccactatctccattctcatggttcatatattcttttggggaccctcaagaaggaattagaggttgttccccacctggaacgaacattggaacctaaggcacatcctaaaaacaatttggtacatcatttacaaaatttagtacatttttcacaaaatttggcacatccttaaaacaatttggtatatccaatccatgagctatcggaacctctaaattattacccatggttcatttatttccttagggatctttaggaagtaattagagatcgttccctactctgaaacgaactttggagcgctaggtacatctttaaggaaatttggtatatcgttaagaaattttggtacttccaatcctcgggctattgagacccctctttatctttccatggtccatattatcatttaaggacccttaggcaatgattgaaggtcattctccatcttggaacaaactttagcactcttgggacatcatttataaaatttgatacattctttacaaaatttggtacattcttaacaaaattcgatacattcttaacaaaattcggtacatccttcacaaaatttggtacgtccttaaaaaattttggtacattcgatccttgagctaccgggacccctatcttattacccatggtctgttcattcctttagggatctttggaaagtgattggaggtcgttccctactccaaaataaactttggaaccctaggtacatccttacgaaaatttgatacatccaatccttgagctaacaggacacttatcttcctttctatggtccatttattcctttggatagccttaggaagtgattggagtttgttcccctcttcggaatggactttggccaccttagtacatcctttacaaaatttggtatatcctttatacaatttggtacatccttaaaaaaatttggtacattcaattcttgagctatcaaaacctctatcttattacccatggtccctttattcctttaggtatctttgggaagtaattagaggttgttccctacttcgaaatagactttggaaccctaggtacattcttgagaaaatttgatacatccaatccttaagttaataggacacatatcttatttcccatggtccattgcttcatttggagttccttgggaagtgattgaaggtcgttcctcacttcggaatagactttggcaaccttggtacatcctttacaaaatttggtaggtacatcattcacaaaatttggtacatccgatccttgagctagtgtgacccctatcttattacccatggtccgttcattcctttagggatctttggaaagtgattggaggtcgttccctactccaaaacagactttggaaccctaggtacatccttacgaaaatttaatacatctaatccttaagctaataggacacctatcttcctttccatggtccatttattcctttggatagccttaggaagtgattgaaggttgttcccccctttggaatggactttggctctcttggtacatcttttacaaaatttggtacatcctttatacaatttggtacatcctttacaaaatttggtacatcctttacaaaatttggtacatccaatccttgagctatcaaaacctctatcttattacccatggtccgtttattcctttagggatctttggaaagtgattggatgttgttccctacttcaaaatggactttgaaaccctaggtacattcttgagaaaatttgatgcatccaatccttgagctaatgggacacttatctcccttcccatggtccatttctttctttggaatcccttgggaagtgattggaggtcatttacccaccttggaatggactttggcagccttggtacttcctttataaaatttggtacatcttttacaaaatttgatacatccttcacaaaatttggtacattcttaaaaaaatttggtacattcagtccttgagctatcgaaacctctatcttattacccatggtccgtttattttgtttattccttgaggaatctttgggaagtgattgaaggtcgttccctacttcgaaacacactttggaaccctaggtacatctttaagaaaatttgatacatccctttcttgagctaacaggacaccaatcttccttcttatggtgcatttcttcctttggagacctttgggaagtgattggaggttgttccctaccccaaaatggactttggcaccattggtacatccttcacaaaatttggtatatccttaaaaaaatttggtacatctaattcttgagctaccgaaatctttattttattacccatggtctgtttattcttttagagatctttggaaactgattggaggttattccttacttcaaaacagactttggaaccctaggtacatccttgaaaaaatttgatatatacaatccttgagctaacggggtacccatcttccttcccatggtccatttcttcatttggagtccctcgggaagtgattggaggtcgttccccaccttggaacagactttggcaaccttgatagatattttacaaaatttggtacatcctttacaaaatttggtacattcttaaaaaaaaattagtacattcaattcttaagctatcaaaatctctatcttattacccacggtccatttatttctttagggatctttgggaaatgattggaggtcattcccttctctgaaacacactttgaaaccctaggtacatccttaagaaaatttgatacatccaatccttgagctaatgggacacctatctttcttaccatggttcatttatttctttggacaaccttaggaagtgattagaggtcgttcctcacttcggaaaggactttggcccccttgatacattctttacaaaatttggtacatcatttataaaatttggtacatacttcacaaaatttggtatatccaattcttgagctatcgaaagctctatcttattacccatggttcatttattcctttaggaatctttgggaagtgattagagaatgttccttactttgaaacggactttggaaccctaggtacatcctcaagaaaatttgatacatctaatccttgagctaacgagacacctatctctctttccatggttcatttcttcatttggggacccttagggagtgattaaaggttgtttcccacctcggaaggactttggctaccttggtatagtttttttacaaaatttggtacatctataaaattaaaaaaaaaaaaaattggtacatccaattcttgagctattaggacccctatcttattactcatgctctatttattcctttagagatctctggaaagtggttgaaggtcgttccttactccgaaacggactttcgaaccctaggtacatccttgagaaaatttgatacatccaatccttgagctaacaggacacctatctcccttcccatggtccatttcttcctttagaaaccctcaagaagtgattggaggtcattccccacctcatgaaggactttggcaaccttggtacatcttttacaaaatttggtacttccttttcaaaatttggtacatccttaaaaaaaattggtacatccaatccttgagctactaggacccttatctattacccatgctctatttactcctttatggatctttgtaaagtgattggcagtaattccctactcagacatagactttggaaccctagttacatccttgagaaaatttgatacatccaaggatatacgtagggttccaaagtccgtttcggagtaggaacgacctacaatcactttccaaagatccctaaaggaataaatggaccatgggtaataagatagaggtttcaatagctcaaggattgtatgtaccaaatatttttaaagatgtaccaaattttgtaaataatgtatcaaattttgtaaaggatgtaccaagagtgccaaaattcatttcaaggtgggaaacgacctccaatcatatgtcattatctcgacatagtcctttccatgtatcacaatatctagtttcaaacttaacatgacctgtaatgagatatatcaaaatggtccaacaataatgtcttcgttagagacaaatcttattaaaactcacataattcatttatatatataataacgatgagaaataggatattcaaatatcataaacaatatttaaataaactcaaagtgtcgaatacataaaagcacaaaataataacataatgtcaacaacggtacccaataatgccaattctttcaacttgttcattaaatatctttggtggtaatccttttgttaatggatccacaatcataaggttggtaataatgtgctcaattgacaccctttgtttctaaacttcttctttaatgacaaagtattttactttcatgtgtttagcaccctttgaatagttgtcgtttttcgaaaaaaaaatagttgcaaagttatcacaataaatttccaatgacttggcaatattatcgataattccaactcttgaaataaagtttcgtagccatgacccatgaacaatggcctcaaagcatgccacaaactcaactttcatagtggatgcaatagtgatagactactttgcactcttccatgagatcacacctccagccaaaaagaacaaatagccaaatgtggattttcttgtatcaacacatctaacataattcgaatatgaatatccaaccacatctagatggttagatctcctataagtgagcaagtgatccttcattccttgcaattattatcaatactttttttgcaactttccaatgatctaaacctaaatttctctgatacatgcccagcattccgacaacaaaactgatgtttggcttggtacaagtctaagaatacatcaaaatccaacaatagatgcataatgaatcttttccatttctatgcattccaattcattctttaaatgttgcataagactgaatttatctcctttatgaattggaacaacacttgtagaacactttttcatcttgaatctctcaataactttattaatatatgctttctgagacaatccttgtgatctttcgcgaaatatttcaattcctatcacatacgatgcctcacccatatctttcatttcaaggttcttaaagagaaatttcttggtatcatgtaataagctaagatcattagtagcaagcaagatatcactaacataaagaataaaaaatataaacttgttcccactgaccttgagatatatacatcgattagtagtgttttttttaaatctaaaagaagtgatgatatcattgaacttaagatgccattgtcaagaaacttgtttaagtacatctaagaaccttcgagcaattcgatgagatctcatactccattatgatccatagatttcaactcttctttattagaattaacactttctatgacttgtgaaaatgaaaccaaatcctcattaattcctaagtcaaattctaactcttgtagataaaccacataatcattagaaatagtagatttcttttacctttgagaccttcttaatgctactttatgtggtttatccaccacaggttcatttgcaataatttcattatagggaatttgatcattcatttgttgttcttgaaagttgttaaactattcaacacttatagggacaaaacctaagaagaagttataggtaaagaaacttgcaccctaactttagatttccactttatgtggctccacactcccactaatgtcactattttctatgaacctagcatgtccagtttcaacaattcttgtactatggaaagaacaataaaattcataccatttagactatttgggataaccaatcatgaagccactcattgttcttgagtctagtttttttcatgtggattataaatccttacttccatcgggtaacctcaaacatgtaggtgtcttaaactgggttttcttcctatccacaattcaaaagaggtttttgaaactaccttactaggaaccctatttaataaatatatggtgctttttaaggcatgcatccacaaaaataaagttaacgaagaatagcttaacatactcctaaccatgtccattagagtacaattacacatttttgcaacaccaatctattacggtgtacctgccattgtgtattgagcacacatgccacatttttcaaagaatttagcaaatggaccagggcattgtctaatttcttcatgtttattataatatttatcacctctctcagacctaacaattttactttttttgtccaattgtctttcaacctcattaataaacaccgttaaggcgtctactaattgagatttttcatgcaataaatagtcataaccataatgtaaaaaatcatcaataaaggcagtaaaatacttttctccaccaaaagatgaaacatcaaaagatctacatatatcggtgtgtataagttcaaggagttgtatgcttcttatggttgctttcttaattgtgtgttttatgtgttttcttttaatacaaaaacacatatgccaagatcagtaaaatccaaatcatgaaggatttcattctttgccactcttagtattctttctttggacatgtgacccaaacatttatgccacaagcaagtcaaactatcatcaactaaaccacgtttagtaccaacattatgattcaagattaatactctaaacaaaaaggttaacaagctttttaatttgaataaaccatcacatagaataccataaccaatgaaatgattatgtttaaacaaactaaaacattcattcctaaatttaaaagagtattcagttgtatcaagtttagacaaagaaactaaatttctagaaacaaaaggaatataaagggtttgaaaaaaatctaattgatatccaatatctaaaatcaaacaataggttttaatggctttaactagagctttgactcgattctctatgaagacaaatttttcatttggatttatggtttggatcataaggaatccctgcattgtattggaaacatgagtggtacaaccaaaataaatccactaaatattataaggaattgttgctaagtttgattcaaaacatacagaaacactagccttacctttctttcttaaccatgtcttatgtttcaagcaatctttctaatagtgtccaggctttttgcataaataacacttatcattcatgtgtttgttcttgttgatttgggcatatgacacattaaccttatgtagtccttggttaccctttccattcttcttttcgggtttctttttaactctttgttgatccatgagatcaattaaatgaattccttgttttttttttttagcctaacctcttcttgaatgagcatattatgcaattcatgcatattccacttatccttaatggtattgcaacccatttggaatggggcatattgataaggtaagaagtttataatgaactgcataagcaagttttcattcctttccttcccgtagatttcagttatgttgttatatttttcatctcagtgatgtgctcatgtatggtgcatgatccatcaaactttatggttgttaatgtacccattaatgtcccagctaatgacttatcagtagaatcaaaccggtaccatttttccataaatttcatatattccttgcactttcagtctcgaggattatctttcccaagccttacagaaagacctctattatgtgctacttgaatcaataatagtagcaagcttatcagttaggagtgtcaaatcaagatctagaacacctaggtgaaaatagacttattcacactacttagagaaattaagcctattatactttaaaatagatgaaacttgcgaatgaaaagaaatgagagcaaatccttcaaatatatatagaacactcattcattaatgttttgagtcataaacttaaacacgtaatatagatttagatattaacattaacaaatataataaatatacattgaagttctctttcgggtgatccgacaatatacaaaaataaatataattgatgcttaatttgaatttcacataattggtaattatatatactctaacttgacatgtttgctatctttggatatactaaacatatcaaaataaggcatatcaattaaccacagcatgttcatagatataaaattaactattcaacctttgggcaatccttaaatattttataatcaatgagcttcaatatactcatgataaaagcaatatatatatatatatatatacatatcattatgtcatctcatgtatggtattacataatcatgagcagttgaactttatttaatttgacatccataaaaactttctaatttggccgctttggtgactaacaaattattcatactatagacatcaaattaaatagtcatagttgttatttgataatattatacaatttaatagatataaagctttagggttttgtcattttggtgattaacaagccattcataatatctattcaagttaatgatgatgatgacgatgacgatgatgatgatgatgataatcataataataataaatctattaattcttttaagaattttatcgacaagtatgtataaggaaaccaaagggaggatctgaaacaaacttctaaaccataaacaataatacacaaagacatcacattttttctacttgtgataaagtcagattgtgtatcccttgtagagcgttttgactagttagcatatttttctactcgtggatgtgcacattaatttttataatgacttgaccatttccttgagcatgtatttgattcttgtggtggcatgtgttgtactttcaatgtgagatatgtattcatttttatatgataattgtagggttcgacccatcatggaggatattaagcttattaaccaaagattagagggttcacctagggagctcaagacaatgacatattttgttttctagtcaaagtagtgccttgtctactcataactttcataccttgtagacctacatatatctattctaagccttgtacattatcactctctaatatcgtcatatgaattttacatcccttcttattagagtttgtacaacaccatctaccttgacatctttccaaactatttatttattcatcatgtagtaatgttatcattttttttttatcccctttccaatcagatcgggtagattttgagaaaattgaacccaaggtgagccttgcatgatgaagggtggcttacgatgagtgatatctttttttgcttatgtggacctacattttcacatgcatctccactcaatggtgagactcattttttattatgaaaatttgatttttagaaaaattgaagttactacttatttttgtttatttttaaaggaaaaatgaaataagaaataaaaccttgagagtgactcctttatgaaggaaaagcatgtctatgaaagctaagtccaagtctaaaggtaaagttacttattgaaaatgtaccataaggtagtacccctataagccctaaagaggtctctactaaacaagtggatggaattaaaacaactgactaatagaccaatgaatattaggataaaaataagaatatacaaggaaatggtgatgtaaagcaataggcaaagaacactcaaagtatgatatccatatcaaaggaatcaagaaaaaagacaagtgtactcaataatacccaaaatgaagcaacaatcttatataggaaaggaaggttagttcacaagcaaaaatggagatccaataacaaagcaagagtcaaacaatatatacaagatgtacacaaaatcaagaggcaaagatgactaatctaagagcaaagtaagctaatatatagtagaactaggcattaggtatgcaattacgaaataaatctaaataaaatagttaaaagggaaatatgatacaaaggaaggtttttttaacatgcataagatgtctacaatacttatcaagggttcaaaaaggttggaagcatgcaaaaggagacaaaattaacgagtttatacaagatatacagatgttggacaacaagcaagtagatacaaaataaatccaaataaaatagtcaaacatgagataaaatcaaaataaaaatcctacatcattttcaatgtgtctaaaatataatctaaaagcccatagtgtctaaacaagcaccaattatcctaaatttaaccaaacatattattgctcagaaacaaggtagaactggaagtcatgcaaagatataattatttgacaagcttaaagggaagataatttaaaaaaaaaaaaaaaaacaatatcttcaaagtttctagaacacattaaaaatttctatgaagctcaaacatgcaccaattaatctatatttcaaagaacatttcataataccaaattcaagtcagcatagtaatcaaataaagatgaaattaattattaaacttagaaaatgatttttgaatgaaactaatgctcaaatcattatttaagcatggcacaatttgcaaatacatttcgaaggtaaaaaaacatggcacaatttggacacttaataaagactcatttattcaactaacttaaagaatatttttttagttaaacaaaaattatttaacatatttaagaagtttaaaacacaatctaagcctaaaaaatattttaagacaagccaaaaagtccaaatttataaaaatattttaggggtcaaaaataggtcaacaagtgagtgaattttgaaaatcaaagagtgtgggtattaccaatgcccaagttaatttcgatggactaatatacctccttaaccctccaatgatcatgaaaagaagctcatgaggattagagatgatcttattaaatttaaatttgtaagactagtctaagcttccaaaaatcaagaaaatctaaaatcattagcttggaaaatgagtgatgtaaaccaaaagaatgagccatggattaaccacatggcattcaatccttattaaccctcaaatgagtatggatttgagctgataagaggtataaaggaccaaattagtactcaagcatgcaaaaaaaaagtgtagaattcacatagaaatacccatagatgaagatattttcacatgaaatcatgcattatgtactaaggaacatgacaaccattattaaactcataatgatcacaatcccaattcccacctaatcatgaaaggggattcaaaaggcctaagaatggtccattaaaaatcaattcaaaaaaagcttttcaaaaaatcataaaaaaaaaaaaacataaaaataactattaattttctcaagcataatagtgaaatcaaagcctacgaaagaagacttgaccttggccatgaaaaaaaactatattttctcaaccaaagaggacttgaaaataggtttaaccatatttgaaagaaaaaaaaaaagtattttctatggaaaatcactttagcaaataaacaaacacgtgtagttgtaaatttatttcaaaataaatcaacaagactttcaaaaatctttaaaataaagaggaaaactaaaatccccaaaatataaaattaaaagaaaacaaggatttcaaatcttaacaaaatttattctcatagatgatcaatggggttaaaaaagagtaaaaatacccaaaatatatcaaaatcaaatcaatcaaagcttcaaaaccacaatacaacaaataaattaaaaataaagcaatctcttaagcaatgaatatgaagtaaaggaagaaaagaaaaacaagaattatagattatgaatagataatcgacaatcaaatgtgtaaccttcaatatccttacccaataatcaaatagtctcaagatataattaaagaaagaaaataaatagtgaatgagaagaagcaaagtcaaagtgacttaccaagctatgttcacataaatgagtaacttaccttctttcaatctctaaatcatcttccaaggtaaattttcttccaagaaaaatcttctcccctctctctctccctttctctaaaaattggcaaagtttccccttttaaaatactcaaaaaattcctatcaaaccaacctcctaaggtccttttttatagggcaacggggatggagatttggacatttatccttatctcaccaaaagctcaaaatatctaaaaccttcttaagctaaacccaaacttaaagagacattaactcaaggttaaatctcttaaaaaataacctaaaatactcatcttgacccttaaagaccaaaaaaaaaaaaaaaacttgaaaatgtgtcaaaataggcccaaaacccaatcaattggttaagaaactaactaaccgcttgcctcaaccaattgaccacttgtctcaacaaatctagggttgtctcaagcagttgagcaccggttgaacctctatcacaagccaaaacaagccaaaatgggtttcaggtggccaaaaagtgccaaaacaagctttggtcaccctgaaactttgggaaaacctagggtgcctttaaattcacgttatggatccaaaaaattccacttaaaaggtctttaaaagtggtccaagattcaatttcaagctaagtaacaagcagatcaccaaggagcgcgatgaacagctaagtagaagggagtcctacatgtgtactacatgaaaatggaaggtcaagggtaacaagtatgatgactaacatatgctatgaggacaaaatggaatgtctatagcttgatgagtttatttactattctatagtttagaagagcttcttaaggttgttacgaagtattcaaattgaggtctttttcacatgattttagagagttggcatgactctattttttatggatattagtctttagtgtcaactgtgtgagagcttaagagcatgatgtttgaggttgtgattaaaggatggataaccataattttagccacactcttatatatagagttacccctagctagccagttgagtcatgcatgcttagccttttcattcatgacccaatttatttatttatctttttcataccttgggttaagggcaccttagtatatgttgtttatagatgagatcacctaaatcatgagcttcatagttgattcatcttgatcatttctttatactttctaccatactttttctcaatgtttgttgtccctatttgagtgatcactctttatttctatcaccatgagttcatatttgtacatttggaataattttttcagtatgtatataatgagatttgttatcaagctaccttaggatccttgtgtatgatttcttgaattcaatggtttgactattgtaaagaataaaaaagattaaaaaattaaaacaaaaaaaaacaaaaaaaaatagaaaaaaaaatagaaaaaagaaaaaaatgttgtgatatcagtctttgtaggtagcctatatgatgatttttgttttcccattatatgtatccatttctacccatacatcgagttatgattgagttgagggtttcatttctatctatgacatatttttaaggttcatatattgattacacttctcaatcagagttttaacttcatttaccttagtcatcttggtttttggttgtgtattgagttatcatccaacaacattgtttattttaccttcgaccattgtattattcctcttatttttatgagcctattatagagtctcacttttgtcattttcatttagctaacttattcatctagattgttgcatacttgtgtagtctttgttcttattttgattccattgattcattattcttttcatcaatattgatcttttcattcattcagtcacttgtatcataaagtatttgtgaagtccatgaccttgaagcttcttatctatcgcattatgtatgccaaaggcatagagattttaccattaggattttttagtctagtttcctttcattcctttcatctattaccttagcctacattatatcctgaatctttatatcacgttaaggccatgacatcattcattgtgcttgacagctcacacatgggtagcttgaggttggttggagattacttggattatgatagattaagagttacgagatgaccttacattgaggtataacccctctcatcaatgtttcatttttgagatgatagtttatactgggacatagccacttcattccttctcatagagtatgatggatcaggagttacaagaaggtgctacactaaggcataaccctctcatggatgtctgattttcaagatgacaatttatattaaggcatgttagtttaagagaacattttatactagggcataatagtttgagataacattttatactagggcatagccactctagagagcttatattaaagcatagacattcaatttggatttcttacactagggcataacctttcttttggaagtgatcaaatatattcttacattaaagtataatgagtgatatgaggattaatggatatctcatattgttattcttttataccggcgcattgccatctcattctttctcacagagcatgatgaatcacatatcacgatggggtaaagccactttcttggaggattagatattcctttcaaattagagtataagatgattgagagatattgatttgatatgatgatattggggaatagccatcatagggagtgctattcatattagggcatagccaccttgttagatatttgacattgagatatgaccacttgattatgattggggattttgatggattataaaaatgatgatgttttaggttcattcttcttagtatatttggtttaatcttggatactcacctgtatttgttacatacctaaatattccacccttgatatcttcacacctatatttaccttgtcaaagtttaattgttctacctttattcaagcctacccatttcatcatacataaccttataccactctcttgattagatgaggatgtagattagtcctcaatttttcctagtcatgttttcttgtgtcttttggacattgagtacaacattgtccatgatggcatgacccggtagattgtcgacggactagtgatgttgtttttattttgatagtcaacatgtcatgtcttgatttacttgtatttagactcagagtcttggttagttttgtttctatccattatacattttccttttaccaacatagtcctaggacacgattttgtttagccttttttactaaggttaaacatttttatctcattattgatgaacttatcctaaactatagtagttgttttataacatttcatatcttatgtcttttttttttttttaatctcatgctaattgtctttcagtctttgaatcacatttttagtatcatttaagtcatctttcagccttaaatcgtatatttagtatctttaggttctctttttcactatctctcttgcccatcaatcatcttgagccttattatttcataatcttctcaatcatcctttggcttggagccacactttaggatcattccttggcttagagtcacatgtttagtgttatcctagtcacattttcaataatctcaattgtgtcttactatcacagatcaagctctttatattttctattagttttgtgcgccctagtcatataatctttttatgtttttattagtgtcactccttaactatctgacctatatatgttcctttagtgttgcaccctaactgttagatctttttatgtttcctttagtgttccaccctaactatccaacctttttatgcttttccttagtgttgtgtcctatctatctgacttctttatctttccgttattgtcatgccttgattatttggcctttttatgtttcctttaatgtcacgtcctaattgtttaacctctttatcattccttagtgtcgcgtccttactgttgagctatttctattagtatcacatccctactttttgacctttttatgtttctattaatgtcatgtctcaactgtctagttttttaatttttatgttagtgttgtgccctggctatccaacttctttatgtttcctttagtattgtgcccttactgtccaacctctttatctttctcttgtgttgtgctcttgattgtttatcctttttatttttctattagtgttataccttgattgtctgacatttttatgtttatattaatgtcatgcctcaattgtccaactttatttttatgtcttttattaacatcactcctcgattgttcaacatttttatgtgtcctattagtgctacaccccaagtattcgacctttttatgtttttgttagtattgcgtttcaactattctaacctttttatgtatcatgttactattaagccctaattgtccgactttctttaatgtttctattagtgactcacttaagcctttttaacctttttatgttcttgttagtgtcacattctaactatccaacttccactatgtttccattagtgtcgcacccaaattgtccaaccttttaatgttcctattagcatcgcaccttgactgtccaactttctttatgtttctcttagtgttgcacccaaattgcccgacccttttatcttccagttagtgtcgtgtcttaattgttcaacctcctttatgtttttgttaatgtcacaccctgattctccgacggttttatgtttcttttaatgtcacaccttgattgttctatctttttaatatctcctattagtatcgtgcctcaattgttgatttttttctactttcttttatcattgcacctagattgttcgacctttttatattcttattagtgtcacatcctaactatctggccttttattttttatttttagtgttgcatcctaattgtctggcttttttatgtgccttgttagtgtcgtgcctaaactgtttggtatttttatgtttttgttgctatcacacttcgactatctaacctttttatgtctcttgttagttttgtgccttaactatctagtcttttttttctttctttcttttagcaccatgccttgaaattttgacattttcatgttttttctttcatctatagccttgagttattcctttttgtcccattttattcgttagagcttccaagtcgaaccttagcctttttatccattgtttgacactaagtcacttccttaataatttgtttccttttatctctttctttatgatgtgcccatttgcccttcttgatagcatagccctcagtgcttcatgtagacattgtccctcgttatccatcatttgacattgagtcactctcccggtcatctatttcttctcttgtctcctttatagtgtgcccaacatgaaccctagtgcttcatgtagacattgtcatagtcctctttgacagagcctactagagtttcacatagatattttaccttccccctcaaccacccttgagcacctttcatgatttgagtgaacttgtgttatagaatgataaatttggtggtttttcttgttcttcaacagagctcacttcttttcacttgtatatacactcacctcacttgtgggctctattgaagaggggtatatatttatagaccctaaattttgtctcaaacccattatcacatatacttattattaagccttattttgtttcctttcttttcttttccttttttcttctctctcccctcttatttatctccatagtaacacccactttccattctccccctcctacttatcttcataacaacatccacttccatcccttttttcattcattttttcttcctatttttcctctccacttcttgaccactatcttcactacgccacctatgttgatgccatctctccaccagctgtgttacattgttaacatctttcttttctttgttcattgtcaatctctacatagccgccaataaggattgatcaccaccagttcttgcccactcccacactgcccaacttgtccccgaaagcttcaccttcctctcgcatccatggccatggtttcctagagtttcaaaatgggtaagtcttccccttgatctgtacagtagtggtttatggataaattgagacatgtgtgaaatcatagaagtgatttttgtagtttaactatttttagttttaactaacaacttttatcattactttatttagtgaagtatcattattaattcttttttcaattaaaaaaaaagtacctcacatatattcttaagtactattatcaatatttcaatgatggaaaatgaactaacatggaaataatcctactcaaaaaattaatttagtgcccaaaatattaattccatgtaaagattttttgataaaaatttcatattttatgttcaactaagaaagtatagtgtatcttagttttcaatgatagttttagaaaaagttcatagcaatttctaattataagaactcaatcataagttcaatcaaaattcttcaattgaacattaaaatatacataaattaggtcatatttgattgtttggtatacgcacaaattttgaaaaagtcatgcaacataagaaaaataataggacaataatgtgaaacaaaatttttattaaaattgagaaattgtggggtacaatctttatagtaatattcttttacaaaagaatatatctctctgattctttcacatttatcacaatttggaaaacaacgattatcaatcaagcgccgtaagtggcttattcccgaatgaattcgttaaacaacgaagatcgtgtgtgtagacaatgaagatgttttctttgttttcaaagtcaatcgagggcctaaagtgacttattcccaaataactttgttgaaaggtaaagaacacgtgtgtagttcttctacaatttcttcaacttatagggagattttatgaagtcttttcttctttgtcaagcttcatttctcgtgtggaagtcgcccctatttaaaggtgaaattagggaattaaattttggagttccctaaagtttagttgcttgattttagcaactcatctttctcattaaggaaattttcctacaagagaatatttatttattctttattctcttttgatttcaattgaaatatttgtttactttaagaatttgtcaacaaaaaagaatttgtttcctttttttaattctcctttgaaaaagatttaattttatttgtaagactaaattttataatctttcaaaatcgccacgtttcacctttttaacatatgccacatgtcaaatgtatgtcgtcaatcccaaattttgtcgaattggagagccacattttttttgaagaccaatttagtgataatttatttcactaaaaattttgatgtttacacttggatataggggtgtaaataaggtaggttttgtcggtttttgaataaaaaattaaccgaattaatatagttggttttatacgtaataaaaaccaaaatgactatatttaaagtgaaaaaactaaaccaaaccaagccttttgaggtcggtttgatgatcggttttcacccagcttaataatttttttagtcttaaacctagttaaagatttgtgtttattttgaactcaaatcccattaatctaagtttatattaggccctaagtctaatttatttttaaaattaattgaaaccaacttggatttgatttttaaaatatattaaatgtatttaaatttaatttgaccataatacaaaaacaatgaattacttcaatagaatctaatataaacaaatttatcaaatataaaacaattatatataagttttaaaatatcggtttggttcgaattttatcaattaggaggcaagaaatcgaaaaccgaatcgacaagatcggtttttaaaattttcaaattgaatcaaccttttttattttttaaaatcgaattaatatgatcaattttgattggtttggatctatttgtcggttttttcgattttgtttacacccctacttggatatactattaaccatttttttttatatcctttgtacataggatatgttaatgttaagctaataagatattcatatctcatatatcataaaaaaattattttttatcatttttatgttatttattgttcaaaataaataaatttgttgctaaaaatgaacaattttaaaaatgtttatatttaaaataaattttttacttataattttttaaaatattttaatcctggattttgttaaatatgagagaaatttcatatttcttaatagcaaatattggaatataatatagggtgtattaggcatttgcatatacaatttagaggttaatattattaaaaaaataaaataaataaaaacaaatagatgcttatttttaaaaattaccttaaaataattcaaaattaaaaaataaataaatataattaaagaagcccaattagttgaaacaatggaatacttccgagaagaattggactttaattttaaaataatttcaaaattagataattggagtattttgaattgtccacacaaaagatgacaacaagttgactagtatcattaaaaccatcccttatgaggtaaatccttctgataaaggagtgggggaaaagagttggttgcagagatgatagggacatatattatgatatttatgtgagatgtggaataagatatatgggcaagtgtcattaccaggaataggaatgacatggggcttaacagtaatggcaataatatactctattggtccatgtctctggtgctctcctcaatccctccattaccattgccttcaggtctctcctttccttctcatctaccctccaatccattactcttcccaaaaaactagaaacgactaccactaaacatatttcattctttttgaccttttaggaatactattaagctttaataaaacttgctgtccatcaaaagtattaaaaggaattataggccctatttgtaaatgtttgataaccaagaaaatccattttctcctttattttaccttttttcacttactttctaaagaccattttaaaaaataattatataaatataaaaataattaaaaataaaataatatagatcaatattatttttaaaatcatatttaaaaacaaagaaaataataagttaagaacatttcatgttcctacatatattttttgttttaaaaaatatgttaaaactattttttaaaaacacttcccaaataaaattataatatctaagaagagagaaaaaggaaaggaaatataatgagtttaaaaaatcaattttttttttaagaaaaaaaaaacaaaaatgttttaaaatgcttttcaaatttctttatgtaaataaaatattataaattaacaaaaaaaaattattaacaacatttactctggatcttgtgagtttattctagattaataatatatttgaacattgatattgtaggttccgttatacataacagctcaattaataggatc

SEQ ID NO: 13482 - DNA, 2559 bp, Vitis vinifera
  Intron number 5 from transcript GSVIVT01032736001 (locus G SVIVG01032736001) derived from phytozome v7.0 (chr-ID chr1 3; pos 1173513 to 1176071 reverse strand)
taattcaaaaagtcagttctctggagcaggagctggtatgatcctctcatgatatcatatgatctcttttcaacaaagttattgtgctgtagtgttgaactgcatttcttctctgtttgattggtctttgaagttgcttaatctcccatgtagctgcttgttggttttgttacaactctatggtggtaaacacttcttatggtgatacattctgctagtttgttggttccaagttcaaaagtttcattttttattttatttttatttttatttatttttattgctcaccatatctgacatggttcatggaattgctaaagcctaacttcatcacaattctgatgatccctctattgtcatggtaatattgcattaaatttatcgtaattttgagggctttgtttgagttatttcaggttaaattgtattctgctactcttggagtgggatatgcttggtgtgactatcatattatatctattttctgctattcatatgcaacgacactgctattgttttgtagtttcttgtattcttcccatttatagtttctttgtattcttctcataattattggtctttttattttattttattttattttttatttttatcaaaacgatttaggcacttcaattttcctttatacataaagtattcaatcaaacatgctaccgttactttcatggaattcttagcattattatctcttttgggttgaattccattaattatgttttttcttttttggttcagtatttcttagttgacaaccctagggtttatttacaaaaaagaaaaacaagggtagcgtgcttccattgtcctatttagtcattatttatttatttatttttgtcatagttagtgttttaaaaggctataatgggtctcgagaaattttactcaaatgaagggtggtgtaagctttgaggtggaacaaggcacaaatcttaagttaaaaaaaaaaaaaaatctgaaaaaatactaataatatctcataaaaatgaagcactaagactatgcttggttcttagaaagtactaagaaaagaagaaaaatattaaggaaaatgattttcttatatttggttttactatgaaaaacatgaaagaaagtcaaatataattaaaattatttaatctttttatagaagagttagataaatgaaatgattttgaagtacgatataaaaatgatttattgactttcaatctatttttgtttttcttcactttttttttcctcttttttttttctttcacattttttgtcaaaactttatgggaaccaaacataacctaagaaaaccatgaaattgaaataagaaaattcattttttttcgtgatagtttctaatttaattcttatatatatatatatatatatatatatatttcaaactctctctcctatgtcaatctccatcaaattattcttcattcttctacattaccatcactattgttagtgggatcatctacaaagtcatcatagtatctaattgctccattatcctatctatcaatgtcaatgtctggcaattcttcttcttcatccaccaattgcagttgtacatgttcaagctttaagctaaatgatggtagtaaggaggcaatatagcaatcccaacaactctagtggcaaagtggctctcctttggaagtgaaaactcaacacttggttgaaaagcaaacctactattcacattctagactacctatgaaattctacaaatataattatccattgtcaaagagaattgtggccactccaacaatgttttaataaagatctccctcaattttttatttgaaaattcttccttgaaaatctggacattacgctcccttcaaatgccccaaaacaagcaaaggagagacattttccatacttcctctgtcaacatccaattcctgaatcttccatgcagcatgagatttttgtactaaaagtaccaattgcaatccaaacatagccaatagcatgtcccactgttgtctatttctattacaatggataagaatgctcttacttctcatgtaatatccatgtattacttgacacaacaaccaacaatccttagtctgaactaattgtttgattttttggctacatatctaaagggacaaaattgttcatcgcaacgatattgtttagcttgagaatgggaaattgttggatttcattgaggctttagaatgacatctattgaaggaaatcttgttaagtcacttgggaatagattgtgcttgtagttcttgacacattatgtcaatatattccttttctactgagttagaacagctaagcattgaaattgtatctgagatttttgttatggcattttaatgtttttcctcatgttattgttctccaagatcctcttgctttgagtgttaaataattactatagagtagcaatagattatgttcttatatatcctattgtgaaatttgtatggcttttagtgtgcttcctcttatccttcttgaatgaagacttatttaaatttcaaatcaggctgaatcaaaaagagagattcaaaaattagaaaa

SEQ ID NO: 13483 - DNA, 1914 bp, Vitis vinifera
  Intron number 3 from transcript GSVIVT01022097001 (locus G SVIVG01022097001) derived from phytozome v7.0 (chr-ID chr7 ; pos 16560677 to 16562590)
gattttcttggacaggtgtgttaaggttatgatgtatttttccttcctgtgcacttgcccacttttcatttgattataaatttgatgtcacatacttacatatggttacaaagttttttacacaattgatgttttacatggtcagaaaagttctactttgtgttcatatcttcattatagttgttaaattgtatagcttttggtgcatactttaatggttttcacatcttgtcatagcttttaacctatatttttttgataggatagcttttaacctatatatcctgtagtatatcagtttcatggttgttcttagtgaaccatggtttattattaaagtgagcagggcagaactagaaattaatttcagagtaggaaaggactatttttattaagacaagattaataaaatttagttaatatgaaactttaaatattaattaatattatccatatttaatgaatttatcattgtactcgacagaattttatgattgatccattgatgtttcatagttgatcttaagaaattcagtaactttattttgaaaatattcaataattttatttgaactttgaaagttaattatttgttgcctgattatttatttatttatatttaaggagtttttcttaaaaataagataggtttggtgaatataatttcatatcagctaaattgaattgagagcaactttatggtagtcttttagatctggttaactgggtaggaaggcaattgttttttgatgacatttacatcatgagagtacatttaggtttacaaaatagtttagaaatataagcatatatataacataaatggatattctaagaatgaatatacctggtgaatttcatggaaagatgtgtcaaagagacaaacatgcattcatcttatgttgaagatcagaggtaagaaacaaatctagcaaaatatggtattttatttccttacccatcaaaggttcgactataaagaattcctgaatttaagtgattttctgaaggcattcaaggcttgtgccttggtagttgagtgaaagcaaaagcacaacatgtttggatgtttgggattagtcatctggatgagtatcccattaattgagattctcagaaccatcttgtgtctataatgctttattaaattttctgaaggctaaatcttggcagttgagtgaaagtaaaagcacaaagaaaatgcattatagccatattttaatatttgagattatttatctggatgaataaaccatttaggcaatctggattctcagaactatctcattagtgcgattgagactccaggacttgaatatgccaggaatcctgtcatggaaacaaatcaacagtaacatctaattctagcactttgcttagggctatctggttctagtctagtgaacctgttttgtgcaatctggttctaacctggggagcctttcttcactatgttggattttcacttagcaatgaaactaacaaatgatagttgattgttgtgttcaaacatagattaaacaagtaaaatatgaatgatccagaaacataggctttgaagccctaaaacagaaagtacaattgtactcaaatatggggtagaagaagtgcaactgtatatacaggggctgcaatttccaaagagaatgagagcaggaagaagaagacgaagagaatcatatctcaggtggagatttgtggttgatggagctctgttagagaagatgtctctgttcttctatctttggttttgaacaagagaagaagagaactctatctggcaatttgtcttttgtgtgattgtgatttattaatcttccattgttgttgttcatttctattttatctgctcttaatttcagcttgttctaaaaaaataatattctatgataactttggtgcagaaatcaaaga

SEQ ID NO: 13484 - DNA, 5252 bp, Vitis vinifera
  Intron number 2 from transcript GSVIVT01029697001 (locus G SVIVG01029697001) derived from phytozome v7.0 (chr-ID chr1 2; pos 13310110 to 13315361)
aaggtacctttttttgtattttgatttaagttgtaatgggtatttgtagcttaacactatgtaagttgatgagttttggttaacaagtaaagttgcatttgttagtatggttcatgtgggattgaattgtgccttagttgattgttatttgttagggaacagctatgctttcagagttttatatagagttcaaactgttaactagctcaaaagcataagcttttagccaatgggctaacaatgtatgtaacactcaacactgcatcacttccctctttaatatgggggtttaacaaagtgagaataaacaaatagatgggtaatgtgacattattatcttcatttacctccagaaacaccatgtaaatcagttgtcttgaaacattaaatggttaggtaatgagacaatattgtatagggagcagactaccacttaagcatggtagtttatgtttttagatggttgcctttttatggcctttgatggatatgaaatgctactatattactcaatgactaaagaaacatcataatttcattttacaagtgtggttctgatcaatgctataaatatttaatccaagtaccttaggtttggttagatgaatcttctttaccattaatcactatgacaccatctatgtgcagtggatgatggatggagtgttccaatattttagttgttcattgatttggcaaatatttggataaggagcactaaatttgatttagcaaatatttagttccaatattttaaataaacttgttttatttaagataatctgtaagcgtataacttctagcttcttaggcattgtttgtatactttgtgtgtacttttcgccgcttctaggcattgctaatacaaactcttatttacctatcaaaaaaatctgtaagcctataattatagctattcaaggaaacctggatttatgaatctttgatagcttggatagatcaaaattgcagttgaaaaatatttttgtgaatactttgtttgaatggtctggaagattagtaggggattgaaggctttcatttataaatttttttgatgttttaggctgtacttaaggagtgaagatatatttatttagttatttttcttttcttttgtctttttggtctctatacatgggttgagcctcattcccctaaaattttacttataaaagaaacatatgaaaaatgccattcaatttgcaacaaacatgtaaagctgatactttgaagatgacatataaaaacctatatatcgatgtcatttattaataaatgcatagttagaatttggaactaagaatcatcgctaaaaattcaaaaaaattatttttgtggatttttggctgaacctatatgcattaagcttatattttggtaaattaaacttttaaaaactataggattcactgttttaaaatggtataacatattttaagtctttaaattttactatcttttcatgaaaatggttatgttactctctacttcatgtctccaatatatatgcatttcaacttaagatacaagatacatgatagggaaaaataaaaaaaatgatagataatatagttctaagttaacaactgcagtatcagtatttgttaaattaatcagcatccttttaaaatcaatattaatttaaaaagaaaatatgaaatttgagagaataaagttgaaacatgatgcctatttaattttcttttaaaagcaaaacagtataaaaataatatactaacatgagaaaatcataaacttcaatggaagaaagcaaaagaaaaatataaccttaccttgtgaatacatggttgagtgttattagtaaatctaccttccaaattagtaaactctttttaaaaaaaaatgaaaaattggaaataaaaagtaaaacaaaatctataaaaagaaacatgtcttttgagtagaaatgagagaatagagaagcatgcagagtttgagacactgatctgtattcaaatatgttagtagcagttacatgttagcgactgtgaaatgggtgaaatgataggagagtttgggtaattgcaaaagacaggatagacatatgagagccacttttttttgtgaaactgttgaaattaacaacaggtggagggagagttatttggtgttccagaagttgagagagcttgagagtaggaggaagagcttgtggagggatattttaagataatgaattgtttaatttggtaaggcaattttaatcttcttttggaaaagtttatctgaaagattgtaagagactagggtcttgctgatgcggcagtaacttccatttaactgatttttggaaagatgtgatcatgtggtgtaaaaaaagggtttttatttgatatttataataaaaataattaaatattgaaaactcttcctgtaaacttttctacaaaagtatttcatttgtgtatgcatcttttttctatttatttttattatataacttcattcttactatttagagatgcacacattcattcatgtataaatcttttttctatttatttttattatgcagcttgttgtatacaagatgtagtatgatataccatattggaaaatagtggaatgatgcatgattggtttccataagaatggttagccacaccaagaataccaagaatgagggaactgctagcaacacattttcaagaattgatatggaaactatttttagcctaattggtcgcttttggaatttttttcagttttcttactagtaaggactcagtattaacagttgaagttcatttagtgttgaaataaattatataggttgaattttgcttctctaggaagtaatctagttgcttcttttggaagttacccccttctgcagggagctggtgttgaattctctgaaagcaatgtatagtgtgtacaataattgggatgtataaattttgccaaaattttttggagtgaatgaaagtttagtccatttaagagcatgtttggaatgctaaaatagagaatgggaatgagaaatgcattctatttcccacccattactgtgtggattatttttagaatgagaataggaatgaaaataacacttttatcaaaataaaatcctacccttacttttgattcctcttttccacatgttatcgtgatttacctctatttccatcttttttccgttcctaatcccgtgtaccagatgcatcctaagagttatcaggttatctgttcctctctttctcattaatttcctatgtgttcctctctttctcactaatttccactttaactctttttttcccccccttgttcttccatctgaattctgcctaatcatgcttttctccattctactcacacactcgaaccaatttttccttattgataaccctcttccacttaaattacttaattctcattattctctttcaggcaaatcgtttttatttttatttttatcaaactcttttgggcaaaccttgcatttttcctcctccttttatagaattgatgctttgttggattttaaacacatatggtttgcatatccaacctgcagcaagacataggaacaccactacttacattcatacccacccttgttttttgtttttcttttcttttgttttcctttttcttctttctctttctttctttcttttcctaagctatatgacatataggttagcttaacttaataaattaaagttatgctttgttttaataaactactgtttaatagtttaacatgtgaatggatttttcttataaatgtaaactgagtacgagcagtctatatatttgttaagtttaatgggttatatttcttatttgaataagatatagtatttgatggttgaattgattcatgatgttataatattggttaataatctttatacacttactgttgctcactagttttgcatcctacaaatcatgtgcttgtcatctatgtatgtcattacatttgattccaaataatgcattgctctgttggcattttccaaagtttcattcaaatttcctcttgtcactatgaattttttgttatttttcttgccaagtcgaaatcaacagtgaaaaattttatgtttgttaaatctattaaactaagtgcactaaaaatgtaaaaacataactaacaaacaaccaataaataaaataaagtatttcaacatttcattaaaggaaaaaacatgactaattttctcaaaattaataaaatactacatatattataaataatgaaagattcttattaataaaaaaaaataaaatctcagttggacttgtggtagtaatatgatgattagcagactgaatatggaaaataaatgcgatacattcttaagggatccactcttagcttggtctacattgttggtccaatccctaaaagcttaagctattgggagaaatagtagtttaattgtatcagcactgtggctaataggtctcatgttcaaaccctctatctatttattctcttgtttattttttggtgattggtttttagtttaatatacattattggttgattacctacaaagcttaatcttttgggatgattgataagtttgtcatggtaccatagttttagtttcccaagggcctcatgttgaaacctctttatctatttgtttcctttgttgtttgtttatgattggttactatcatttgatgtgtgagttaatgtgtcacagggggaatgccttaacttgatacacgttattggcacacttaacaacttgagcatttttagggcaagtattaaacttctagttatgctagaagcttaagcttttagaaatgagcaaacaccaacctgcacaaggagtgcagatgaccaataataaacaaacaaatagggaataataaatcgggtgatctgaactagagacctctggaactgtagctttgatatcctattaaactactgcttgcccaaaatgtcagctttcagggaagggatttacaatatatatcaagtcaagccaacacgctaatctcaagatatatatcaagctaacactaacctagaaatatcttatccaaatgtaacatggcaatagacctaggttggagtggatgttatataagggtacattgcatagtttagacttgtttatttttgctagattcttgcttttaggtaacatattcaatgttttggaagttttaattgatgtttcttttaaatgaatgcaaagctaagaatagtggtgtctttgttcaagctgcagctcctgaattgggtccagagg

SEQ ID NO: 13485 - DNA, 7409 bp, Vitis vinifera
  Intron number 34 from transcript GSVIVT01028290001 (locus GSVIVG01028290001) derived from phytozome v7.0 (chr-ID chr 7; pos 5772213 to 5779621)
agaagagttcagcaactccaggaatctttgaacaggtagcattaatatataacctgttaagacattatttcctttgatgtcccagttggatttcatacatgttagatatgctaggtagaacaggaattctaacaaaatgggcattgactataaaacacactttgagcataagcctaaatatcgatattggaacattactttgctccgattcctacagtgaggtttagacttcatctttagttgattctcttattataggcaaacaaaaagtccattcaaaggtgcctaacaaaaaaaatgggtgccccatgtatatagggtttacaagtggcaccaaagaacagagaaaacacacacatcaccaacaagcaacaaaactatatcctgttatcgacaatttagactatctatgaaaccaggagtgtacaattaactgatcctagtgggacctgatgccaatcccaaagggacttctcctccagcttttgatgaatgctcatcttcattgaaagttcatggctgtgcttctccaaaataacaaagataaggaaaggagagccattcactaaatcttcttcctttgtttgtccaagctccgaaccttctagcccaacagaagctccttgattatggaaaaacccattgcatccggcaatattcaacttctttagctggtgtgcaaaaggaaaaaaaaaaaaaactccttttgattgaacatatataagttttgtatttcagttcgacatcaacttcggtcatggttctaatttaaaccacctttgaaatatttctagaactaagtagaccataacaaaaaatatgcctgaatttgtcagcaagaatggcatgagtcttttttttttttttgagatatcaaatcttcgtagcttaaaagccaatattttcccatcatatatgaccttgtatcatcacaatggaagtgataaccttggtctgagaaactaaggtaattttttttgataggaaacgacaaaggaatatattaaaagaaaaaagaagtacaagagaaggatgagaaatccttccaccaaagaaaactaaacaacaagaatacgaaaacaagaaaatacaaagtaaaaacaaacaaactttctagaatagacaaacccaaaggaattacatgccgctagccaatcaagttgtaacacaataaggggagtccccttaaaaaccttggaacaaaaagcccaaagagaagcaaggaaatgaatagaatcccaaagattctctgaattccttgctctatcctcaaaaatcctcgcatttctttccctccacacaacccaaattacaactatacaagcatcttgccacaaaactatccctctcttcgataaaccaaagccattgctccttgggggaacccaatccatcttggctaactgaaataatctatgccataagcccatcgtcaaataacaatgtaggaaaagatgatcagctgattctccatgcctcatgcacaacttacaaatatcaggactaagagctttgtagggtcttctcagttgtagcaagtcattagtatttaccttcttgtgtgccaccaaccagacaaaggacttgactttgaaagggacttgagatttctaaacacacttagtagggaaaattgaaggagaaccagaacattgggataaggtaagaaagaaaaatttaactgtaaaaagccttgaagaagataaagaccaggatctcgcatttggaaccgaaaatgacacatgtagacaatcaagtgaccgtatgaggccttctaaatcttctatctcaggatcggataggttgcgtcgaaagttaaagttccatgaaaagggatgagtagatccgagaattgaagaaataggactatttttatccgtgactactctaaatagtcttggatattgagaacccaaaggttgatccccccaccacaagtcttcccagaaccgaattctttccccatctcctactacaaatcaagtaaacttggaaaactcccgaaagacttgagcaatagccttccaaggataacgacgtgactatttgactatagtgttggcatcccatccattggagtgtgatctgtaaatgcttagaataaccttatgccatagagaaactaaggtaattgccaatgaggttactcatactgcttgttttttgtgctacattttttttttttttttaaatcagaaacaaacatatttatgtcattggattaaaaatatgtagaaggaggagcagtccttccaagatttacaactgcttatcagaaattagaaacatatagtgctctatgaaagtagaactatctgtacagactacaggcagagaaagcaatgaggacactataaaagctctatgcactcatggaggaaaaaaatctccaacaaaagaactaaatcctttgtcccttgcttgctaactgaccttcaacttcgttagctgaacaagaaccaaagaaaaggtgcatctcacctcactagcaacatctacaattttgtggagtcaactatcaaacttccatgaacctgttttcttattagaaactcaagagataacaatagaaaaatcttcctctacaattaagttggatagatacaaagctttagcctgcatcaaattctccaataacactaatatctctgccttgatagctaatcccactccgaaatactttcagcttatagtgtcttcaaggcactattacaggggttgtaatggatcatgccggattgcatcagtgtcacgtcaagataagagtattccaaaaggtccttaacgtgaacataactcctttaataataagttagaattctttcactaagacacaattagattcggataggtaaacaacactgtagtgtaactcattcaacaaataggtttggttagggtctattcttgttcaaattgaaaagcatagcctgttaaattatgtctttcactaagacacaattcaattcagataggaaccaacaccatcatgtaactcattaacaaataggtttggttagggtctattcttgttcaaattgaaaagcataacctgttaaattatgtgtcaacttgacacaattatgccttgtgggacacaattatgactgttttaacctgtttaaaactaaatctagggaaattgtagtttaacttgctttattaaattgaaaatgtaatagaatcatatgtagaactattagtgaaggttttttgttgaatttctaataatacataattgtatgagctaaacaagtcatttatgattttgggagataagcgtgtcaacttgatgcaatagttaaacaagtgaaaatgcattgaagcccctaactacgaatttgactcattcataaatggattaggaaggtcgaacacaattatgagataaatcataattaatatgcaatccaaagattccaaaccttgaaaaatggtgtcatttctgttttctgattttgttaggattgtcaccttacagggggtttttttatgaaaaatttccagtagcttttgtttggggaagaatatccttgtgcatggcttcattacccaagaattagtaaaaaatttgctactctatccatacagtaaaaaagtgaaagagggtcaaagttatttatcaacatgtgagaatatttctaggataaggtagaacaaagaataattttgaggcttgtattgatggagctgattggtgataaacaggtggataatatcttgtttgatctgtttgggaacttgaggagtgcccatcatgttgtatgatggattggatggagtgattcgttataaaattgccacttgacattgaactggggatagatttaggaacagtaggctaggatacaacttagaacaaactgctgtatttcactcagtctcaatgaaaaaatgtgaaaggaatctcatgctaaactagatcgatatagataaagaaacttgcttaagaaaataggatttctctatttactatataataattatttttgtctttaggaggctactaggaaaggcaaagtagcggtgattgatgggaaacacacatgtgcacacatatattgatcatgcagtttgcaatattgtatggttttgagatgggagatatcattattggtttgtttaatcatcttgtgattgtgagtacaaactttctaagatgagcctttctaaattacaaaagttggttgaataggcaccaaatactttcctagttcaaaagaatgagatttcaacatgcaaaggctacaaatctaaactatgtttggtttctagaaaatttgaggaaaagaaaatagagaggaaaggtagaaggaaagaaaaagtgaaggaaaataaaaaatagatttaaaattaataaactaatttttatatgttgctttaaactcatttcatttatttttttctcgtgtatgtaaagattaaacaatttaaaagtgtataaatttttaattaattttaatttctcttatgaaaccaaatatgagaaaatcatttttattaactttttttttttttcttatcttagtactttctaggaacccaacataggcaaaaagtcaaatttttaaagaagcaattttttttattttttttgtgatggaggttataatttggcttatggcatgtttggtgctaggaattagggtgggaatttagtgaataattgccaccacaatcacttagattccaatattatcttcacaaatcccttgattctgctggactgcaactacactgccaccaccttcaactttgactccttccagatgctgattttgctaccatggccacattttgtttagtttacttgttaataccgccattgcaactacccccaaatcaaaactaacagtccatgatttttagcaacctcgctactatcatttttgacaatcattgacacttttaacttaagcagtgccataactaccctcacctccattaaagcatatcaccgtcgctatccgacagtcacctccattataacattgccatcattgttattattttcaacagccataatcatcatcaccatcactctcactgcttccagtgactcgtaaccattactaccgctacagacaacccataacaaccattattacctccatgtttgttggcagaatcacccacttccacttttgtttctgatcaatgatgcttcaataaactttcaccagaaatatcaccaccaaaaatttccaaccagatgccactgtcccctgccagaacaccaccacagttacattaattttcaacattttatcagcacaacccctatcatcaccattgctgtcatcattttaatccatcatgattgccatcaaaagtatcatcattacctctaaactttagcaacttgttaccatgaataccaatacaaagccacaccatattgttcctattcttcaatctggaaattcttccaagaatttcagttttccaaatatatatataattcaaaatttggtgcaagaaaaatagactgggtgatgtaacagctttgtagagacatgattgagtaacaataaaagggaccatcttctagaatttgttagttttttttagagaaaataccaagggctagacatctaaagtgttgttgattccatgggagagcctcgacagtagctcttaccccacaatcttgttgaaaatacatcaaataaaccacaaaaagaaaaaagggaaataagaaagaagaacttaactgtctttgttgatagatgtctaaaagaaaatttcaagaacaaaaaaaatgctcattgactgaggaaaaattacatgaataagggagactatcctattatagtagtgtgttgaattctaggaatacaatctattcattatgcaatttgcagtagtgtgctgattcctaggaatacactttggtcaatgatttatcaatatgaactaaagattgtgagataatcaatgcagatatgaatgaccatcatccttggtgtattcatcataaaatcatagaagaatcataatctatgaagtcatctgaattcacaaagctttagctggttcatgatttccatagggtttcagctctgataccgaatgaaaagtgggcatatggaccacaaagaacagcattttctagaccttgttgattttcttagagaaaatactaagaattaggcatctaaattcttgttgatttgatagaataccaagaacaataggaacaaagaagaacttgctgttttccttgatagaattttgaaagaaaaaaaaaattattgataaataataatgaacatcttccaatcttcaccatattaagtattcattgactgtcatcatacagataataggaaaaggattgcaatcctacttgttttagctaatcatgaactgtaaaaatctaagaaacctaaaatgataagatgtccaaaacataggaaacctagaaaatataagaaatctaaaagaaattgaaattgtaaaaagaaaagccctatcttcatttgccaggactgtaccattgggaaaaccaagaaaggataaggacacttagaaagtaagcaatgaatgcagttagcatgatcaacattgcaatgtctacaaacttgcaaaaatctgtaaaaagaaaatcacaaatgataaagtatttgctacagtaaaaaagatgctgacttgtattggaagaagtttcttaagaagtacaaaataaagatcgcacaggatattttggaggaagaagaaacctccttgatggagaccatgggtatttctatttttacatctggtaatgaaggtgaaaggagcttctttaaggatgattagtggggctggatttggcctagacagtagtttcttgaactttttgtttgttttcttaagcttttttcactcacgcacatgatagcacacattcatagtatgaccaattagcttgatctctcaatgatttgtctggctgtggatatcacaatgtctttgtaaaaataccacaactaatcaaggttgtttatgtaagacaaaaaagaacacatggtaatcagaaaaaaagagcacatgtctggagaatccaacttcaggaatgtagaagactcaagaatggctgaaagacctgaaccagaaagtgagttgctggagaattggttcaccagatcattgtttcaagcactgtaattgtgagtccacaataaattgcatgtgaatgttaccttacacaatcagagatttatgaacttagtgataatttttaaatgtctctcacttggtgagatttattatttagcaggtatactaactaattcagggatcctgtccccctaaagatatttacaagtaattaagagttacgatttacaactatataaacaacttcaacttaaaaaatttctgcatgtcatttggctgatactaggtatgatttagtgtgtctcagg

SEQ ID NO: 13486 - DNA, 13386 bp, Vitis vinifera
  Intron number 12 from transcript GSVIVT01020836001 (locus GSVIVG01020836001) derived from phytozome v7.0 (chr-ID chr 12; pos 1291449 to 1304834 reverse strand)
gaaggtgatctttgattatgttttttttagttttactcattgctttaaggttaatttaactttttgtagtctttgacatgttttgataagcacctgtacttacattgtatgggtaaaaggaagaacttttacaaaataacatagggtgagaaatccttgctagaaggaatatatatacctggctgtggaaaataccaaaactgtagtagagcagataagtcctagcagtaggaaatgccaaaaatcaagtagaacacaccagtcctggaagtaggaaataccataactcaagtacaatacacaaatcctggcaatagaaagcctttgggttatcctgctagggaagtagaataccaaaacacaagtgggcataagatccccaatagaatcatctacagaactggctcctctctcggccaacctaaaggcttcctgatttgccaatttaagctttcatgggaaggagcatgcaaattccccaccaagatccacaatcctctgcagcaaatggctgaatctcaaagaccacctgtctatgaatctcccctagccagtaaattggtgacactgaaatctcttgcgatgctgagaccctcaagtaaggaaagcggtttcatttcaattgcttgctcaaaacctgctttcttttgaaaagatcagataatcacacccatatgataccatgtgagtttgctaatgcttacttgtcccaaattgctgaaggaacaaccagtgacatatacttcagaaaactgagagataaattgcactctaatattgcaaaatgatgataaaagtaactccaatgaactctgtggtaattaacatgtagagagatgtgagaaagtaggcattctgtcacattttagtcacctccctcttcatattctcatagatcatgccattcatttccaacttaattatacaccaccttatttatcaaaaaaaaaaaaaaaaaaacttaattatacaccacctttaggaaagtgcatgtctccctcctagaagagctcttaacagaacttcgggaaaaaataattgtcaaattagattctgtgaaaaacctgatttcacataattgggcattgcatgtaattgtaaatattgctaacctagatcaagctatttcagtggcgaagtaatccctaatttttagggactcaaattaggatataaataggccttgaattatagggatttaatattatagataggatagaatctgctcccattttctagcttagagtcgcacacttgtaaactactaaatgtactatatatcgcctggggttgtaacactttggagagatgaaatattctgatttcttcacatggtattagagcactaggctcattgggaaccctttttttttcctctggctttatgacttcgtccttcaagcttctttcttggccttttatgctgatcctacttgactttttcttttacccttttattgttgtcccttcacttcaatgtttctatttaaagcctaatttataccttttgtttttttacttgatatccatctgaaaccaaaagttataatgttagaaatcgttgaaaaatccaatcccaaagtaatggtgatagaaaacacaaactcatcatcaatagaagagttgaagaatattcaggcaacatatccactaaatggtaaaaattacttgcaatgggaaaaattatttgtaatcccacataatgtgagtcttagattggagaaacttcaaagggacttcctttgagggggaggagagttcaaaagaaggccttagctagtgaactggtcaatagttggcttggataaaaaggaagggggtttgggtgttagaaagttgtcttctttgaataaatccctttttgggaactggtgttggagatttgcttctaataatgatcctctttgaaaacaggtgattgtagggaagcatggagctttggaagacaatttgaagtgggtggaaggaattcaataacaaggtaggttttaaggtaggaaatgataggagggcgaggttttggaaggataggtggtgtagggaggatctcttggttgtggctttcctagaattgtctttgtggaagaatgtaattaggaaagattataatcctatagttttgtaattaaggagagaattaggacaatcctgtaatctaggggatttgatagaattaggctaggaaagtttatattttttgtgctaggaatatttgtataaatatgtgggtatgtatagattaggattaaagaataaatttattcttttgcctttgagttcttcattctacatggtaacaaagccttaggctcataaatctaggaagagaagaatttttttttttttttagccttcattgttgagttggaaatcatagttgactataaaaattttccttctgtctgaatcacgccatcatcgttgtctttgccagtgacaacgatccttgcacgtgatgtcttcgcctcacattgaatctctttctcgccattgctataagctaaggtttctccatcttttgctctcaccgttggtgcaagcgtacatcatgaagagcaactgactactacaagcattccttgcattgtagatatcgttggaaatcaagagtgttggacctttgacgtacttccatgatcgccgagagtgttggacctccgacgccagtgttgcgacatttgttatcctacattggcaccggtgagaactctcacactgttttttaagccttattaagagattgcgtcgttgcactcaacctcgttagacgtcttgccctagcatcgtagtcgtttcacccttgtgatgacctaaaaggaaagcccttgtacaaactctgaatacttccccacaagcaatagatcgggaagcccaggcgaacggcaaccactaaaagtcttggatgaaaccttttccaactcatgggttatagattcagatgccatagatcatatgactcattcatcataccaatttaatagctataacctttgtccaagcggtatgaaaatagtcataactgatggttcattagctattgttgtaagtgtaggagatatccatattagtcctacactcgcacttggaaatgtgtttcatgttctaaagttatctactaatgtagagtagaatctcttgtacttgtaagtaagcatcgatcattctttctccagacgccgcttttcgtcgatctctgagtccaagatttgaaggcctcttcctttgagctgttgtgaggcttgtattggactcctttgaaacatccaagcaagttaatcaacctgccttgagtaatcttgtataatttgctaatcagtgctgaggaaacttgggccatcatcatgccggtaacttcctctggaggtaggtgttggtttggtgttgagttgaagacgtttgagattagcatagaagatcacaaaggaaaagtgcgtgggaagatctgtgaaagaggccctaagttttcttcatgggtcagatttggagggaaaggtttgtctctgctgctagaaggggttgagtcgtgttgtgggctaaaggaaagaactcctttcaggaagttttggtcggaaggagatagagactacagtctggaactccgtagtaatagagcaaggagattcttgttttgcattgtaagagatgcggagaacaaaagattctctttggcttttcttgaagggagagggcttgttggaggctggaaaattctcgttagcaagctaagaagtttgggagtctctccccttcagtggaaaagagccatgttggaaaaccacaaacctcctcaagcttcgcctagtagtagtgtaaacagagacacttcttttcttcgggattgccttgcgcctcacgatgccgtctggctagaaattgaggaagaaactctcaatagaaatgaggagctgctgggtaggtgtcttataagcttgtgggagggagactctgatcgccttcctaacctcgtttccttcagatcgtgggcgaaaaactcctggttcttggaagggaacctatggttgtcaaatgtgagagaaaatcttatgcttctggagtttgaatttgcggacgaagcagagagggtgtataattcagggacgagacgcttcagaggaagaagcttctgcctagaaaaatggaagccatctgtgggatgcctagagggagacaaagggggtgcgtgccttgtgtgggtcagaattttaggtctccctttgcatctctggggaagaagtctcttcaagatgttttgagactcttgtgggaggttcgtggctatggacgaaaacacagccgaacgtcggaacctcaagtgggctagagtcctcgtcaaaaccagatgttggcagcacccaagttcgctgcaggtggttgctggaccctcttgttttgctctacaactttggtgggaagaagagccctgcttttccactgggctcccctcccactagtttggtacttggaagcttggggaagacgaggtggccccttcacgcactaaggggagcgtggactcctgaccttcttcctcagtctttccgtagcctgaaaaattgtcttcgccggtcttagggagtggtgcctctgcctcggacaagatcggtgcagctgctcccctttcccatgcttgcgatgtggagacggaccagcgtctggatgtcttggcccattcgggcctggactgtggtaactcctttgggcttgggctagggaaggcccaaatctcagccactatgggaattccacttaagcccttcggtccagccccttccatcgacttaaggcaaggaagccttaattgctcgccatgccggaggagaggaacccccgctccgccttctgccatcgcagggacccctcagttagaagcgtcgtcgcctgcgaatgagcttttcctcctcgtcgaagctcgcaagacccaccaaatggaagcgttgccccaattggaagcgtcgccgcctatgaatgagctttccccctcccgtcgaagctcgcaaatcacaaggtatgctctctcaacctccgatctcctcgagagggagtcatcctcttcttctactccattatgggatacaaggtttgagagggaaaggggatcttgctctggtttgttggaatcgactccaagggaggccgaagcgacgccgaaccctctggccatgatgctcagagatgggttgacagtggttgtgaatgaagccccgagtcctgatatggaaaaagatgtggagaagtagagagacctgtcgactgttcccccgtgcgaagaaggatggtcagaagaggagctctccaaactatttcactttagtaaagtcttgggaatgcctgtcgaagggaatgaagtcaaaattctggccatgcttaagaaattgaagctaaggactagaagtaactccctatgcaagagaaagaagaagaaaaaatcttgcaccacctgcttcgaaagagagttaaaaagattggaatgctttgttagttatgggggggacatcagggataactaaaaaatccggtcagagctcctgggatttgattctagttgattaatgagaattaaaattctctgttggaatgttcgagggtttaacgattgtgagaaaagaaaactgatcaagggaatggtgaggaatcaaaaaccagatttggtttgccttttaaagacaaaggtgaaagaaatacctttgctctcttttggaataacagagtcttggagaatttggaggtagaaaaccgggggtactccatctttgttcgttttagaaactgtgctgatggcttctcttggattttctctggagtgtacgggccagtgatgggtagcgaaaaggaagatttttaggaggagcttggagccatccgtggcctctaggaagacccttagtgcataggaggggactttaacgctgtaagattccaagaggaaagaaggaatgccactagactcacaactgaaatgaagagattttcagaggtgattgaggagctggggctgagggattttccactggttggaggtcctttcacttggatagggggtttgaactctcaagctgcctctagattggaccgtttcttgatttcggaccaatgggagaaccaaatttttagccatcacacaatttgctctccctcgtttggtctctgatcacaaccccatagtcctagaagttggtggattctcttcaggcaaaagccccttccgtttttataatatgtggctgaaaatagatggtttcaaagacctagtaagaagctggtggaatggttattctgtcgaaggctacaatagctactgcatcgctgagaaactcaaagcgcttaagaaggacctgaagaactggaacaaggaggtggtaggcaatgtctcattcaatagagcagaggccttctcccgcctgcaacgttgggaggccaaggagaatgaaaactctcttattcctggagatgtggaggttaaaaatctggctgttgaggactataagaaatggactattttggaagaaacttcttggagataaaagtcaagagaaatctggttaagagaaggcgataaaaataccaaatatttccacaaaatggccaatgctagggcaaggaggaactttgtgtctaaaattagagtgaatggggtgaatctctcttccttggaagatataaaagaaggtgtttgtagagcctaccagtccctcatctcagattctggggattagaggcctagtatcaatggccttaactttaaggagctgggataaggcttggccaacagcctagaagttatgtttcctgaggaagaaatctttccagccctaagcagctactgtggtgacaaagccctaggcccggacggcttcacaatggccttctggttgttttgttgggacgttgttaaaccaaagattttgggtttctttggggagttttacatccatgggaccttccaaagaagcttaaactccacgttcctcttgctcattcccaagaaggaggggaccgaagacctaagagattttagtccaatcagcctggtagggagtgtgtacaaattgcttgccaaagtccttgccaataggctgaaatcagtgatgggagaggtgatttctgattcttagcaagctttcgtccatgggagacagattctggatgttgttcttattgctaacgaagcccttgattctagattaaaagacaacaccctaggcctccttcttaagatggacattgagaaggcttttgaccatgtcaattgggactttctcatggatgtgatgtctaagatgggatttgggcataaatggattaattggatgaaatggtgctgctctatggttaccttctcgatcttcatcaatgggagcccttcgggcttctttcgtagctctaagggattgagacaaggcgaccctctttccccttatcttttgttgtttgccatggaagctcttatctggttgctatcttgtgcaagaaatgggggctttatttctggttttagagtgggaggaagaggaagagaggggctatttgtgtcccatctcttgtttgccgatgacactttgattttctgtgacgccgatgcaaatcagttgcaatatcttagctggaccttcatgtggtttgaggcgatttcaggtttaaaagtcaatctgagcaaaactgaggccatctcagtgggggataacattcctatggagactctcgccttggttttgggatgtaagatagggagtttacctaccttctacttgggtcttccccttggagtcccctacaaatctattagggtgtgggatgaagcggaagaaagattcaggaaaaggttgtctctctagaaaagacaatacctctccaaaggtgaccgtcttaccttgctaaaaagcaccttctctagcctctcaacctactttctttctctctttgtgattcctaagagggtgtgtgcagggcttgaaaagatacaaagggatttcttatggggcggtggagccttagagaataaacctcacttggtgagttggaaggttatttgtgccgctaaaaaggatgggggcttgggcattcgcagtctagctacttttaacaaggccctttttgggaagtggttgtggagatttgctaatgagaatgagcccctatggaagcaaattatctctagtaagtatgaccttcaagaggggggatggtgctccaaaggagtaagagaccgttatggggtgggggtttggaaggccatcagaaatggttaggagaactttcgatctcactcccgcttcatcgtaggggatagcactagagtgaagttttggaaggatttgtggtgtgaaaaccaatctctggaagaagctttccccttcttgtttaatctctctgttaataaagaaggctgggttgctgaggcttgggaggaaaacgaagttaggggtagctgggggcttcgttttaatagacaccttaatgattgggaggtgggagaagtagaaagcttattaagcaagcttcatcctttgaccattagaagaggtgtggatgacttgctccgatggaaagagaacaagaatgggaccttttctgtcaagtctttctatagcttattctcaaggggcatcaagccccccttcctggttagaactatttggacgctttgggttccaattagggctagcttctttggttgggaggcggcctggtgcaagctgctcaccattggccacctgaagagatttggttggagcatcccaaacaggtgctttttgtgcaaatatgaggagaaaaccacagatcaccttctcttgttttgtgagaaggctagaatgttatggcttctaatcttctccctttttggggtgcaatgggtgatgcactcctctgtgaaaaggaacatcttaggatgacatggatcttttgtgggcaagaaaatggagaaagcttggagagttgcccccatctgcttgatttggaccatttggaaagaaaggaatagaagggccttagatgatattgagaggaacgaccaagatattaaatccatttttttgtacacttttgtgaattgggctagggtgtatatagaggaacacactctctatttgatagattttgtagactggctagccaccaagtaagggtcagacttgtttatccttttgttttttgcttctttgtatcttggtatactccgtgtataccctttctctagccttttgactcttaatgaattttctttacctatcataaaaaagttatctactaatctagtctctatacaaaaacttacataagatttaggttgcaatgtgattttttaccctacttactgtgtatttcaagaccaatatttggggaagatgattggacttgttaaggaacaaaatgggttatactaccttgagacaccaagcaaatcatccgtacctcttctttctgagcaccaccatttttttttttttaaatttggcttcatcatcataggcttggacatccatcgtttagaattcataagatcttgtttccttctctgtttaggaaattagatgttgagagctttcattgtgaggtatgtgaactagccaaacataagcattcaaccttttcaattagtaattaaaggagttcagagcctttccatttagttcatagtgacatttggggtccttttgctatcctaaatatatttggggtttgctggtttgtgtccttcattgatgattatattggggtctcttggatctttttacttaaatacaaatttgatgtgtgttttgttctcccaaatttccataacaggatgaaaaatcagtttggtgtcactatcaagaggtttcgattggacaacgccagagattatttcaatcacgtcctaactccatactttcatcatgaaggtataatttatgaattatcatgtgtaaacaccgcacaacaaaatggagttgctgagagaaaaaatggtcacctccttgatgcaatacaagtattttttttccaaaaacatgtgtctaaatcttattagggggaaactgtcttaaccactacacatttcataagctaattaccttccaatgtcttaggtttcaaaagtcccatggaaatactcgtcattttatcctaatatgagaactacaaaccatctcacttctaaaatatttgggtgtgtctcctttgtgcatgttcacagttcaaataggggaaaattggacccaagagcaatcaaatatatttttgtgggatattcattaactcaaaagggatataggtgttatcatccaccatttaaaatatttttgtctcagctgatgttactttcaacgaaggtgggtcttattttctcactccttatcttcagggggagaattccattgaggaagataaggatcaagatttttatttcattgatcctcttcttattgacccacctaaagtgttagatctagtatctatacttgtcattgattgtattgaccctcctaaagtgtttgatccagtatttatacccttctttgaacccgagttatccattgagcctgctcttgagaatcgaatgattggcaaagtgtattcaaggaagaaagttgtagttccttgacttatataagtccaagaatctaaaccgacttttggaaatgaggtaacggtctctcatcttcccttacaaactgaatcagaacttcaatataaaaaacccatagaccaaaacctccttattgccatcaggaagggaacgagggaatgcactaaatgtcctttgtatccactttcccatgttgtgtcaatttaaacattgttttcatctgataagtattttcttataagtttgaacaatattcatattcctaccactctattcgaggctttatctaatgaaaattggagacaagctatgaatgcagaaatggagaccttagagaaaaataaaacttgagacttggtagatttgtctgtaggaaaaaaaaacaatgggatgtaagtgggtctattctgttaagtatagagtagatgagacattagagaggtacaaggtgagatcggtggctaaaggatatacttagacatatgacgtgaattatgtagaaacatttcctcggtttccaagaagaacataatcagagttttgttatcattggtaacaaattataacttggatctacaacagttcaatgtttaaaatgcatttcgaaatggagatttgcaagaagagatttatatggaagtccctattggatttggaagtgatctagccactaaaaaagtgtgtaaattaaagaaagctctatatgggttaaaataggatctaattcgttgtctttttttgattttatagattagatgggttgtaagtgaggagagagtattgttttttatgtatctctcctttctcttattttcaaactgattattgtatcgattttatacatgaatggttgaggccatctgccctataaaagaaatctaatccttgattttaggagagaaagtctctcataaaattaggaaataaaatccaaataggaaatacaactatgttagttcaaatataattgtatcatagctatgacatagttgtgatacaactataacacaactgtatttgtaacacaattgtgcacacagttgtacattttggatttcatcaggatttccacactcccccacaagctaggttacaaagttgattattctcaacttggatctcaagtcttcaaagtcggttctagaaagtgtcttggcaaggatgtttgttgtttggagagttgttggagtgtaaaccaatgaaattattttctatattttcatcttgataaaatgacggtatgtttccacaggctttgcctgatcacgatgaactgagttcttagcgatacttatgacatcttggttgtcacagaacatcttcatagaatcttctgttaatttttagcttgtttaggagtttctttaactacattccttcacagattccatgtgtcatagctctaaattctacttttgcactactctgagctataacagattgtttcttgcttcgtcaagtaactagattcccccatacataggtgcgatatcctttgatcttcggtcaattatggagccaacctaatttgtaattgaaaaaatttcaatgtttctattctgcgttcttttgaaatagagtgccttcttggagtcattttgagatatcttagaatacgatacacaactttcatatgttcctcaattggattgttcatgaattggctaaccatgttgattgaaaaagcaatgtctagtcttatgtgagaaagatagatgagtttccctacgagtctttgatatcttcctttatacactaaagcacttccttttacaatttctagtttagtactgtagtctataggtgtgtttgcaggtttacaaccaaacatcctggtcttctttagcaagtctagaacatacttccattggaagattgcaatacccattttagatctaacaatttccatcctaagaaaatatttgagattccccaggtctttaatttcgaattcacgggcaacaaaactcttaagtttgcctatttcttcctcatgatctctggttaggattatgtcatccacataaacgttgataatgatagttcttctcccaactatgtgtacaaatagagtgtgatcaaattgacactggcaataaccaaacttctttatggtcttggtaaaacaatcaaaccaagcttgaggagattgcttgagatcatatagggaattttttattttatttatttttttaagtttacgactttgttaatgtttgtcttagtctcaagacctgaaggaatttccatttacgcttcttctaagtcaccattgaggaagaatcttatataatttttacagtcttgcatattgtgtgtgtgtgtgtggtgtgtgttttaagtttgttctttgaaaggtctttcagccatttctttttctaattctagaatttgggcttttgttgtaatgattttcattgctttgtaatgggctaggcctaaatcatttataggtcaatcagggtccaacaatgctgtttatgttggttaagagtttcaatctaagtaactattgagattgtgttagtgtattatgttaattttatcatatggaagaaatggactgaatttgtaatgctttgtcactaagtactgcagcatttacatcgttaagcccctcaaatgcctttaaggtttcattcttgttgcttcttggtcaggtgtatttgggatttcatggtatcctttggtgctttttactatgttcatttacatctgatcaggatccttgaacttcttatgaggaatttcctggtttaattgatgcttcttttcaccttttctcccttttgttttcagtgcccctcttgctcgaatca

SEQ ID NO: 13487 - DNA, 3532 bp, Vitis vinifera
  Intron number 5 from transcript GSVIVT01032335001 (locus G SVIVG01032335001) derived from phytozome v7.0 (chr-ID chr1 1; pos 15151046 to 15154577)
ctttaggttctggaattggtctaaagtgtgctgtggtgagctttctatttaattaatttgatgtggaggcaggtctctcgatatatgatcgtcaaatttaccatttcagttacagacctgtacttgtttggcacatacttatagtgctcttcaccctgatgacaatactgattcttttctttttatccattatatcagtgttgttcttgtcatgtttcttgtctgtgaagaataattttgacattgacaatagtagaatatggtaactttttacccattgtatatgtcttgtgcaccttcgtgtatagtttctttgaggttaacaatatttttattttgtttacttatctagaaaaaaaaggcaactttttaataccattttgaaagtaaggccctgttgagggggtgtttttgaaaacagtgatgaaaaaactagtttttgaaaactgttctttgatgttttgtagagtaaaagtatgtttaggaacctgaaatgttcttaacctgttttctatatttttaaatatgctttaaaaataacttttatctgtagtgctttatttttaatcattctccatatttgtatgttttattttttaaaagagccttaaaaaaataagtgaaaacaactgaaagtaactaaaagatgttctttaaaaatagtgagttttttgttttctggttgccaaatatgtttttctgttttttatttttatttttttatttttatttttttttgttattgagcacataaaattgttttcatagacattttccaaatagggcctatggtttctgaattttttgctagtggttttcacattattgtcctctataagaatccttgtaagtttttattcattttcaatgttttaagttatagcatttggaatggtaagtgcaaatattgtttctgtattattttcattgggaaaacaaatgttgttcctttatacttagtagaaacttcagctaaagttcagatttcagacacattttctttgctagataacttcttttttgtgaattgtatttggagtaaatattgttagtttataagtcctttgctacacccttgatcttgttgtagccttcatgttcttcaaccaattcaggaaaggcagctggtagtttttgtgtcattatgtgagttcaagtaatctggaagtgttaagttgaaactatgttaaagtaataagaaccaatgactttttagatactgcaccaagttcaaaattatggtagtggacactctgccagtgttggtaagagaaattgaaaaataaatcatccatctactgaagaataaagctgagcctttaacacataatttctcactaaagccaggtgacttttgggtgaccagctcctggtatatctatttatttttaagaactttcttggtggataaaaatcttcaaaaaataacttaagagggaaaaaaatcatcaaagcttgcctgtaagaggttgggccttttaagttaggtctaaggcacatttaatatgcattttttgacattccatgttatcacctctttaattttatcttagtggatgaatctgtcccacaatagtagctgccatatttttctgcaatcttctgagaatgagtttgtagttgtaggcatgcagctactatacattttttgtctgtgttttcattttaatttttttcttaagtaaattggtgttgtttgatgaaaaccagagattgttgctcttgggatttctatatgcaatatgattgcattagttcattgttgcaactttgcaatacaagttgatatatacaccaggttgtgcatcactatgctcaggtgggtgccaaagcatgcctttaaaactatagctgagactatttgctatttgttttaaatgaaattttattgttttaatcttgttatcatggttcaaagtcgtagtattggtcattgacttggagggtcttgaggcatattggtcttggtttctcagatcgatatcggacaatatgcaaaatatgttaatttaagaactttataatttttaagagaattattaaaattattgcaaaaataaatgtaatcaaatagactaaaaaaaaataataaatatatagaaagaacattatggactagatttaaaacttttttatttattaacttgtaataaatattagataaaactagtaaaaaatatttttataataaatgtttgaattaaatattttaaaaattttaaaaatattttcaaccataaaaaaaccatgaataacctttaaaaatttaaatatcattttttctatcaaatatattctaaataaaacttttataaaaaaagattttttattaattttattttcatttgaagaaataaattttaaatatgtatatatatatatatatatatatatatatatttagtgattctatacattagttttaaatatttttattgatatttatattccatttaaatatttataatcataaatataatcccacgtatcccgtcaaaagtcccactctcccattttggtcctctttctcacctctcttcaacacccatttctcccccatttttggtcacaaacctcactcccatctctctgcatgactgcaacacacgcatgtatatgcaaaatactctctttcatctctctgcaatagacccatttcagaaaaatacccctttcattttttttgcttctcatgacatctccccacgatacccatttctctgcaacgtacccatttgtccgaaaaatacccatttcatgtctcaacaacaacttctcacgtcatcttgaaggtttgaaggcattaaaccggagataaatcagccatacaaggatgcaaaggtttaggtttgaaggatgaagatgcaaatccgctccgaattgtccttgcaaatttcttcatttttgtggtttttgattttctccaccaattttgacttggttatcagtccggtaccaggcatgactgaggtggatatgactcagccgagtcataccaatttctgtcaatattttgaaccctgcttattatacgtctggattaagtaacttatgcctactagctctactgtgctatagtgaagttaatgctgccttagttcattgttgcaacttcgcaatataatttgatatatacaccaggttgtgcattactatgcccagatgggtgccaaggcatgcctttaaaactatagctgagacaccattttctatttgtcttctatttttttgatagttacatttctgtgcaatgctgaaaccatttgctatttgttttaaatgaaatttactgtatcttgttagattggaatgcttctggattaacttacacctacttgctctattgtgctgtagtgaaattaatactgcctgggtaaccgtttgatgcttcaattccaaaaattgaaatatactgtatgatggaattctggatgtttaaccttccctttttttacaatatgatcttggtaaacaatgccttcatcccttttttgcagcttgttggaggagtggaccatacacaacaagcaat

SEQ ID NO: 13488 - DNA, 6113 bp, Vitis vinifera
  Intron number 2 from transcript GSVIVT01022281001 (locus G SVIVG01022281001) derived from phytozome v7.0 (chr-ID chr7 ; pos 18155656 to 18161768)
gagagatcacgagaaattgagccaagagagagcaggtgatatttccttactttggattgaatgtgggcttgtttcattatggttgttgatgatgaatgtctatgcaatgcatatagtcattattcttaagctaaaaagacccagtgtcatttaaaatgaaaagaatgaaaggcaatgctcaaatgtagaaggattgcatctgcattttaagaagctaacaataaaggaacttcttccaggattcaataaaagaagtggcatctttttacaaattgagattagtggctgaattgtttctcttctggacttaaaatggattgcatgaatttgtttgaagatttagtgtttaaaggaagggccaaaggagggaaagaaagaaagaaactagtaatttatgttaaatctcaacatttcacatattagcctattgatgcttttagtattatatcctaatctatataactacctacatttaaaaaaaataatattgcttggtgtttcggcatatgatacataaaaacctaaatatgtttgttgttgagatttattttcaaaggtttagtgagcatttgcatagatttttttttttgataggtaaataaacggcttgtattagaaatgcctaaaagtgacgaaaacagtacacatgaagtatacaaacaatgcccagaaaaatttagtaatgagacaaaaaaggccttccccttacttgacaaacaaccaatctataaagtcaattgtagacaaagtgtgatcctttatacacaccctagcccaatttacaaaagtatacaagaaaaaagatttaatagcttggtcagaccgcttgacatcattgaaagttctttcattcatttccttccataaagtccacattaagcacaagggggcagctctctaggccttctccctttttcacctacaaaagagttataccaacctaacaaattcctcctaattaaggaatgcataacccattgcacaccaaaagggaagtaaatcaaattccacaacattctagccttgtcacaaaatgggattaggtggtcagtgggttccccctcttctttgcacaagtagcaactattcgatgtatttcatccctttcttttcagttggtcgatagtcataattttgttccaagacacttcccaagtaaaaaaactcaccctcactggaacccaagacctccaaataatattctaaggaaaaggatctttaaaagcctcgatgtaggagcgataaagggatctaattgaaaatttgccattctttctctccagctcaaaatatccttcatttctcttctcacaatcaagggttgtagtttttggaacaaggactccacttctcctatctcccaatcattaaaatgtcttcaaaagcgaggactccaaccacccaagtccctaccctcctcccaaactcctgacacccaaccatctttattaactggcaatagaaacaagttagggaaagcttctttcaaagtttggtcctcacaccacaaatctttccaagacttaacccttctcccattccctactataaagtgggatctacatcttatgccttcccattcattttttattgttgatgtatgaaaaaatatctataatatggtagaatctgaagcgagaaaatgtttgcttttggtgggttaacagtccgaaacaagatttttccttggcacatgttcacagtgctgtttaatgtacatgtatatgcttacatgctacctagtaaggacatcaaccctgaaaaagctccatttcactgttggggtgaccactttccttgaatcagctgtgggggtaactcctaatgaagaaagtttctccattgaaatgcaccaacctccaagggagcccctcccttttggaaagatcgaagtgaatctcttagcctctgtcggaacaacaatgcaaaagaggaagtgaggaacctcccttcgccatttgaatgacgctccaacttgaacttcctccctctctcctcccaaactttactccatctccgcaactctttgtctctacagaaaatcctaccccttccaatgagtatcttaaactcaactccttgaatctaatgcaagttgagaaacctctgccttgttccacaacgacacctttcaacctcccatcaacctcctcaacagaaagatcaaaggactttgagtccacagaaaaccaacactgacctcctatcattgaagttagattcatcttagatgcccagtatgagacataaaaaaggctaaaagatgctacccagctgttgtggtttcaatacatgttgatatagctgttgtggtttcaatgcgaggggggcatttggggggattgtagtgttctgggatagtagagttcttgagttggtgggtatgaaggttggggtttgctcaacttcttgtcagtttaagaattgtgatgatggttttgtttggttttttatacagaaaagtgttagagaggatttttaggcagaatcgggggctataaggggactatggaatgacccgtggtatattggggatgatttcaatgttgtaagattccctcaggagcattctggtggcaaccagaggctaattgtagcaatgagaagattttcagagaaaatagacaagcttcaactgagagatcttcacttgatagggggtccttttacatggaggaggggtttgaatgatcaagtccttgcacgattagaccccttcttggtgtctgatgattgggaagggcacttgaatggagtgttacagtacttgttgcctagacccgttttagaccatgctccaattttgttggatgggggggttgtgtgtagaggcccttctcctttcaggtttgaaaatatgtggctcaaggaggaaggttttaaggagttagtgaaatcttggtggatgacccctaatttagggggtcccccagctttgttttggtagaaaaattgaaaagccttaaaattttattgaaaaggtggaacactgaagttttcgggaatgtggttgttaagaaattagaggccttgtctcaaatggaattttgggattctaaagaggcgttgggtaccttatcctttgaggaggagtctgccaagaagagcttaagggcggattttaagaaatgggctctaatggaagaaacaatttggaggcacaagtctagggaggtttggctgaaggaaggggacagaaacaccaatttcttccacaaaatgacaaatgctcatacgaagaggaatactgtggctaaggcgaagattaatgggatttctatcacagaaaaggttgacataagggaagggattattcaggcttttcaaaagcttctattggaacctcctcgggagtggcgccctagcgtagaggacatgtggtttattgttcttcacagtcaagatgtatcaaaattggaggaactgttttgtggggaggaggcgttcatggcactgtcaaagttgaatcgggataaagctacagggctggatggcttttctttggctttctggcaacactgcagggatgtagtcaaggttgaggtcttgagtttttttaaggaattccatgaacaagggtgctttgtgaaaatcctcaatgcaacattcctagtgttggttccaaagagaggagctgaagagttgaaagattttaggtcgataagtttggttggtagcctatataaattattggctaaggtgttgggtaataggctaaagaaaatgatgggaaaagtggtctcaaaacatcagaatgcgtttgtggaaggaagacaaattcttgatgcggtacttatagctaatgaggcaattgacgcgatgttgagaagtaatagagtaggggtgctttgtaaacttgatattgaaaaagcttatgatcatgtaagctgaatttttttacttgaggtgttaggaaaaatgggttttggacaaaggtggatcaattggattagtttgtgcatctcaactccaaggttctcggtgttagtgaatggtactctctcggggttttttcaaagctctagggccttaaggcaaggggacccgtgatccatgtacttgtttgttctagctatggaggtgctcaatttccttcctggaagggcaagagagggtggctacttgtctggcttcaaagtgttagggagaaatggagaggggcttggagatttcctatttgttgttcgcagatgatacgctagttttttgtgaggccacctcttcccaaatgacttagttgagttggttattcatgtggtttgaggccattttgggtttgaagatcaacttagataaaagtgagcttattccggttgggagggtgtcgaatgtaatggagttggctattgtttttggttgcaaagtgggtgcactcccaaccacatatttggggctccctctaggagctgcccataactcggtggtggtttgggacaaggttgaagaaaggttcagaaaaagattaggaatatggaaaagacaatatatttctgaagggggaaggttaactttggttaagagcacgctagctagcttgccaatctattttatgtcacttttccggatgccaaggagagttcgcttaaggttggagaagattcaaagggactttttgtggggaggtggggctctagagaataagcctcatttggtgaagtgggatattgtttgtttaaacaaaagaaaaggaggtgttggagttagacatcttaactctctaaataaagctctcctttgcaattggatttgacagtttgctaaggaaagggatgccctttggagagaagttatttgtggtaaatttggggaattggaaggggttggtgttctaaggaagtgaggggcacctatggtgttggtctatggaaggctataaggcttttgtgggagttagtctcttctagaactctctttgtagtgggcaatgagagaagggtcaagttttggagagacagttggtgtgaggatgagcgtttatgtgtgtcttttccctccttgttcattctagctagctcaaaagaggtttgagtggcggatttgtgggtgcactcttttgaggggggtggctggaacccaaacttctctagatctctcaatgactgggagattaggacggtggaatgcttcttgtccaggattcaagacaaagtggtggttgaggagagggaggatgaggtgttttgggaggttacaaagagtggatccttttttgttaagtccctctattatatcattgaggaagtaagggtagaccttttcccaactagtattgtgtggaatgcttgggttcctcctaaggttagtttttttgcttgggaggcaacatggggaaaagttttgactttagaccaattgcaaaggagagggtgctctttagtcaatagaagcttcctttgttatgctcatgaggagtcaattgatcatatactcttgcattgtgaaaaggcaaggctattgtgggagctcttgttttctttgttcagggtgtgttgggcgattcatgcttttgttagagagacccttttagggtggcatggtttgttcattggaagaaagaggatgaaagtgtggagagcagcgcctttgtgcctcttctggacaatttggaaggggagaaatagaagatcgtttgagaatatggaactttctattcaaaggctaaagttcgtgtttttgtgcaacttattatcttggacaaacttgtttataaaacatgcttctatgtcctcagttgattttattgattggttgaggacagattgagggagggagtatttttgtcttccttatcctttttggcgttattaggcggttgttgtatacactgtgtgtactttggtgcgctccttctggcgattttatacaatttgcacttacccatctaaaaaaaaaaaaatacatgttgatatggcaaacatggatgtcatggtcaatttttggtagaaaatatattttttatgctttgctattcctttttcctggaattattatgtccttgtcaagttgaattcatcaaaattttgaacttatttccccattgaatttcttcttattatattaaattgatgtggagggcaggagatttaaagataagaaagaagctgtggagcctg

SEQ ID NO: 13489 - DNA, 6914 bp, Vitis vinifera
  Intron number 3 from transcript GSVIVT01013164001 (locus G SVIVG01013164001) derived from phytozome v7.0 (chr-ID chr2 ; pos 7324143 to 7331056)
cagaatctgtaattcagttgaccgtgaggcctcgatttttgtttctttctttaaaattctatctgtgtaatttttcttaggaatatagcatatgtttgattttagctaattagcttgtcaatgcacttaatcaagaaagttcttaagcaatgctggtaaagcgaagtgtcagttaagtcttttgggatattaataactattgtgtattcatgctattgccttctgtgaaaagtttggagaactaaattggaattaaagaggttagtttagataaaactagagaactaattaaatcatctgtttatagacgatgatttatttatttatttttaagttttgtgttgtcactggtgataagtttaggaaagactaaataagcttaaatatcattaagaatgtttaagaaggctgtatgctcagcaaggaatcaatatttcatagaactaggataggaaattgggaaggttgacctattcctatttgtgatcaatttggaaaagcatagacttggattgagaaatcacaatccaactcgacccaaccctaatctactctaacatatccatatttaatcatttattatgtagttttatttatggttatgttcttatatgtaagatgttaaattttattgttatttatttatttatttatttttaaagctataatgagattttagtggtgagaaattatcaataaccattgatgtttttagaagtggcataaatttaaaaaggaaatggagtggataaagtataatatgaaatagaaaatggagcaacccattatcagaacgttgatgggacaccatgatccaaaccaatgtttgttttttttttttaattatataaaccataattgttttcatttcatatgtattataagcttttatattgttttgcaacttatttaaattcctatctatagtgcagggttttgtaagtctaatagtcactcttttgagcatggactggttagttgacaatgtgcttaagcattaataaatacaaaatatataatttagtaagaacattcattgctcacctaaattaagcaacccaatcaacatgacttaggtcaaccatgggttgaaaacttccaacctaaggtgcagtttggttgaattgtgatattaccatcctttaacccaagcgagttaatccatattccctcataactaggcttggaaacctggcaggttcccaattgggacggaccaacttggaaatagataggcttaggttggtaaattgtaatccaactcaattcaaccctaattcaagtggatggctacgaaagaggaaattctgggtctttttcgaaaattggaattccgaacaaataggaagtctatggggcaggtggtgaaaaagcctagcttcgatgggtccaaatttgagagggagctaaggaaattggaatgcttagtctcttataaaactaatttgtttggtgggagaagaggaaggaaattttctaggaaattagtcgaagtgtgtccatgaagctaagaattttttcttggaatgtgcgtgggattaatgagggggataagtgctgaatcattaaatctatgattcattcccacttggttgaccttctctgtcttcaagaaacaaaggtacaacaaatgacaacttgcctggtaaggagtttgggtgtggggaggtgtttagactggggggctatgtatgttaggggtcaattagggggtatgttggttttttgggacaatcgggtgctggagcttatggatatggagttaggtgcattttcagtttcttgttgtttcagaaattgcggggataattttatttggatgtttgtaggggtgtacggccttgttttggctgaggagagggaagacttttggaatgaattgagtgctattagaggtctctggaacgatccttagagtgtgggaagggatttcaatgtactaagattctcggaggaaaggaggaattgtcaaagattatcgacttctatgaggcgtttttctcaatttattgaggagatgtgccttaaagatcttcccttttctggtggtttgctcacttagtgtggtgggtcaaataatgggtctgcctttaggttggattgctttcttgtatttgatgattgggagaatcatttcaatgggctgtttcaaagcatcctttcaaggccagtctcagatcatacgccaatattgttggatggtggagagataaggaaaggtaagatacctttcagatttgagaatatgtggttaaaggtagaagacttcaaagatcttattaggaattggtgggaggggtacattgttcaagggtccttttgtcacattctggcagtgaagcttaaagccttgaaacaggacctgaaaacttggaataagaaggttctcggaaatgtgaccaccaaggaactggaggccttggcacaactagggttgtgggatgcaaaagaaagggaaagagctctcacagtggaggaaactgaggttaaaagagttgtggtggatgagtttaagaaataggcagagatggatgaaatctcttggaaacaaaagtcgagcgttgtggctaaaacaaggggacaaaaacactagattctttcacaaaatggccaatgcttgtagaagaaggaactttatggccaagctaagggtagacggtgtaatgttagacggggaggatagcatcaaagaagcaatcacaaatgcttttcaaagaattatggcagaaacaggggagtggaggccgagtatatatgggctggtcttcgattccttgcagcttgttgatctgaagctgtggagacccctttctttgaagaggagatccttgtagctttatccaacttgagtggagataaggccctaggcccgaatggtttttccttagcattttggcaacattgttgggattttgtgaaacttgaggttatgggttttttggctgaattctatggcttggggtcttttgagaggagtttgaatgctccattcttagttttggtgcctaagaaaagagggtggggagaagggatttgtagatgacctaaaggactttaaacctattggtttggttggagtgctttacaagcttttggctaaggttctaaccaatagacttaaaaaggtggtgggctccttaatttcagattttcaatatgtcttatggcgggaagacaaattttggatgctgtgttgatagcaaatgaggccattgattccagaattaaggacaatttgagaggtgtcttatgcaatctagacatcgaaaaggcttatgaccatgttaattggaattttgtcttgacaggtatggagaaaatggggtttgtctctaagtagataagatggatcggatggtatatatctacaacatgtttctctgttttggtaaatggttcatcttcaggtttttttctgaaattctacagggctgagacaaggagaccctttgtttccttgtctgttcattttggtgatagagactctttcctacttgctctctagggcaaaggaaagtggttttattaatggttttttagtcagaggaaaaagtggtgtgggagtagaggtgtctcacttgttgttcgcaaacaattccctcattttatgtgatgctagtaaggaaaatcttgagtatctgagttcagttttcatgtggtttgacgtgtgtttaggattgaagatgaacttggggaaaagtgagatgattccagtaggaaatgtcctaaatttggaggagcttgctaaggttttaggttgcaaggtgggtgccatcctaaccacctaccttggtctccctttaggtgttcctttcaagtcttctaaggtttgggaagggttggaggagaagtttgagaaaaggcttgcttggtggaagaggcggtatttctctaaagacggaagacagaccttgattaagagtaccttatctagcttaccgatttactatatgtccctctttgtcatccttaagagggtagtggctagattggaaaaaagattcaaagggatttcttttggggtgggtgagctttggttaaaaaaacccatctgttgagctggttggttgtttgcttggaaaaaagtgaaaaggggattgagatttagaactcttgggacttttaataaggcccttttaggtaagtggttttggagatttgtgattgaaaaaaatcctatttggaaatgggtaattgttggcaagtatggacaagaagatggggtttggtgcatgaatggggtgagagagaagtataaagtgggggtttggaaggcaattagaaatggttgggaggatttcgaagttagaacttgcttcatggttggttctgggaacaaggtgaggttttggaaggatagatggtgcggggattttccattgagggatgctttcccgaatcttttttctatagcctcctctaaagatgctcaagtggttgatgtttgggacggtggtagttgtaatcataggtttattagacagttcaatgattaggagttggagaaagtagacaacttctttgggaggctacatgatcattccctttctatggattctaagaacttagtggagtgggcagacacagagtggtgttttttgagttaagtccttctacttttccttggatagtaggggagtagatcctttccctcatggtacagtttggaactcttggtctcctattagagttagcttctttgcttgggaggcaacttgggccaaaattttcactctgaatcaactcagaaagaggagttgaacaatgcctaatagatgctacatgtgcaaagaagaagaagaaatgagtgatcatattcttctacattgtccgaaaactcattttgtggcaattgatttttgctttatttggtgtacagtgggtgatgcattcttcggtgagagggttgctcttgagttggggaggcttttttgttggtagaagaaggaaaaaggcttgaaaggttgctcctttatgcttttttagatcatttggagggagagaaataagagagcctttgagaattttaaaagtttagatcattcttttaaaagtccttttttgtatctattttgggattgggttagattgtatattggggatgactctttatcgatgcttgattttgtggattggttaggtactccataaggtgaggttgtttgtttctgtgtatctgtgcctttttgctttttggttgcttgtatacatcgtgtatactcttttctttttaatacgattgcttttaccataaatatatatatatatatatatatatatgttgtaagcttttatgttttcttgtgatttatttcaattccttactatactatagatgcataattttgcatgtaactgttactcttttgagtatgtgctggttagttgacttgacttaacctttggttgaaaatccaacttgacataaggtttggttgaattggcatcaagcctacaaacctaaccactgaaaaagacaatttagtttgtggccccactgaaacaggttttggtaatattgcaattgattttacatcttaaccttatcaccaggagagagagcttttaaagaagaataaattggaagttttattgccaaaggatgaaaaaattgatattttcgtcgaaatgtcaataacttggtggtaccaccataaaaagagggggatatatggaaatttacaaaatttactcaaaatgttgttgatctattgccaaaatatcttaaaatatcaatatcactgaaatgaggaaaatttaacactaaatgtgtcaaaatattgccaatattttcctatattttggcaatatgttgggagactagatatttccattatgactgttgggcctcctttttacaaattccaatggtaacttttgtcctcaacgattggttgaactccaacctataaataagccccctatcttgtttttctctcattgaaacacctctctcatttttctttcatttgatagatagatagatagatagatagatagatagatatagctatattgttaacaaaattagtttaatttgcaaattgtggattgtttttttaatttctcaaagtttcattcagaattttcatgttttgggatcagttttcatgacttctttcattttttactaattcaatgttgatatttatataaaatcaaaccaccaatattttattgacatttgcatcctttgttattatattgtgtttggaaatcacatttacatatgcatacacaccatagatgctttcgaataagtcatagtcttggatgttttatttcccactgttgctgttatacactgggaaatgaatctgtgaatttatatataaatagaatgtacacttccaaatgtatcagtgccatgtggccgtatattgggcaattacactctggatctttatatgcaagatgtttatttttttcagtattaatgcataattttgggatgtgaagtcttgtaacttaatacctacataaaaaatttgatagtgttgcattagtaagctcactaacctttgctcacgtatatgttatcttgttcataagatccagtgttgttaaatctaactcaattctgtttacttgattttgcttcactattttcttcaaataagttgtcatctcctgaaaacctaattttctgaagtggtgaattgggtgacttgcaactgtatccagttctttccaattacctgtgctcagcattgtcgccaagtagcttgttttgttaatcccccaccctcttttgttgccagcctcatttatctttctctctctctttttcccaatttttaaaaaattttaatctctgcttaaatacttgtaggttagttattagattatggtatttccttttacagatccatctcttttggttataattttttactgttttcatcacagggatc

SEQ ID NO: 13490 - DNA, 28314 bp, Vitis vinifera
  Intron number 1 from transcript GSVIVT01014607001 (locus G SVIVG01014607001) derived from phytozome v7.0 (chr-ID chr1 9; pos 5597988 to 5626301 reverse strand)
gtgcagacaaacccaatttaacaggtatataatttggcaccttattatatccttgttctttagcttatgctttatatgaaaccttcttggcatgttgctttacatgcttttggttcctcgttaaattagctttactgaaacagagccaaaagttgcatattacatataaaaaaaactatctgataagtaatgttttagaaactaaaaccgttgattggctgatgtttcaccatgatgtgcctttgctggtagggagtcaccttttcaaccttgtttcaatgaagtccttgggtggtagttacagttagcacccttaagaccattactcttgatattaacctgatacggtttatatctcttctattagagtggaaattttacttaatgtactatgttgaggtccaaggatatgattgggcaattgctccaatattttttaattgagagattatattgataaacccctagcaaaaagaaggaacaacccaagtatatcagaaggctacgtagtggttagccaaaagggtaaaagagaaagaaagctgaatagacagctctaaaagagcctatgtcctgccaagccaccaatgaactctaaaaaagagagatttggctatgctttggtactaacatgatgtaatttacattgctcaattaagttggtttatgagagtgattttttttttaactaggattagaatggtggttttccttgttagttttttatgatttgttatttttttatttacaattaaatgctttgaacacatcggtggtgtacaatatactattctctcattcagagacgggcacttgaggaccatgcttaggtgaaaatatgacctcagataaagctgatgggaaaaagaaaggaaattcatctagctgacctgaattttttttttttttgatagataaaagcaattttaattaataacacctaaagaagggcacacaaaagtacacacgatgttgacaaggcgtgcaaggccaaaaaagatacttagaaaaacaacacacttgcctcacttgcgcctgaaccaatcaataaaatcaaataaagacaatatgctaaaacctaaatgccgcatgacccaatctagcatgtacgtaaaggaccataaaatagcttggtccaccaaattagaatcatcaaaggctctcctattctctccttccataaggtccaaaataagcacgaaggagctgttctccacgcctttttccttttcttccctataaaggtactgtgctagctaagaagcttgagtttttaagaaaattgtctattcagcatggtatcgatgccttgtttggtaggaggtcaagtgtttgaatgtcaccattgcatgtttatttatctaatttgttaagtccacgtgtaagcccaaaaatggaggctacacatgaggtagggtgttaaaatgcatgatatacaatgtgaaccttaagcttgcaggaaaatcggttgctcaagccttaccaccaaatgtttatttccctaatttattaagcccacatgtaagcatgaaaaatggaggctacatgtgtgagagggtgttggagaacatgatatacattatgagcccaaatcctataagcttaagcttttaagaaaattggtaattcaatagctccaaagagttacaatttcttagttaaatcctattgctcttggatggtgttggggaagtagctttgaatttttttttttttttgactatggatcgataaaaaaaagggaggatggactttggtaaatagatgtttgttgtggaaaagtgacgaagaatctattgagaacatccttcttcattgtgcttaatcaagaatcgtatggcaattggtcttgtccttgtttagaatggtataggtaccaaattcttcaataagaaagatccttctaagttagtagattttttttcattgagaagtagtggaagaaattgtgaaaagctaatcctttatgtttgttttggactctttggaatgaaaaaaatcaaaagttgttcccccccctcctttttcttgctctttgcttttggctctcttgtaaacatcccgtgtactttagtgtgcccctttgctaggcacttgaacatatttctttgtttgtgtatgaaaggaaaaaaaaaaaaaactctagtgagtttattcccttggttgagtgacttctaatctttatcaacccttacagttgttgttgtgcttgcattagtatgaccattatgagttttcacaaggctaagtgaatttactttgtgttttcgtttagaatcattaaatctcttgtttcttgaagtttcttagtaactaacatatacattttaaagaagtaattatttacaaatttcttaacttatttcaagcttcaaaccttgaatttatttaaattttttgtttgaatccacaaacgtgggtaagattcccttgttcatttttcttgcttgttgtatacttcatgtactttggtgcacaatggcagatccaacgatttacttcaggggggcaacctttaatacatatacaaattttgccaattgaatataactgtaggccttagcccaatggtccaacttggtcatttttgagggtgggcataggtggtcttgggtttgagtccctattggtaagaaatggagttttttattttttaacattttcaaggggggcaactgcaccccccccagccctagctggctccgcccttgttggtgcatcctttcttgagatactattaatataagtctacttttttcctataaaaagaaggaaaaaaaatccttactctttcagaattgtgagattgagaggcttttctctttcatttgcttttgatttttcttcttctttggattggaactttaggacttgtttggtaatgttttcgaaaacaattctaaaaaaatagcttttgagaatagtttttaaaaatagttttcaattgtctacaagaataaaattctatttggaaactcaaatatgcaaaaagggttttgtgaaggtatgtataatgcaaaaattccaaaagtattcttcatattttcaattgtttctttgaatactttatagaaaacacgtgaaggtacatttgatttgttctaaaaaataggttttgagaacaaattataaaaaaaccgcctttagtaaaaaaaattatcaaatgagttttttgaattagaaaattgttttaaaaaatggttcctaaatagactcttattgattcggaaattgaaaagctcgaacttctcatctcatctcttacctttttgtatttattgccttccttcctagataaagttttcaaaggtgtctttgaggcatgcttcaaggtgtgtccatgagtgaggcattcaaaaaacacaccaaggtgttgggaaaaaagcaagacttccaaaagttgtaagctaattgtcacaaggtgcttcaaatgaccctccccatgggcttatataggaggagggaagcttctagagactcctaaagccatctacactaagccattggtgggaagagtgtggaaggttctagaaatgcttagagatgtccacacatctctacactatggtggaaggcatgagaggagtccaaggctctctagagacttttaggaatctcttgtatattcttgtacatagggttgtacatagaatagggtaggatgttctagaatattcttgatttataaggaaccctccaaggttccagatagttccattggtgcctataaataggtgaggtcctcatttggccaaggcaccacccaaatcacttcctaaccaagcaagcgagcttccaagcacttgtaaaggcttccttgagttaataagagcttccattctttaaagagttgcctactaagcttcttaagctttcgaatcgtgagcatcttagcatagcaagctaagcattgggagcaaggctgacttagcaagatcaagcgtcttgacttgcctaagtgtcgcacgagcttagtgaacgactaagtccgtgacataatgcttacttagggttccaatcaaaaaaaaaaaaaaaatgcttacttagggtgcacttccatttaaggcataagcttaagaggatattggcgtgggggggtgttgttgggatatgctctaatttaattgtccatgttaaaagtggagtggggcctcatgaaattaaaaagtggagcaaacaaaagaaaaagctattgaaatttgagtggttgacatttgaaagtggagtagggcggcatgaaaatggaaaatggttgttgacgacttgacttttgaaaattggggcccaccactttacattttggggaaaaaagaagggagtgcaaaccaatggttcaattagctagtttccggtttgactattcgattcgttggttcgacaacggtttgatgttagaagcggctaaaaggtgaatcaaatcactcctctttattgagaagattcataaagccattttttagttagatagggacaagacacttgggttgatatgttttaagagtgttggaatgatatcaaagaggatttagtgagggtgttctcaaaattccacagaagtggggtaattaattagagcaccaatgccaccttcatggctctagtgcctaaaaagagtcaaactgaaaagatttccgactttagacctattaacttgaccacaagtttgtataaggtcatagctaaaatcttattagggcggttacgaggtgtccttcatgaaaccatccatgttacacaaggagcttttaagagaaatgataagaagacccaagaatcgatgagataggaaggtttttaagtgtgacaattttgaatggacctgggaattgagaatccaaaggttgatccccccaccgcaattcttcctaaaaacagattctcctttgccctatttcccaccacaaatcgagtgtacttggtaaaatcctaaaaaacctatgcaatggtcttccatgggcaacgatgtgaccacttgactatagcgttggcatcccactcattagcacgtgtcccataaatgcttagaataatttgatgccacaaagcaaaactttccctcggaaatctccatagccatttccctaatagagtatgattccttaagaagatcttcccaaacccccttccaccttagacttacacactaaatcccaactaataagatggtctctcttactttccccaatccctgaccaaagaaaatcactttacaatttctcaattttttcggccactaaaaaagggatcttgaacatggagagcaaataactaggaatatgggatagacattattggataagagttatccttccacctaatgacaaataagcttttttccgcctatgtaaccttcacgaaattctcttaatcaccagatcccaaaaaacacaagtctttgggttccccacctataggagactcagatagggaagaagctagtcaagagccttgcaatcaagcaacaatgccaatctagtgagttgaacctgagtaatgttgatgccagagagtgtactcttgccaagattgaccttaagtccaaatatttgcctaaacacgaacaaaactatcttaagagtttgcaattctttcaaataggctctcgaaaagaggatggtataatctacaaattgcaaatgagccactctagttctacctcttcctacaagaagtcgtacaacaacctactctccttaactctcaacatcatcctacttaacacatcaactacaatggtaaagagaaaaggggacaatggatctcctagtcttattcctctagatgttttaacccaacctttggcatttccgtttactaggattgcaaaagttaccaatgacaaacaacctctcattcaagtcctccatctaggaccaaacccttcatttccagtacatggtctagaaaaccctaatccacatgatcataagtcttttcaagatcaaatttgaaaactaacccttcctctcttgagcgtcttttctcatccaatatttcattagcaatcagcattgcatccaatatttgtctcccttgaacaaaagttaactttcgtcataagctctctaattttgagatagaagatctagaaagactcatgacctctcttactcacttgcacttatctctattcgctccaaatgcgagagtctggttcttattttctttaggtttatttacagtaaagcctttcgttctagccttgttcaatcattctgactcagttcctttcttttctactaattttgtttggaaattggaagtcccttttatagtgaagtcctttgcttggttagtggtacacaataaggtaaacactaatgacatgctataattgagaagatcttataaaaccctcagtcctgatgcttgtgtgttgtgcattgaacttggagaatttgtatataatatttttttacattgttctttgactttggggctatgatatagatgattttgattgactaagctagattgggttcctcctagaagtatttgtgacttgatgaccattgcatataagggattgagaagctctagtagaggcttagcactatggaaaattgcttttttgactttgatttgggttgtgtggtatgaaagaaatgcctaaatttttgaggataaggtgaggacttcagaggttctttggaataccattcatttccttgcttctttttgggccttttgcaccataacttttaagggcattctccttaatgtgatttaacttgattggttgtcggtatgtagatccaaaggtgtgggctagcaaggagtgattgttttgtgtactttccatatgatgtataggtttacttagtattttggaggttccaattgtttagttctttgtttggggtggatttctcatccttcatttgtaccttttaaatccttatttaatatattacattgttgtttctcataaaaaaagaaaaaaagtgaactgaatcaaacacatgattggtcaatgattaaaagttagagacatattttttttaaaatattttctattttacccttttctatttttattttttaaaagttatggttttttttaattaaatatttttaataatatttttttcctttttgcaatttgtgttatgcatgcctttttttttttgttcatttttttaatccttttttgaggctcactttatatatatatatatatatatatatatgacgaattaccaaatgaaataaaatcaattagtttgattttaattagatatttatatttatccttcataaaatttattataggttaacatttaattttgaaaatattccttttgttaagaaattttgataacttggtatctataaaatttcaattccattatatctttttttttttttttgtttactttttcaaatactaaaaatattatataattgaatttttaggttatggtatttataaaatttcatgtccattatgtctcattttttttccaaataataaaaaaaataataattgatttaaaaaaattccatagttgatttttttttggatgaaagtgtggaacttttttttgataagtaaatattcattgtatgaataacattttttgataaaaaaaaaattgtatgaataacgtttaacaaaagagtgcattgaagcatacaaaaacttggtctttatcatcattaggcttgttttcagtgaaattttttttcttgcccttgtcaaaagtctcaaatcctatcttgttccttccgaccaagtttttgtggagttcaaaagccccctcaaaggttaaggccctcgcttgtttagtagtacatgggaaggtaaacaccaatgacaagttgcaattgaaaagactctacaaatccctcttgtcctcaatggtgcattctttgcaaaggaaatggagaatcgattgaccacctttttcttcattgtcctgttaccattggactctggcacaagctgttcaatctagcagggttggcttaggtctctccaaggagtattgtggacatgatggttattgcttttgaaggtttagggaattcattaagaggtaagacacttcggcaaatcgcttacctcactttgttatggatggtgtggtaagagagaaacaataggatttttgaggataaggggagaatggaagagatgttatgggacttgcttttttcctattcctctctttgggcctcttgtattgcagcttttagcggagttcctcttagtgttttacaattcaactggattgcggtttgcgtttcaaaagtttgagagtgttggggtttttctttgtatttagttttctaaagttgggtgttttctcttttgtttttgtgggaaggacctctcatccttctcttgtttcttctccttctcttgtatcttttcttcttttaatatatttttcttcgtatctgataaaaaaaaagaaaaaaaaaaagcatacatgatgtatatgaagacaccctataaccaattgaatgggtgcacaaaacaatccccatccactatatagaactcaactagttaatgaagtctaacatcgactaggaatggagaatcgatggtgcattctttgcaaaggaaatggagaatcgatcgaccacctttttcttcattgtcctgttaccattggactctggcacaagctgttcaatctagcagggttggcttaggtccctccaaggagtattgtggacatgatggttattgtttttaaaggtttagggaattcattaagaggtaagatactttggcaaatcgcttacctcattttgttatggatggtgtggtaagagagaaacaatagttattttgagaataaggggagaacggaagagatgttatgagacttgcttcttttctattcctctctttaggcctcttgtactgcagcttttagcggagttcctcttagtgttttacaactcaactagattacggtttgcgtttcaaaagtttgagagtgttgggatttttctttgtatttagttttctaaagttgggtgttttctcttttgtttttgtgggaaggacctctcatccttctcttgtttcttctccttctcttgtatcttttcttcttttaatatatttttcttcgtatctgataaaaaaaaagaaaaaaaaaaagcatacatgatatatatgaagacaccctataaccaattgaatgggtgcacaaaacaatccccatccactatatagaactcaactagttaatgaagtccaacatcgactaggaatcaactcctgtgtatgctctagcccattctaaaaaattatacaaaaaggattgtttgagtgcttgatctactttttcggtactctcaaactcgcttagttctctccttctagaatccttatggtccaaaaaaggcataagggagtagttctccaagctttctgaagaaatttctgaactcctttattgatattaatcggtacacaccatacacatatatatacacaaatgactgaataagaaaaaatcaatctagcttaattctctcctaaaattaggaaactaaatcataaggaaatatcctaaatgatctctccttttttattcctaaattaaagtcctaactttggcattattttaacactccccctcaagctggagaatatatatcatataatcccagcttgcaagttaagtcttcgaagttaggcctaggtaaagctttggtgaggatgtctgcggtttggtgcttggtaggaacatagtttaatttgaccgtctcactagtcactttctctgtgataaagtgtctgtcaatctcaacatgcttggtcctgtcatgatgcacggggttctttgctatgcttatagctgcctgattatcacacatcatcagaattggagatgaactcgtttgtcccagttcactaagaaccctttttatccaaatcccttcacagattccctgtgcaagagctctgtactcagcttctgcactacttctggctacaactgattgcttcttactcctccaggtaacaagatttccccagacaaaagaacaatatccggaagtggaccgcctgtcaatgatgtttcctgcccaatccgcatctgagtatacttcagtgtcacggttctctgtctttctgaagaataggcctttccctggtgtcatttttaaatatctaagaatcctgtagactgcttccatgtgttcctcagtggggctgtgcatgaattgacttacagcactcactgcaaagccaatatctggccgagtgtgtgagagataaatcaagcgatcgacaagccgctgataattccccctgtctaccggtgtactttctttctcgataccaagtttcttctgactatccataggagtatcaattggtttgcatccaagcataccggtctccttaagaagatcgagtatgtattttctttgagagactacgattcccttccttgatctagccacttccataccaaggaaatatttcaaatttccaaggtctttaacttcaaactcttctgacaaatacttcttcaaattctgtaactcccccatatcatttccagatagaataatatcatcgacatagactatcaatatggccaatttcccggcatgagacttcttgacaaatagagtatgattagcctgaccttgtttgtagcccagcttcaggactgcttttgtgaatctatcaaaccaggctcgaggagattgtttaaggccgtacaatgatttttggagtttgcaaacctgattctttgccatactttcttcgaaaccaggtggtatttccatgtagacttcctcttctaggtccccatttagaaacgcattttttatgtccagttgttgcaagtaccaatcttgattgacagccaatgagagaaggatcctgatagtgttcagttttgcaacaggagcaaaagtctcctgatagtctatcccataggattgtgtaaaccctctagctaccaaacgagccttgaatctttcgactgatccatctgctttgtattttatggtgaaaatccacttgcaccccacaggcctcttcccaaccggcaaatctgtgatagtccacgtcccattcttctcaagtgcatcaatctcatcttgtactgccttcttccattctgaaatttttaatgcctcttgtattgtgttgggaacctgagtatcatcaagagaagtagcaaatgctctgtaagatggtgataacccttcatacgtaacatagttcccaattggatgatctgtacatctcctaacacccttcctcaatgcaattggcaaagtagaatcatcaatgctgggaattaacacctctccagccctatcctcacctatgttctctaattcctgtcttttcctcctcctgatgtaaacttgtaagttctcattagcaagttgtggggctataggttgaataggcatgggagactggatggtcacgggagaaggaacatttgtgtgctgggctggctgaactgatggcggcatgggtgtggacaactcagtgggcgcgaattgggaaggatttggtgactctgagtgaaaagaaggtacaccctcaagaaaagactcccaaacttgatgttcattcatgctctccccctgaacatgagatttgggatagaagaagacatgttcaaagaaagagacgtccatggtggtgtaaaatcttttgttggttggagaatagcatttgtaccctttttgggttggagaataccctagaaaaatgcacttatttgctcgaggagcaaatttgctacgattttgaggatacacatgaacgaatgccgtacaaccaaatactttgagtggtaaatcagaagaggcggcatgggtgtgaggaaactgttttaagaaaagttgacgtggggattgaaaggtaagcactctggatggcatacggttaatcaaataggtagctgtgagaatagcttccccccagaaatagtttggaacattagaggaaaacataaggcaccgagcaacctccaagagatgtctattcttgcgttcggccaccccattttgttgtggggtgtcaacgcaagaacttatgtggataatgccatgattttgaagataagtactgagactactagtaaagtattcctttgcattatctgacttgaggacttgtatgttggaattgaattgattttgaaccataagattgaaggtttgaaaaatgtgcccgacctctgacttttctttcataaggaaaacccatgttacccgagtatgatcatcaacgaatgtcacaaaccatcgagtgccagaaatattttttatccgggagggaccccacacatcactatgtactagagagaaaacagtcgaaggtttgtatgggatttgaggatatactgttcgagtatgctttgcaaactgacaaatttcacagtgataagatgctggatttttattgataaataatctgggaaacaattttgcaaggtaaacaaagctaggatgaccaaggcgatagtgtaacattataatctcactatctttattgaccttagaatttgacacagaattgaaagactctgacatactctgagactgtacgcaacttgcttgagagacttggtttgagaattggccacatgaaaggagatagagcccggaacacagttcagcactaccaatcatcttccccgatttcaagtcctgaaaaacacacaagtttggatagaatttagtaacacattggagatcctgagccaatttgctaatggacaaaagattacaatccaagtttggaacatggaggacagagtcaagatataagtctttagtaagttttatagaacctgtcccggcaatttttgactttgaaccatcagcaatatggacggatgaatgaccattacttggcttgtaattttgaagaatggcagcatctcctgtcatgtgatcagaagcacctgtgtctactatccacggcctcattcctcctcgattagcagtgaaggctacaccggtagtactgccactgccaacttggcttaataatttctgtagcatctccatctgctctttgttgaatggactcggctcgggaacagatgtgctctcagagttggcagccacgtgtgctctgccatctctgtcaaaccttggctttggtttccaatcagtaggtttgccatgaagcttccagcaagtctccttataatggcctggtttcttacaataatcacaccaaggcctatcccgtttctgacgatctccaccactactattaaatgaccgagcagcaagggcagaggcatccaatgttggggcaggttgctcttttgatcccatcatcactttctttctactttcttcacgcctaacctctgaaaaagcctccctgagacttggcaggggtttaatgcccatgattcggcctctaacatcatccaattccctgtttagtcctaggaagaacttgaacagtctcttttgttccacaatttgcctgtatgttgctgcatcatccgaacatttccatgagtgagtctcaaataagtcaagttgctgccaataccttgtgagtgtgttgtaatactgagtaactgactgctctccttgacggaagtcatgtagagctgattcaacctgaaacagttctgaagtattttcagaacttgagtaagtttctttggctgcatcccatatgtcctttgcagtcccaaacagcaagaaattttcgcctatgtcattgttcatggaattgataagccatgacatgatcatgctgttttcaatcttccacttcctgaaacccggttctgtagtttctggcatgactgcttctccagtgaggtactcatcctttcctttaccgcaaatgaacagcaacacagattgtgaccactgtaaatagttatgaccatttaatttgtgtcctgtgatgagaataggagaggaatcattgccaccaaggtttggaatttcagatctgccccctgattctggtgacgtgacgctggatacttgtgatgatgccattccgtattttgtcatggaccggaaaggtagaagaacacttttcaaggcacgtgcagggactggagttgagaaaaaatagtcggaggacgccggaaaatctgatcagagggcccgcggaagcaaaagaaccccaaaagaggcacgtgcagggctcggattgcacaaacaggtaggaagggtggctggtcggcgtcaggcgagcctggaggaggaagcgcgtcgccggaaagtggctcacgcgccctcacgcgccggcgcgtgagatgcagtcgccgaccggaaaaacgcgcgtgggcggcgcgtggatgggtttctggttccggtgctttgggacaaattggagatctcctccaagcgctccttgcggtgtagaaaaaaaccgtcgccggaaaagttcgccggaaaatttgccggcggtgagtgttttctgacgacgattcgactgaccggaaagcgttttctcccttggctctgagaacagggactgatgaccggaatgagagagagagagagagagagatgatcggattgagatatggccagagagatttggccggaatgagtgatgacctgaataagagatggccagaagggattagggtttcagaaaactggctctgataccatgaagaaatttctgaactcctttattgatattaatcggtacacaccatacacatatatatacacaaatgactgaataagaaaaaatcaatctagcttaattctctcctaaaattaggaaactaaatcataaggaaatatcctaaatgatctcttcttttttattcctaaattaaagtcctaactttggcattatttcaacactttctttctctttccccttatgaaagttccatgccaagtgccaactcaaaaggaccttctttacgaaggagtaatacccactttattctaaatagagcgaaaatcagctagcataagattactgctttcaagtagtgaaggaggcatatggtccaccatttcttcttcttctttacacatataatatctattcaaaatcatatgccccctctttttaagctggtctaaagttaatatcctaccccaagtagcttttctaagtgaagaatttgactttcactagagcccaagaattccaaataatgattaaaggaaaggtttttgtgcttccaatggacaaggaggaataaagagacttaacttaaaaaaagccatccttttggatttgccataccattttatcctcaatttcactatcaatagtttgtgattgcaattgcttgagaaaagcctccacctcttctaattcccaatcatggagttgccttgagaatcgagggttccaacatcccctttccccatcttggttccacaccttagctacccaagtgtctttggcgatggctaacaaaaagaaagtgtggaattaatggtgtggttttttatggcttaaattaacttgttatgaggtttttcatttgttttatattttatattttgtgtattttaaattattttaaaatatttattaattataaatattagggtctcacatggcatatgctttaatgctttgatggttacaccttgcctcatgggaatagaaatgcctcaccttatggtttcacctttaaaaactttgttccttgacgatagagtttggtcattgaattccttaagcttttttttcagtgaagtttttcctttttgctctttctaagcccccaatttcaaacccccctttttttgccaagttcatttggagctctaaaggccccatataaggttaaggccttagcatggccggcacccaataagaaaatcgacatcaatgatttattatagttaagtaagccttacaaaggccttatctaatgtctttgtgttatatgcctaagttgtggggaatcaattgattatctatttggcattgctaggatagataaggttcccccaagtgtatggtaagtatttatttcttttatagggtttggggatactcctagaggaaggttactttggcatgtggcttgccttgcattgttatggatggtttggagggagaggtacataagaattttttaagataaatggatgaccttggaatctatttgggatatgatacatttttcttcatccttttggccttcttcctcttctacttttgagggcactccattgaatcttctataacatcattggaatatgatttggagagcaaagagggtaggttttaagatgtccttagtatgaacttcacctctgtgaatagagagaaaagggagaatccctaatttttgttattgaaaaactgttaataatacacattggacttgggtatatatatacatgttagtgggacccataatacaataaggaaagaaaaggaaaagtaaaagtaaataacctaaacaactatacactatctaacactccccctcaagctggagcatatatgttatatgcaccaagcttgttacaaatgtatttaattctaggatctctgagagatttagtaaaaatatctgctagttaataatttgaattgacaaaactagtcgccacacattatgatgcgatcttctctctaatgaagtgacagtcaacttcaatgtgtttggttctttcatagaagactggattggatgcaatatgcaaagcggcttggttgtcacagatgagcttcatctgttcatcctttccaaatctcaactcccgaagaagatgtttgagccatatgagttcacatgttgctagagccatagctcgatactcgacttcggcactagctctggccactacatcttgtttcttactcttccaggatattaggttacctccaataaaaacacaatatccagaagtggaacgtctatctgtgggtgagccagtccaatctgcatctgtgtaaccaacaacctgggtatgacctctgttctcgtacaacacaccttggcgtggtgtgcttttgatatatcgaagaatgcggattacagcatcccaatggttatcacatggtgactgtaagaattgactaacaatacttataggaaaagaaatgtctggatgagtaatgatgaggtaattcagtttacttacaagtcgccgatatctcccaggatctcctaaaggctccctctgtcctggtataagtttgacatttggatctgaagataattgtgagaattttctttcatattatttactctgcagaaatatacatttatagggaaataggagattaccaacagcttggtaattccttaaaaaactatgtcagatcccataagagaggaaactatcttctatctatagaaaataatctacaactatttacagctagcaaatctctaattacagcctgtaatatcttctaatttcatcctacaatcatccataaacctggaattccacactccccctcaagctgggcaatgaatgttaatcattcccagcttggagagaagtgtgtcaaatttggttctaggaacagcctttgtcattatatctgcaatttgttgccgtgtagggatgtagtccacttctatgatcttttgctctatcttctctttgatgaagtgacgatcaatctcaacatgtttggttcgatcgtgatggactgaattttttgcgatgctgattgctgcttgattgtcacacatcaacttcataggtttgtgaggagcgagctggagttcttcaagcagcctttttaaccatatcccttcacaaattccatgggccatggcacgagcttccgcttctgcactgctgcgtgccacaaccgattgcttcttactcctccaagtaactagattgccccagacataggtacaataacctgaagtagaccttctatctgttaaggaaccaacccagtctgcatctgagaagatctccacgtcatggcttgccactcttttgaagaataatcctttacctggagtcatctttaagtagcgtagtatcctatatacggcttcttgatgttcttcggtgggattgttcataaattgactaaccatactcactgcaaagttgatgtcaggtcttgtgtgtgataagtagattaaccttccaactagtctttgatatcttcccttgtcaacaacaaccatatcttcttttgagcctatcttattaaatggatccataggagtattagagggtttgcatccaagcattcctgtttcctttaacaagtcaagagtatactttcgttgtgatacaaagatacccttgcttgaccttgctacctccatgccaagaaaatacctcaaagttcctagatctttaatctcaaattctttacttagaactgttttaaatcgggaaatttcctcttcgtcattcccggtaacaattatatcatcaacatagactataagaactgtaatcttaccaccatgcgatctcttaatgaaaagagtgtgatcagattgcccttgtgaaaattcctctcctttaatcaccttagtaaacctctcgaaccaagctcttggggattgcttaagcccatagagtgatttctgaagtttgcaaactaggtcgttgctactggagagttttaggcctggaggaatctccatgtagacttcttcttcaagatcgccattgagaaatgcgtttttgacgtctagttgatgcaaattccaattaaggttggctgccaaggatagcaagactcggattgtatttaactttgcaactggtgcaaaagtttcttgaaaatcaatcccataggtttgtgtaaatcctttggccaccaaccttgccttgtaccggtctatcctcccatctgccctgtatttgacattgaagacccacttacaacccacggggtgttttccttgtggtaatttcgtaatcttccaagtgtcattcttttgcagtgcttgtatttcttcattcactgcctttctccactcaggatgctgtaaggcctcttgcatgcagtttgggagagcaattgatgtaggacaaccctaggatggttgcttacactcaagggtaggtgggctagggttttatttttagggtgtaaggagaggaacaaggaataaactttatggtagagaaaattataagataagaaatagagagaaagaagaaacaatgaagaaaagatggaaaaccttagagtctcactaaggccttctaggagtctcacctagaagaaaatcaatggagtctcaccattgagggttgcaaccttgcaatgaaagaaagtataatattattcatcaaaattcattcctttgatttacattgattagcctatttataggcttctctaagaaatccaaagtctactaggactctaataacctattctactaggactctaataacctatcatgactcaaattctaattatattataactcaactagctaatcctaattagactccaacaaataccaatccctattcaattctaattaatattaccaatccctattcaattctaattaatattaatcctacttaaagtttacttaggtcttccctttcttccttgaataaactttaaaaggctttcccccatcagcaatactctccatatttgtgatgagagctcgaagattaggagatagcttctcataggacacaaattttgagatgggatgttgagtacaacatcttactccctttctatgggccacgggcctattgagatcatccatagagtcaatgtcatcagtaataacaggagaatcaatattaccttgaatgacttcggtgggatttgatttcgggtcatcagtttgacaaggcacaggaggaagctcaggatgtaggtccaccggtttagggttcttctgacgccttgagtaaacttgaagttctttgccaatggactccttgtctccttgaatctgacgtgactctgatggtggtccatccggtgccatagatggttcactggaaaaattaggttctggcaccccaaagtcaggcacgggcacatcccaaaactgatattctgcttgctgattgactggattctccccctgaatatgagttttggtgtaaaaaggtacattctcaagaaaggtcacgtccataatgttataggttttccgagtggaaggacaatagcacttataccccttttgataagaggaataaccaataaagatacacttgacagacttgggatcatgtttacttcgttgatgcggagggagatgaacatatgcagaacatccaaagaccttgagaggtatatcagttataatccgctttagaggaaagtttttggaaagggtttggcatggagtatcaaatttcaagactctagaaggcatcctatttattaggtatgtagcatttaaaacaacctatccccagaattgttttgggacatgagtggtaaacctaatagatcgggctacctctagaaggtgtcgattttttttctcagctatcccattctgttgtggggtatcaatgcaggaactttggtgaataatcccattttctagaagataatttccgagtataacattaaagtactccctgacattgtctattctaaacacttggatcttagcttgaaattgtgtttgaatcatggaatgaaagaatttgaagatagaacctgcctctgatttttccttcatgagaaatacccacgtaactcgagtatggtcatcaacaaagctaacaaaccatctatccccagagatattgtgaacacgagagggtccccaaatgtcgctatgaataatggaaaaaggttttgatggtttgtaattttgggatggataagagttacgacaatgcttagaaaattggcaaatctcacattggaaaagtttgggatttttgtttttaaatagtgctggaaacatctttgataagtacgtaaaatttgggtgtcctaggcaataatgcagtaacatgatggtactttctttatttgaatctaaagacaggtttaacctaggatcaggagtagagaaagatacatgatgtgcttgagagtcttgttttccagctgccctaaaccagtagagtcctttgctttccttagcattgccaatcatcatccccgaagccaaatcctgaaacaaacaatgagaggaagagaatttagccacacaatttaggtcttgggtaagcttgctgattgacagtaaattgcatgagagcttgggaaccaaaagaacttgattaagagttagggtctcggaaataatcactcttccaataccagtcacggtggaaagagagccatcagcgattcttactttgtaattctcatagcatgggctacaatcatggagtactgatatatcacctgtcatgtggtcggaggcacccgaatcgatgatccaacctgatgaatcttcagtttttgtgtgtaaagcagttaggaagttacctctctgagcagcggatccggttgagataacggggttagtggatgatccttggctaaacatcttttgcagccactccacttgttctttgctaaagagagcagaatcattggtacttctttctttcccttcaggatttgccacaaatgctcgtgcctccttctccttgtttgacttccagtcaatgggcttcccgtgtattttccaacatgtttctttggtgtgacctggtctgcgacaatgatcacatcatggtcttcctttcttctgccttgcatcataggtagatcctcgggaaacaagggcagttccttcttgaatgtttgtggagccttgggagatgagtgttgatccttcctgaacattggagaatggccttgttcccatcattagcttcttcctgctttcttctcttctaacctctgagaaagcttctcgaatagtagggagaggcttggttccaaggattctccctcttacttcatctagggatttgtctaatcccaataggaacttaaagaccctttctttttcaataatccttttgtatcgactagcatctcctgggcactcccaatccatggtctcaaacacatccaattgttgccaaaaacgactgagagtgttatagtagtgagtcacagtcatctcaccttgccttagatcatgtagggttcccttgatgtcaaatagatcagcagtattgtcactatcagagtatgtttcctttgctaccatccagatttcatgtgcagtatcataaaatagaaaattttgacctatttctgtgtccattgcattgatcagccaagacataaccagattgttttcggtgttccaaaccttgaatcttttatcatccttcttaggcggttcagtagtgctgaaaaggtattcatccttacctctgcttgtgataaacatcagaactgccttcgcccattgatggtagttgtggccagttaacttgtgccgagtgatgaggaatgatgaaccttctgcaccaccattgctcatgagttcctggccaaacatggttcccgtaacgctgctgctggtttccgaggccatagggaaaagtgatacctatgagagactagactcaaaaacaaaaacttaaagaagtaacaagttggaacgaagaagaagattggtttgcacccagaaaattggttctggattaaaaccgagaaagaagtgataggtccaggcggaattgctctgataccatgaagataattgtgagaattttctttcatattatttactttgtagaaatatacatttataggaaaataggagattaccaacaacctggtaattccttaaaaaactctgtcagatcccacaagagaggaaactatcttctatctatagaaaataatctacaactatttacagctagcaaatctctaattacagcttgtaatatcttctaatttcatcctacaatcatccataaacccggaattccacaggatccataggagtgtctaccggtttacagtctaacatacaagtttcttccaagatgtctaaagcatacttcctttgggaaagaaccacaccggaactggattgagctatctcaatccctaagaaatacttgagtttccccaagtctttagtctgaaagtgggtgaaaaggtgttgctttagtttttgaataccattctgatcattgcctgtaatgacgatgtcgttcacatgaactactggataaatacactgccccgaaaagttatgatgataaaaaacggaatggtctgctgtactgcggaacatgccaaactcctgaacaacataactaaaacggctaaaccatgctcgaggagattgtttcaagccatatagagaacggcgtaacttgcacactaaaccagactccccctgagcaacaaaaccaggtggttgctccatataaacttcctcagcaagatccccatgaaggaaatcatttttaatatctaactgataaagaggccaagaacgcatagcagccatggagagcaatagacaaacagaagctatcttggcaacaggagagaaagtgtcaccataatcagaaccataaatctgagtatagcctttagcaaccaagcgggccttaaggcgatcaacctaaccatcagggccaaccttaactgcgtagacccaacgacaaccaactgtagatttaccagagggtaaaacaacaagatcccaagtgccattggagtgtaaaacggtcatttcatctaccattgcctgtcgtcagcctgtatgggaaagagcctcaggagtgctcttgggaagagaaacagaagatatagcagaaacaaatgcagaatagggtgaagataatcgatggtaactcaaaaaattgtaaatgggatgaggattacgagtagatcgattacctttccgaagagcaatgggtaagtcagcagaaggaggcagagctagggcaggagaagccgaagggataggaagtaagtcagcaggtaccttggccaaagaaggaggaacagcgacacgatgacgacgatgataaacttgaagtgggtgagaaagcactgcatcaggtggggagataatgggaaggggtaagacttcagaaacaagaagagactcagaggtggagaagaatggtgagtcctcaaagaaagtgacatcagcggagagaaagtagcgatgaatcttagatgaataacaacgataacacttttgaagtctggaatatcccaagaagatgcattttgtggctttggcagaaagtttgtcctgtccaggagtgagaatatgaacaaagcaagtacaaccaaaaacatgaagaggaaggaaataaagtggttggtcagggaaaagaagggaatgaggaatctgatcgtgtaatacagatgagggcatacgattaatcaaataacatgctgtaagaatagtgtcccccaaaaaatgaaaaggaacattactatggagaaggagagtacgagctgtcttaacaagatgtcaattcttacgttcaactaccccattttgttgaggagtatgagcacaagaagactgatgaaggatcccatgttgggacataaatgaagtaaatggtgcagaaaaatattctctggcattgtcactgcataacacacgaatagaaatattgaactgagtttggatttcagcataaaatttctggaaaatagagaataacccagctcgattttttattaaaaataaccaagtacatcgagaatggttatcaatgaaagtgacaaaatactgaaatcttaaagtagacgcggtccgacaaggaccccaaacatcaatgtggacaagttcaaaaggagactttgcccgattattcaaacgctttgggaacgagacacgagtatgtttcctaagctggcaggactcacatgcaagagataacaaagatgaaaaacgagggaccattttctggaacttggataaattagggtggcccaggcgactgtggatgaggaggggaggatcagtggaaatgcaaactgcaggagttgaaggcgaggtgaggtgataaaggccttgagactcacgtcctatgccaatcgtcttcctcgtactccagtcctgcaaagtcacaaatttatcagagaaagtgatagaatagttaagagtgtgagttattttgctgatggaaataagattaaaaggacactcaggggtataaaggacaaaatgaagaggtagggaagggagaggatgagctaaaccaaaacctttagccatagtttgagaaccattagctaaagtaacagtaggtaaggcagatgtagtagtaatagaagagaaaagatctttattaccagatatgtgatcagaagcgccagaatctagaatccaaggtccaagagaagatgtgtgggtaagacaagcagaagcattactagtctgggcaacagaagcaacagaagcttacttggtggcttgatagcggagatagtcgtcatattcgctgtcagtgagggaaataccacgagatgtggaggaattgggaggctgaggcggttgaggatcagatgactgggccacgtgggcagtgtggggaggccgcccatgtaactgataacaccgatcacgagtgtggccaagcttattgcaataggtgcaatgaagacgttggcctctacctcggttaccactgcgtctttcttgagagttagtttgagaaactaacacagaagaatctgaagtgttatcagatggcaaagtttgagtggaggagagacggcggaggtgagcaaacacatcatccaaggatggaacggaggaactaccaagaatctgatcgcggacggtctcaagatctggacggaggccaataagtgtaagaaccatgaagaacttgtcaatctgtgttcgttgatccccaacatcagtagtaagaggcatcatggtcaagagttcctccttaagaggggcaatctgaccaatataagtagataaatccatgtcttgttgtttgacattgacaatagatgaagccaccttataaagacgttggatatcattcgtgtataaccctttcgcttgattccaaaatttaaagcatgttttgtaggcccgaagatggagcagaatcttaggatcaactgattgccagaacacactacataactgtgcatctatcttcctccattgtactctgtcaacctcatggatatccgcctcttgcgtaacaaggtgatcctcataaccttgacccataaaccaaagctccacagaggcagaccaacacaaataattttcactgccaaccaattttttcgaagtaatcataggagatctagatatgacagaggaaaaaatggaacttttagtagccatatctacttatctggagaacgaaatatgtttggatcgaagagagccctaatacggttttagatcgcggctgaacgaagaaaaaccgaggattcgcggctgtgagagaccaaatagtaaagaaaaacaaatgtgacactaccggaagggtagaagaacacttcctaagacatgtgtagggctcggggtggagaggaagtcattggaggtcgccggaaaggctgtttagagggccgacggagacaaaaaaccccaaaaaatgcactttcagggctcggatggcacaaacacagatgaagggtggctagacggcgttaggcgaggcgggaggtggaaatgcgtggccgaaaagtgctccacgcgccctcacgtgccggcgcgtgaagttcaggccgccggagaagaaacgcgcgtggccggcgcgtggctgagaatctccctccggtgctttgacaaaacttgaagatctcctccttgcgcaccttatggtatggtcggtgttggaaaaggacttcatcgaaaaaagtcgccgacggtgagggttttctgacggcgatacgattgatcggaaagctttaggagatgggaaaggtgattggaatgaaacacgatcactgaaaggtttcccaaaattgattcacggataaaccgaaaataattagggttttttttttctccctaggctctaataccatgtgaaaagagagaaaagagagaatccctaatttttgtcattgaaaaactgttagtaatacacattggacttgggtatatatatacatgttagtgggacccacaatacaataaggaaagaaaaggaaaaggaaaagtaaataacctaaacaactgtacactatctaacaacctccattaggttcaattaagttaaattttgttgggtgtggtctaggtaacctaggttagttgggaattggaggtgtgattagggatcaccatggtatagtactgagagctttctctaaatcgataggagtgggttagctattaaggatgagaccttagctctattggagggcttattgcaagtgaaggatttggatctttcaaattttttggtggagggagattttgccatagttgtctcatgggtgtctaagttggggagaggtccatggaaatacaacatatggcttcataaaattccagatctggctagcagcttggattattcccttacttggttcccttattcagctaacgagattgctgatcatttagctaagcatggagtcaagcaggttgcttcttttggaagggattttttacccctttgaattgtacattgctgcatctttcatacatgttcttgtctcatacttgttcaatctagttattttgctgttcttgttagattttctcttttgatcgtcctttgtattttgaaaggatatctcatccttcacttgtatctaaaattgatatccatgaatggttagtttttgatcaaaagaaaaaaaaggaaagcaaagcacatggtataagtatgctgcaaatacttttcttacttacgaaaaaaaaatgctacaaatactgcagactgacaagtactaataacatatccagttgtatggtatcattcatattgtaattctaataatccttacatttttttttttaagaaacaaactattcattgatatgagttttaatacttatgtctttattttccagccaagtcttacttatatcttaaaaggctgatacttgttagtttgtcaacttttgctcgctatcatctgaatagtttagtcattcgctttggtgatatgcaatattaattttggatttttgttctattctatattgtcactgttaacttgtttatatcaattgccatttatctaaaacaattcaagattcttgatcttcatagggccttgctgctgccaatatcattatgatttttattacttttagatcctcttaaaattgaacagattcctgaagacaaagttattttatgacacctctttttcatttttttttttttgataaggttatgacaccttttttcataataatagtcaatcagtttttcccattttgaattacaatatcttaccagatactgtttatattgcagaaaatt

SEQ ID NO: 13491 - DNA, 9687 bp, Vitis vinifera
  Intron number 6 from transcript GSVIVT01030858001 (locus G SVIVG01030858001) derived from phytozome v7.0 (chr-ID chr1 4; pos 17797840 to 17807526)
caagtgcatcggcatttttcttacctttggaacgagtgagtgctttcatgtttatttgctgcaacttttgatgctatttgcttaatcaaaaacgaaaaaaagaaaaagaaaaagaaattgtcaatgtgcaaacatgtccgcaatccaaaattcaaaaacatcatgcaaaaacatttggttgaaacatttgccaacaattatcaatcatcactcatagtatcaaatattacataaaataggatatttggattatgagagtgttacataacatagtataataataaatgtaagaagtaatttcacaatataaactatcatagtattgttatataatcatcacaataaatggattatggataataaaaaaaataaattaatcacaatatattaggtttaaaaaatgatgtaaaataatctccagtatatctttacattttgatttacaatacatgtatacaaagaatgagatcccctaaattaggcaacttataaaaaaatccctaaaatcaagtaatttgattgcaagattcctatatggaaatttacctaaggttcctatatggaatttacctagattcttggtacaagaatcatgaatcagtttttacaagaaaggaaaaatatggtaggagaaattagatatatatcgagaaaaataattgttgatttctgggcttattcttctaactctcaccctcgagttggtgcgaaaatattttgcattcccaacttgtctaagattgtataaaaagttgaacttggtaggctctttgttcgtatatctgtgaattgtttagaagaggggacatacggagtgcaaatcagctcactatcaagtttttatttgatgtaatgctgatctatctccacatgcttggttcaatcatgatgaacggggttatgggctatatttataatggcttggttatcacaatataacctcatgagttcttttaaagtgatgccaaggttagtaagaatgatctttatccaaagtagttcacaaatcccttaggccatggccctaaactcagcttctgcgctagatttagccaccattggttgctttttacttctccaagtaactagattttctcctaaaaaggtacaatatccagaaattaaccttctatcaacaattgatccaaccccatcagcatcactgtaagcttccaattccatatttcctgtcttctaaaataagattcccttgtttggtgtagactttaagtaacgaaggattctatatattgcctccatgtgagattcatgtggtgaatgcatgaattggcttaccacacctacaacatatgcaatgcctggtcgagtgtgagataaataaattaatttcctcaccaatctttgatagaggtcattgtataccatatcatcctctatttttcctcctaatttatgattttgcacaatcggagtctttgttggttttcatcctagcatttttgtctcgcttagcaaattgaggatatatttctatttggaaataaatattccccctttcgaacctgccacttcaatctcgaggaaatattttagaatccctagatccttgatctcaaattcattagacaaacaagtttttagtctttgaatttcccccttgtcatttccaataacaataatatcatccacataaactattaaggcagtcaatttaccagaggagttatgtttgataaacaatgtgtggtctccttggctttgatggtagttcattcttatcattgattttgtaaatctcccaaaccatgctcttggagattgtttaagtctataaagagacttcttaagcttgcagactttgttcttccaagccttgtcaccaaacctcggtagagtgttcatgtatatttcttcttctaagtcaccatgtaagaaggcattcttcacatcaaattactgcaaaggccaatcaagattggcagctaaagacaatagaatacaaatagtgttcatttttgccatcggtacaaaggtctcttggtagtcatgccataagtttgggtaaagcccttagctaccaatctagtcttatacctttctattgtcccatcggcttggtatttaattgtgaaaatccacttacaacctactattttcttccctttgggaagctcaactatatcctaagtctaatttttatttatttatttttttaaggcttgcatctcctcattaattgctttcctccaattctcatctctaagtgcctcttggattgtgtttggaatctcaacaaaagacatttgggtaataaaggcttggtatgtagatgataaatgatgtaatgaggtaaaatttgaaataggatgctgagtgcattttctagtgcctttcctcaatgcaatgggccaaatacaaatcattatagacactagaatgagtattttcattacttgatttagggttggatgatgggatatgagaggatgttgtagattttcccttcctcaaatacacttttagtttggaggtgttttctggcagcatgtattccctttctctgagctgaatctcaagttcattggctggaatttcagtgggcagcttttctacaattagctcttcattgggagtatgctggaatttcttatgttcactagttgattctttagatgaatccaaggctggaacatttggaacaatagggagtgttggtgcagaatctgaaaattctggggctgaaatatcttggacagtaggggaactggatgtgtttgaggtatagacatttgacacgttaaccagttgtggaaggacacccccaccattctcaccattcctaggaaaaattcctgacagtttatcttccgttcctccaatctccccttgaagataagtgtgtgtgaaatatggttgactcttagagaaggtaacatccatggtgatatatgaccttgtgggtgtatggtagcacttatatcccttttgattggaagaatatccatggaagacacacctaagagctcttaggtcaagtttgtctctagattgtttgggaatgtgaatgaaagatacacacccaaatatttttggaggaagttccaatacccttaaagttaggaaaaaactttgaaagtacatcaacagggaatttaaagtctaagacttgagaaggcattcaatttattaaaaatgtagcagtcaaaatgacttccccccaatatgtttttggaacactcatttgaaaaagtaaagacctagcaacttctatgggatgtttgttttttctctctgctaccccaatttgttgtggggtatctacatatgaaggttgatgcataataccttcactttggagataggtgatatgattatggttgaagtattcctttccattatctgaccttaaggtatggattttggtgccaaattgggtgcaaatgaatttgtggaatatcgggaaaatggaattaacttcaaatttggattttaggagataaacccaagtggtatgagtgcattcatcaatgaaggtaacaatccatctagaacccggaatgtttggaattctagagggtccctaaacatcagtatgtattaaactaaaagatgtttttttattgcttattggaaaaggcacacgatggtgttttgcaatgaaaatcacgggatttagttttactaaacaatgtgggaaacattttttccaagacaaagaaaggtgggtgtcccaattatttgtgccatagccattattcgatcaacttttgatgtattgttggtgggtaataagagcttgtgggataggatcaccaatcttccaatgtgtatcagggtagtagagtccacttttcctctcatcgtgcccaatcatcctccccattatctggtcttgaaaaacacaatgggaaggggtaaatgttacaaaacaattcaaatctttcgtgattttactgatagaaaaaagattacaagacaagtttggagcatgtaacacattttgcaaggtcaaaggagtgatggaggctatgccttaaccaattatggaagaaaaagtgccatcagcaaccttcacttttggcctacttgaaagtattgtataattggaaaaaaaaaattggagtgactggtcatatggtcagtagcaccagaatcaatgatacaaatgctagataaacaatccttataggcacttaaagctttgatatttcctgtttggatgagagagcatgaggcagtttttgctgtgggaatttcagcacgtctgtcaagctggttgagaagcgttttcagcttttcataatgctccttgctgagtaaaataggttcttgttcaatggtagggatattttcatgagagacattaatggtggcagcttgatgtgcctgtctagatcttgtggcaggttttcctctattgcttccccctttgcttcctaactgaggcttgccatatggagtttccagcaagattcacgtgtatgtcttggtttgtgacgataattacaccaaagcgaatctttatcatctgtttttcttccttctactttggatcccttgacttgaaatttccagccatagctagtgctgatttttctggagtatagcctcctagcatcacaactctacgactttcttctccaatcatataggcataaacctcctggatggatggacgagattctttccccaatatttgtactcttacttggtctaattcaggattaagaccagcgaataattcgaatactctctcttgctccattatcttcttcaatctagtagtgtctttggcaactaccatttttttgtgctagtaatgatctaattccagccataggcttcgcaatttattgtaatattaagtggcagaccaatttccttgctttgtagcatgaatttgacacttcaactcatatacttgtgctgttattccaatcttggaatacgtttgactgatgacaccctaaatctctttggcggtggagagaaacaagtatgtttggctaatcttcggctgcatggagtatagtagccaagacatgaccatagaataactcatcccataattcataccgtggatcattggagttgggttctgatttgacacccgtgatatagcccatcttccctgtacttttaatgaaaagtttggctgattgggaccattgtagggctatcattgagtttttaagtggtgatttggagtgtagggctatcattatgatgggtagataaaggtgataaggtttggagtgtagaggagggattgaagggtagggttgttgagaggatggtgtattttactattttcactagtttcagacattttagggaaaaaacaaggtttcaggtttttttttttttttttttggagtaaacaagagatgaccttgagggaattataatgggaactaaggaaccaacaacaaaggtcggttaaaagagtgaacgagctacaacaatgaaggttgtatgtgactgagcaatgaaggttctatggatcttggcagagtcaaacttttggctctgataccatgatgaaaaataatctcccgtatatctttatattctgatttacaatacatatatacaaagaatgagatcccctaaattaggcaacgtataaaaaaatccctaaaatcaagcaatctgattgcaagagtcctatatggaatttacctagattcatggtaaaagaatcatgggttagcttttacaagaaaggaaaaatataataggagaaatcagatatatatggagaaaaataattgctgatttctttgcttattattctaacaaaaaaaatttaaaaatgagataaataaattttaagaagtttttcatttttcataaagtctagaatttagatattcattatctagtatcataaagataaataaaataaatgaaatctaaaaaataaaataagaataagaaatacaatttcgctatgttgtgaaaaaaaatataccactaaaggaatccgaggtctgagcaccttaggtacactcttcctcttcctccttcctctctttttcttctttttcttcacctttgttgtagtcattggttttgaaagcctaatttgggctttgtttgttttatttcgaagagcaaaatgtactgttttgatgctactcttttttttttaatttttttttaaaaggtcaagatgatgttgctttgcctgtttttttttttttttttttttttttttttttttttttttaaaggaaaaaaaactactctaaaacaatgttttttgttctttgtttattattttgaaaataggcatttcaaaaggttccctctagcaaaacaactcccctctacttcttttgttggatgcttacccttagaaagagatgaaggagagataggtccacaccttaagaaggacaaaggaggaaccatacctaagaaatgggaagcctttgccactagtcctttgttagtgatagttgtcttcaccaaagttgactttagttgagccatctcccctatagcacaacgacaaagatccatggccccctttaccattcctttgattgttggagtggtgttacccacactgtggctagggcttgaggaagctaactctagaaaatgggcaaaggtctctcctgattcataagaggcccaatccacttgcaaaatctccattgggctttgggctagccccctttaaaacatccatgcacactcatttttggccccaacctccccaaggcccacttcttaacccaggtttccattcaagctgtcagtgcctaggccgaagaacccctctcattgcctcggcctttaattgtttttgggcctacgtctctttaccaactcacttgcccttctttaggtctaaagcagttcaaattttattgggctctttgtgggcgatgcccaacttcttgtttaggtctctatccatctcatggcccaccccctcatctatagtatcattcttcataaggccatggtttaaagttgtggtcttggtcattgactcgggaggtcttgaggcacattggtctcaatatcttcgattggtatcgatggatacataaaatatattcaattaaatatacttttataaaattttaagtttaagtatatttaatgttatttaagtttacaaatctgttttcagtttttaatattaaaatttattttatttaataatttcatatcaaatttaattaattataaaatttttaaaattgtctatcaccatttgatttaatgttgataatagtaattgttaatttttctagtaatatattatctaacaaaatttaatttgtacaccttatttaattgtattaaaaaagttggtaacttatctaaaatataattaaattaaattcttataaattatatttacatttctatttatctcactttattcattaccaattgtagaaatatcactatattcatcacccattgtataaatacccaaatacccattagataaatcatgagaacccatcaccatataacccaatacccatttcttctttctcctcagtcttttcttctcttttagaccttttttttttttttcgtttctccactactggatgaataaaaccatctacgatttgagtgaaataaaaccacctttctaactccaaaaaatacagattccatttctaaattaaacattttccctttctcctctttctcctcaagttctaggctgcttctcatctttctcctcaagttccagactgtttctccttttgaatcaatccaaaccatctctgagtcaaacttggatatcggttttgtagtaggttagccgaggcagatacgactcggccaagttgtattaggtctcagccattacttcaaaccttgcatgaggctccttctatctagtcagtcccctctgctacatgggcccactgttgctgctcactacgagaaaatattgcttcatccttatccattttatcctcttacaccaaggggtgatatattttcttccactttttgttaaccctactctcatcatggcacatgaaactccctccatgtcttccctaattttccagcttcttactagttgtgctcagcaccacttgagacaatcatggcaaaatctcacacaacagttgaatggagtaacaaaagctgcccccaccacaacctgtatacttcctagcaccttcctcccgtttgttctaatcaagacactcttaccactacaagtaatgactataattagtatctgcatccattgccatgaaacctccacaagaatctcccaatggtttaaaaacctcccatcccatgggaaagttgaaagtctcacaatcttcacccaagcttcctcagcatgaacttctctaaaatagccaacatatgcgacccccttgtccaatatcaaccccttcttgaacactcttatcccttcgttgaagacccttttttgccttagaacttaaactcaaacaagatgggagaacctctcattgaggctaaatggacattccttttcaacctccaatgatatctagcccatgcctataggaaaggaaaaaatggggccttgttgagaaattcccccatctccccactagataccaactaagagcccttcaattttttaaatgagttgaaccccccaaattgaaaccacactacatctcccacttcccaatagccctttttcactacacctacagagtcatctcactctcttggacccctatcaccacgctcctgaaagggggatttaccagctttaggctcttcaataggacccaagagaggcactactctgaagctcctcaatgttttggccaacagacccctcctcctaagcaacccctttccttttggaaacactagggaggatttcttttcctcacttgagagcatgaacacataaggaatctccctgctccattacttcgaagcttcaacttgtagcttttccctcccttcattcacaacctattggaattcttcatgttctcaccctcattacaaacttcctccccttccaaaagggaggacaaaccctttgcaccaaatctgacccattgcgagaagccttggcccctcttagggattgttgtagtcatcttgcctttggtttgctcagttaagatctcaaaagatttttactctattgcctttggttttctaaattatgcaattgttgatctcttgtttctcctttccttgaaaaatgccgaatttattcttatcttttcttaatgagaggtataccgtataatctttaaattgaaaagtctctttcttctaattttttttttcctgcttatttgactcgtattctgttcaaagtgaatttcgaagaataagatcccctagaaagtcagagtttgtatgggtagtggccaataaaaatgtgaataaaaaaaaatatgctttgtttagaaaacctacaaagctattatccttatgagctgtgctttatggtggtgtccacatgatataggtcctaatgtgggaaattttgtcaccaaagctttgtcattcatgcacaacttttttatcctgtctaaatgtgttgaagaaaatagaaatgtctcaaaccttctattcaaatgttttctttcgaacccttgaacccacagatttcaagtgtgcttcggcttttactataaatctttttagttttcagccgctaattcacactgttcacaatttccaggttgtaagagctttacaatttctccagaagggcaa

SEQ ID NO: 13492 - DNA, 4400 bp, Vitis vinifera
  Intron number 3 from transcript GSVIVT01034544001 (locus G SVIVG01034544001) derived from phytozome v7.0 (chr-ID chr1 8; pos 19644387 to 19648786 reverse strand)
atagtttttcactaaggaggggttagttctccagcttttgttttgatatcttctactatctttctctgttaattctgtatcttgaaacctgcaattgaactttgtggaagaaagttagaatgggtctgttgttgcattgaaaatctagtgttctagatacaattaagtcagcatttggaggttctagccttgattgtaagtgctaaacaatacaataagccttcagaagcacgggttatacttttaaaattctagccgtattgttgcttaattagtttgtgagcgatactgcaggatagttttccccatgtagtttatgcattgcgaactatcacaggtggttagctcttagaatgagagtcatgttggctcaacatttgtattgccaggttggatttaaaattcactcacaaggctttagtttaatctaagattcccatcgtggatctgttttttagaaatgggctgtttggtagaataagatactccaggggatgatactagttgagaattgtgtttcaatcacttagtgtccatttggatacactcttactattttctgtttttaaaatcagaaaataatattaacttttatatgagatataagaactcttagaagtttacattgaacaaataatggtttttaaaatagttgaggtatcaaaaatttttacaacctcaaattttataatttctgaaagtgattttttaaagacataaggtaagtttatactttttgtacaagatgttatactattatatagaaatttccgattttaaaaataaaaaaaggaagtgtatccaaacggacgcatactatgttgtctaatactctttcatcttgtccttatcctccatgtggttattgtaggagttgtacttgatgttgactgaattctgaaagtgtaaaattaacagctcaagcattgcaccctttcttttaatttacattctctactgaacattgtagttgctttgctgacaaatgtcacaaatccgatagatgacatgaaacttgccaaactatccactttcttgtgtcctgaatgtgctagaaacaaggatcttgttcggttactaaccaagagaagtggagaaaacagataaaaacaaccaaaataacaataaaatcaaaagatttacatggtttactcttaatggcagatatgggctattcaacctggagtttttacgaaatgagcttaactagaaggcaattaggtcctctgggcttacaccaaaagttggagagaagacaatactattcctttaaatcactttcctaaatagctttcatggattcctcaaaagtttctcttctgaatactcaatctgaagtcttaactaaatagaatttccacccaactttggccttttcaaatgcttattcaaagtaggtcattcaaatcctatcaagagaaaacataaggagatggatgcgttattctggtaatgaataaaatcaaagctgagtagtatacggtgacatgtgaactgagaggaatgaaacattgatcaccatgtagtcaaactattctatcacagttgatttcttgaagtgtgatatttcttaatagctgaacattgtattattagatctatatttacattggcctagtttgtggggattttatttcttttacttctaatgaatacttagagccactgttgtttatacaatagatgtatatatggtaaaatgattgctacatgtgcatatacttgacccttcatttttgtttcatgattggttgctgcaaaatcatatattgcttttatttctaggtctgatagctggattatagggcatggtgtatatacattgtagcaaaaaggaagtctgtcactactactactactactactactaataataataataataataatatggggtgtgccctctcaacactatgtacttaaagagttcatgcctgtgaagaaatcaatatgcacccatcagaaatggattgtggatggacacaattgtaataagatttgaaattattttctctctctgaaatgacacatcttcatagaggaataacccattttatggctgcttgctcttgtagcttttaagatggatgatattattagtacgatttaccattcatgtttccatttaattgtttggtttaggcatgcacataagatccactctgacagaaaacttgtgaatgaaaatccctgaaatagaattcttttttattttttatttattaaaccaaaatagccatttcattgttgtaaagtaataaatacaattatggaatcctttcaccaaatatacaatcaactgtacaatatctgataaaaagaagaaaagtaagcctacactgcttcaaaatcaaggctaactgaacacataatgatggctgcacatttaaaaccaaaagatcattgggtatacctaggaagtttaagaatccccagtgaaagactccaaatgtttagctccattctttactaaaaagttcatgaataattagctaattaaggaatccatcaaaggaacaacccaactttgaagcaatataaaaaatttagttaagctgctcatcaagcctccatagtcctttctttttttgttactcatgatatgacaagcagaatattcccgtactaaaagattggaaaggccaaaagcattgccttgggccacaccttcaacagggctaaaactacagcctcaatggctaaaccatctccaagaggtttagagggagctctttccactgtaccaaaaatgatttttatgcaatccttcaatccttagatgtcttgagttacccaacaaaatacccatcaaaattcaactgataaaacccacagaaggtagtgaccttacagaaattgtctccctagtcaatcttgtggacttgcacattaggtttcattctattgatgtaagtctcaaaggtgtgcttgcaaaggttttctgagttgaatcagaaagagaagatgagaaataaagcaagtcctgaattggctccaaacacctccatctattataaaaaatcctcgcatttctttctcgttaaatagtccatagcaatgtgagactagcaatatgtaagacaattgatgtagggcaaccctaagatgattgtttacaatcaaataagtggcttagaactttaatcatttagggtttaaggagaagaaagagaataaaattataacaatggggggaagtaaagatagaaaagataaggtattcttggatttttaataaggcattttaggagtcttagctagaagaagggcaataaagtctgactattggaaattgcaaggtatgtaagaaaacttaatattattcatcattaatcattcatcctaatttataggctttagaaaaccctaaaattgaataaaactatgaaaaagtaaacctaactcatgtagcaaaaaaatccccaaattttaaatgcaacttaaatagcaattattaaccaattatatgcaaaattacctaaatacccttaatagggtaatttagggtttctttatttcctttcattcatttcttaagtggatcttggagatttatcatcatcaatacaataaaatatttttcattgcttatcatggaatttatgtacaagtggatcactaagatcactttctgatacatttagaatatccttaataagcttgaacgtgtagggtgaggtccttggtaggccttgaaaccaggataaagttaaaaggctcttttgaacttcactgagaatcttatgcagcactagcaagctccttatccacaagtcccattaaggtttgtttatttgcttgttttgttttgtatgtgggcttttgttttgttgtttttttttttttgttatttttgtttagtattgggttaaagtctcccattttagttagacctttgactatgcacatgttcacagcatctccttttagtatgtaatggggtcttcttgagttgagctatgttgatcacatatgcatctgttgatttgatttgatatgcatttactgcataacaaagtcgtttatagcttttttatagcaccatactgtttattttattactttacaatttccaataatgattttgaaagtctaataaaaaaaaaataatgattttgaaagttattatatattgagatttagaatacttccttgccagttatagtcttacaatgagatgtaatgaattatagtgctcacctcttgtggaactcatggagtcaaactgtagagtcaaacttggttcttgttatgttatcttgaatttatagctatattgtttagaaatgtgttccttttttttttattttgcctttgttaaattttattgaaatgttaacggacatcaaggcatctttcttgaaggcttggatcattgcatcactgctcctgctggcaca

SEQ ID NO: 13493 - DNA, 3191 bp, Vitis vinifera
  Intron number 13 from transcript GSVIVT01036645001 (locus GSVIVG01036645001) derived from phytozome v7.0 (chr-ID chr 13; pos 19710573 to 19713763 reverse strand)
agcagctgggagactaccatctgcactttgcacaggtttgataagagcattacaactgtttacattgagttttctcattctgcagctgatgctcggttacataaattcataggttggctttatgcatgatatgactttcatgcactaaaaactagcatatgtggaagttatcttttcatttgcatgttctgcttttggtgtagtttgtgctggtatgcacataggaaaatttgcatgtgtgaaactggtctttattgtttgcctgttgtgcttttgccgtagtttagactggtatatgcatgagaaaacactgtgcatgtgctcacagacatgctgtgcatctattttaaagttaaggtgtgattggcagtttgtttttagttgtgttttttcactgtcagttgtgtctatccattaccagaaggtgtgatgcagagagatatactctttcaattgggtgggatgatgtcttgggtgattatcccttccaaactgccactaggtcagatatctaatgctttcactcaaggaggcatttttatctccaagaatggaactctcccacaaatgtctcttatacataatggtttgagatctctatctagatatgtgttatgtgcatacatgcatgagttgcatcattgttgttattttgagttgagattgggttatactttagacataaagaggtcatatgactatatttttattctttggtttttttgatgggcaaattagtgttcataaataattataaaaaaaattgcaaacaaaaatgaggttcaacccaagtatgtgggaagtataaaaggtgatctatgctaataggataaaaagaaaagcataaattatctggttcaatgaaatcaataatattgatgtctacatcaatcgctaaactttagatcaaggtttaaagtattggttgagtctagtacgattgggctgattcgtattgcctcgaccaagttcaaggcaataccaatacccgagttatgattttgtaacacttgggtgttgacttggcttgaatcagttgacttgactaatttcttgaaatgactcacttgactcagttgagttttagggatgaatctgagttagggcacaaaatcctccttttcttcttcttcattgcccattgtctgtgctttcataatgattgaaacttgagaggtagtggtccagtgctggccctgactatcccttcctcgaagcattagatttccctattatcagcaacatctctgataatggcttgggttttttctttatggctatattttcgattgtagttagctttcctttcagtgacatcctcaatgatgcttaaagctaagtgacgacgtctctagtgatgatttgttgattgctgttggtgggcattgtgtaccaagtcttaagaagagaggattagccatttaggtatataagaaagtatatagagattttggtatggtatatatgatttgaggagaggattgacatattttgcatattgcctactattaatgcaaggtactgagatcgatgtgcctcaataccttccaagtcatgattgatgccacaactttgaaccatgctttaaatcacaagaatatggtgttaaggatagctacctgcaagggtagcccagttggtttgggcgaacattcagaagcgttgtcctagtaagtggcatatggtccttggttcgaatcttgccactgatgataccctgaatttacctagtgttggttgttgtgtagtggtcagcaccccggggtttgggtttccatggaaagtcctaaggacttggccatggaaggttccctggttatccaaaaaaaggaagaaaaaggatagctaaaattaattactttgaactgtggaaggatcttcgattcctctctattcataatgatccaaaacatgcacaaatatatacatagatatttgtcttctgaacatgaacaaatattgcgtctattttccttaagagtgtcttctaaacctgataaaacatctctttctatcctatgaagtgcaaaagaaatccaaatatgggatgaactacatattggaaattagaagaccatccataatcaataagaatatggtttgtagtttcctcatttgttttgtacaaataacatctactaaagatattctagttgtcttataattaatcaaccattaggtttttcttctacattatctcccatggaaagaagctaacttttgatgacactttggaatcaaatctcctttcatggaaaagagaaggttgtacttaaagctacaatcttgtggtaggatctaactgtgaataatgctcttcttggacactttctattccaatatatttacagtattgcatataagcattacttttaaaagtagcaaaaaggacatgataagtcccaagttccaataagagaagctcctcttgaaaatgaggtcattctaactacttgaaaacccaggtcctttaacttaaccatctattaagtttgaaatatatgcaattatttcatattcttagatatataagtttcatttgattaccaagctctaatggaattttagccttgtgttaggacctattggccaagagaaagtctcaggtagacagttaaaggctgaccaattgctttctcttttattaatttgtaatgttaaggtattcaagtgtaccttgattcaaaagttttctatattaacttgagatagttggggattatctttgtatatagttttctatagaggggtgtattcttactttgatcagattttgtattttgagggaaggacctctcatccttctcttgtatctttactgctattaatacagtattcttcgtttctaataaataaaaaaaaagtgtaccttgatttaggaaaagatgtgggtaggatatttcttttgaaacttgaagtttgaactaggataaatcatttcatattcttagatatctataagtttcatttgattcccaagcttttgagaaattctaactttgtatcaggacctacaattcaagggacagtctcatgttcatggttaaagtttctttcttttaattaaatgttgaatataatatttttgaaatttattatctttaccttctgaattattgatttgtcttttaggcttctattttttcaactcaatgatgtaatactttccatatacttcacaggggtcagtg

SEQ ID NO: 13494 - DNA, 2419 bp, Vitis vinifera
  Intron number 2 from transcript GSVIVT01010166001 (locus G SVIVG01010166001) derived from phytozome v7.0 (chr-ID chr1 ; pos 16634186 to 16636604 reverse strand)
gcaactttggtaaatcttgttttctctcatcctgttttttcttgaagctgttaacacaagtcttgatggaatttttaacaggataggtttcaaataagtatttgttttaaatcattcaaaattctttgagcaagagttaaacccctagtgattgaatttaaatatgatgatgtagatatgatttgaatgcagtagcaaggtagccaaaatgctattctcaccatgtgatgctcaagtatgctgttcttagaagtaacacaatttgtgtaactgtgtcaaatttgtcaggaaacaaatgggtttcagttacatcaatccatggtagggtgcaaaagccttttcaattggatttctgcttatgttaggtctatgattcttcaggttggtttgagttttcaatatttggtatgtaggatacttaaagatggttaaggggtttgtgcaaggatagaagaataatgccgtctggattaacaatagcggtggttggttttagttttcagtattagtatgtaggaggcttggagatgattaatcaatttgaaccaggatacaagagcaatgcatctggattcacaatagtggtgttagagttgagattatggttaggcggttactggtgcatcagtaggattgggataaagttaaggcttgatggttttctaattttaaagcttctcatcctaaaagatcctcttattcaacaccttccaaatgcaccacaatacacaaagtggttccatgagcaaagcaagcctactcacaaacttccatccccaacttcctaaacattttatgaagatagtagataaggaagtgcaaaacttctcaactaaggaactgagcaataaaaaatgatgaactatcttcccatcattcataaacataaaataccaattcaacacaattttccaaatttgactagttggttgatcatcatatcatgcccttcactgctgcccatatataaagaaagccacctctgaaggagctctggaacaccaaacctatagaccaacccaattcatgtagtatgactttgtatagaattcctttttttttttgttgatgtccatctatccttattctttccatccctccatatcctcatccgggtggctttcttcaaaagattaataaataaaataaaataaaaagtgaaaatcatctactaattcctgctcctgtacagttttaataaatcttggctcttgtttctctcttcctctcttcatccctaatagtctccaccctgcacctttttattttctgcattactgaaaaatctgggtgttcattcttcacaatcaaatctgcatagcacagataatattaaaaaagagccctccaagttttcccaacaaacaactgagacgtgtctaaagaaatcccctcacctcttcctaattcctttccataaaccaacctatgcagctcaacttaccactttaccttcccttgacttcctcacaacaatgctcctccaaaaactttcctccctcttaaactttcaactgtgccccaggtaaagcttcattgttgggaaccttctgtgcccaactccccttctcttataggggaaaaaaatgtgttccattacataagatggtatttcctcccctacccttacctaattacaaccttttctagcatcatctttctttattgtgaatttggtaattacctttttgctgaaattagagcaaattatttatttatttattttattgcttaaagtagtttgttaaattactggtcatttgcaacagacttattgttggatataaaaggcatgatgcttatgcctcacctgaagaaagaaccagaactttcttatctgcatttttacttccaaattgcatcaaatagatggccctgggttcagtcatgggaaaaagaatctgtttcaagctcaaaatatctagtagtcttcagtccatatatagagtttaaactaattatgatcaaatcaaagtcaaatcttttaggtacgcattttattaagattggcaatttgggctggaatttcaacttctctgccatcctcttctaagcatctaattaatgaatgaatttattgattgttccatttcataaatgtcctgtatatgtccatctgatttcatgaaaatgtgtcctgtatatatccatgtgattccatgaaaatctaacttactagtactatcttgtttgtcttgggagaagtgagaatgtgcctaccagataaacctgatgaagtacaatattcatagattcttccagatgatgtttttgaaaattctttcatggtgttagcataaaaatagtgagccattcatcaaaatagttaatgatttaaatttaaatcatagcacatggtgtgactctactggtcctaatatgatttttcttctaaaaccagatccccgtttgacagact

SEQ ID NO: 13495 - DNA, 6342 bp, Vitis vinifera
  Intron number 1 from transcript GSVIVT01011639001 (locus G SVIVG01011639001) derived from phytozome v7.0 (chr-ID chr1 ; pos 5674763 to 5681104 reverse strand)
aggcattgaaaagccattgaatttcacaggtggcagttgcaagggcttggtactctacctctgcagaggatcaactaactgtaacttgtttctttgatttccatgaaatcaatgagttgccaagaaaaattgcaaaaccagtgacactccttctagtattgacatagcctgcccaatcactataggaaaaaccctttaattgaaaatctgagaaagaaagaaaaaagagaccttgccctagtatggcctttagatacctcagtactcgaatgcctgcttgatggtgactaacagcaggttttgctaaaaattggctgagtacttttacagaataggctaagtcgggcttagtgagagttaagtaaaataatctgccaatgagtcttcggtaacctgatggatcttcatagaaattggtatcatttgctgataacttgagggtagattccatagggaaggcaataggtttggatctagttaaaccagtgtcttcaagtatgtcaagtatatagtttcgttggcataagaagatactagtcttggaccttgcaacttccaagccaagaaagtatttcagtgggcctaagtctttaatagtgaacttggcatctaaaaaggtcttcacctttcaatttccagaatgctatcacttgccaatagcacatcatccacatagactaataaggccataaaagaactttcagatttcttaatgaatagagaacaatcagaattaccttgaacaaatccataggaaagaagggcctgagatagtttggcataccattgcctggaagcttgcttcaagccatagaggctctttaaaagacgacaaactttctgttcaccttggacagccaacccaggaggcaattccatgtatacctcttcatgtaaatcaccatgcaaaaatgcattattgacatttagttgatgaagatgccactgtttgacggtagccacagcaagtagtaagcgaatggatgtaatcttggccacatgagagaaagtatcaaataaatcgaggcattcttgctgagtatacccttttgccaccaatctagctttatgtctttctatagttccattagctttatatttcactttgaatacccatttacaaccaatagtccttttatttttaggaagagtaacaagttcctaagttttatttaactccaaagcagtaagttcatgttgcatggcagcttgccattcaaggaggcgagaagcttgggtgtatgatttgggttctagagagtttgtgacaaaggtgagaaaagctttatgggatgtagacagtctattagcagaaagaaaagggtgaagagaatagaaattacctttaatgggagaacagttagttgaagtagatgcctgagttgcattttgagaagaagagacattaccacaataatagtcctgcagatatgaaggtttttgtttaattctggttgattttatgagctataggacttcagggtcagttgaatccagatgggatggagagggacatgtaggtgagtcggattcaagaagggcaggaggttcagagagagaaggagaattattaggtggtgatgcaggtcacacattgtgataggaattgaagaaggaggtggtagaaggtgaatttgaaaatgattgtgaaagaggaaacataaaggaatgagtttcaagatgttggggcaacacttggaaaggaaaaattgtttcatggaatatgacattccgagaaacaaggatcttattgttgtttagatccatgagtttataacccttaatatcagaaggatatcctaggaagatgcactttgtggctcgtgaatcaaatttttgtctgtgactagttaaagtggatgcaaaacaaagacagccaaaaactcttaaatgagaaaggttaggtgttttgttaaaaagcatttcaaaaagagttttattttgaagtagaggagtgggaattctattgattatgtgggcagcagtaagcacacagtcactccaaaaaattaatggtagattttcttgaaacattaaggctctaggagtgcttagtagatgttgatgttttctctccacaacaccattttttttaggagtttcgacacaacttctctgatgcaaaataccatatttatgatagaattttgtgagtaagaattttggtccattatcataccttatagctttaacagaagaagaaaattggtttgctaccattttacagaaagttttgattaaagatgacacttctgatttagctttaatcatgtatacccaagtacaccttgtgaagtcatcgactatagttaaaaaaatatcgaaaaccagaataagaagtagtgccaaaaggaccccatatatcacaatggatcaaatcaaaacttttattagaattattctgtgatacaaaaaaaaggtttgtagtaaaaaaaataagctttttaaagttttaattttttattttttatgaatacttgattttcattgaaagtgttatctcaaaaaccaactttcttaaatattaacctttattttttgagttgtagatttctaaattatttaattaatttatttttatcaagatatgatttaccaaagataaactgatttttgaaacaaaaaaattaatagtattgaaacataaataatttatatgaaaattggtttttcaaaagataactttaaaaacttaagagcctattttaccatatgattaaaaataattttctatttttaaaaatagaatattatttttaaaatttataacactatttgtttttgttttttgctttagatctttaaaaaaaatgaaataaagaacatttttaagaaaataagtaatcattattaaaaccaaaaggaaaatacagagaaataataaaaaaaaatatagaaaacaaataaaattgaataatgatatcattctttttctctctccatgaaatataatttcttttaaattattcatgtttttcgaatttcttttaacttatataaaacctttcatttaacaaataaatttcaaatcaaactatatttgatatataaaattcattaatttgatatatacaatttattaatttttaaaaataatttgaaaataaaaaactgatctaattagtactagaaaattataaaactttataacattagaaagttcatagaccaaaatttattttgaatgacttgactagtttcttcataacatatatcatacttttacaaaaattttcactagactaataaacttcaaatcaagcaaaatttaatgcattggaccgagtttagtaaattttaaaaataacttaaaagtcaaatattaatataataaatactataactactattatttctcttctacatagaaccatgttttttttcactaataaatgaattccaaattaattaagacttagtgcattaaattcattaatgagtttaatgatttttaaaaataatttaaaacttaaatagtgaaatcattaatactagaaaatctatgaataacaattggtttgcaatgagtctaatattcttttctacgcataattatattttaataaaatttcttacttaataaatgaatctcaaatcaaacaacactttgtattgaatttattaatggatttaacgatttttattcaatattcattttaagtaaaatgctattaatatgtgtacccgtatttttcacatatgtccttatttgaatagagaaactcgcttttattgatgaaaaattaattttttttaaaaaagttgaatcatcacttattttagcaatcattttaaacgagtccaataaattttatgaataagaataaattcaaattagtaaatacagtccaacataaatattccatatacaaattaataactaatattcaagcacatttaatcaagatcaaatgtaacaaattaagataaattcaattaaacctcaatttaatatctcataatccaaatccaatttaatgctcaaaccaattccacaacaaaaatcgagctcaatttaatatgcatgcaatcaagtccaaatccaaaaaacaattacgatagaaattaaagaaaaaaagagaaaaaaaaacttatctattctgtaaccctaggatggagatgatgattttccatggttgagagagagagaaaggaaaaaaaaccgaggaagtggaaaaggaggctggaaatgaaagtaagtggtggtggaatgggatggggaaagagagaggaaaaaaaaccgaggaagtggaaaaaggggctggaaatgaaggtgggtggtggtggggtggggtgggatgggggagtgggtggagtaggaagggaaaaagaggggaaaaagaaaaagaaagaaaagaaaaaataataataataattaagatgtagacccaattaaaaaaaaaaaaagcaagcagtcctaatattttataaatatcaattttattaaagatgttattttaaataaagagatggtttttattaaagataaaataagttgttccatgtgcttttgaatgctgggatattatcacatatcacaatttttagggacttttctcaatagtgcggtaatttaaaaaagttatgcttaaattattgtagtagaagaagttattataaatatatggtagtttttgccacttaggagaaatgagagaggagagagggtgaacgaataattttttttttaaaccaaaatcatcttttcaaatttcaaaagacgaaatcgtcttttcaaaagacgattttaaaaaaaaattcaaaagggaaattgtctctttaagagacgagttcccatgaaaaaaaattttcaaattaaaaaaaaaaaatcctcaaattattaaaaaaataaaaaaataaaaaattcctcaagggaactcgtctcttgaaaagacgagttcccattaaaaaaatatattttttttttaacaaaattcccaaattatataaaaaaaaaaaaaaaatcctcaagggaactcgtctcttcaagagacgagttctcatgaaaaaaaaaacattttttttaaataattcccaaatttaaaaaaaaaaaaaaaaaaacaattcctcaagagacgagttcccatgaaaaaaaatatatttttttaaaaaaattcccaaattataaaaaaattaaaaattaaaaaaaaattcctcaagggaactcgtctcttgaagagacgagttcccatgaatttttttttttaaattcccaaattattaaaaaaaaaaaaaaaaaattcctcaagaggactcgtttcttaaaaaaaaaaaaatatatatatatatatatatatatatatatatatatattttttttttttaaaattcccaaattatatttaaaaaaaaaaaaaaaacaattcctcaagggaactcgtctcttaaagagacgagtttccttgaggaattgtttttttttttttttttaataatttgggaattttttaatatagatatatatttcatggaactcgtctattgaagagacgaggtcccttgaggaattttttttttaatttaggaatttaaataaaaaaaatatatttttttaatgggaactcgtctcttgaggaattggtttttctttttttctttttttaataatttgggaattttttttttccatggaactcgtctcttgaaaagaagagttccttgaggaatttttttttttaatttgggaattttttttaaaaatatatatatatatatatatattttttaaaaattattttttttccatgggaacttgtcttttcaagagacgagttccttgaggaattgttttttttttttttttttttttaaatttaggaatttttaaatatatatatatatatatatatatatatatatatatatatatatatatatattttcatggaactcgtctcttcatcccttgaggaattgttttttttttttttttttgggaatttttttaaatatatatatatatatatatatattttcatggaactcgtctcttgaaaaaaaaatttcaaatttttttaaatcgtcttttgaaaaaaagattttggtttaaaaaaaaatttatccgttcaccctctctctctcctatctcctatcttctaggggggaaaaaatactatatatttataaaaacttcttttactataaaaatttaaacataacttttttaaattaccgtattaaaaaaagtctcaatttccagtcaagtcactacttgcccgacaaaatttataccagtcaacaaggataaggaaaggcatgaaattggtacacgtgtcagaaggccattgtttatgagatgtctatatagagcgtccatcaaataaaggcataaagcacacggct

SEQ ID NO: 13496 - DNA, 4181 bp, Vitis vinifera
  Intron number 3 from transcript GSVIVT01014702001 (locus G SVIVG01014702001) derived from phytozome v7.0 (chr-ID chr1 9; pos 8781097 to 8785277 reverse strand)
gtgttgatcttgttgtaagtcctacttttcttcatatgagttttcagattctgttgaattctccaattttaattgtttgatatttttttctctgctatgctggtaatgttttctctgtcaattgggtggcatgataactgatttttgtgaggtttcttgctcttaaagaaatcatattataactgtatttggaaatataaatttttgatgcttattgtgttgcattgcatccgactttcatactgtgggtcccaaattaatctacgatcaacttaaggaaaaataaacttcagaaattgttttagagcattaggtgcaagcttatcggctactgatcaattatggaagtagtcactagcatcacaagttaagcttatatacttttgattttctatttttagctctacacttcttcatactcttgtgatgccttgaatttatttatttattttttttttcagtctgcaaatgactggatacaacccgtcatttgatcattaagcattgggatgtatcctgtgctatctcaattttactttgtaaacatatgatctttttggagcataatgatcaaacttgaacccaagggaagtttattatagtggtttgtaatgtttattgggatttgtatggttttggtagtggtatttccagtatgactatacattaagcaataaggtcagctattcatacttgcagaagttctagaaagcaaatagatcttaggaagagggcttgtattgttttttctttttctttttttttctttttatatgttttccaatcatgtggaactagggactgatgaagtggaaatgatggaactcctgaagtatttcattctgtacatgaaatagagatctaattgcataggaggggtgacatgagttttccttgaaaggattaactattggagattaaatcatccattataataatgtacccgcagttttgaggtcttgttggaaaaagtgctaattaagtggtggtttgctttgcaacacaagcaaaggtttccccagcaccttgcttgataactttattgaagtagaataactaaagttgtcccaactgtttagttagcataactgtagagtcacttaagaatattcctttcagtcttttattttcttttttattcagatctttgttatatactcaaagttgtcacaactgtctagtcagtcaatgaacatcttgttgccataggtgctaaggctcaaggcaccaccactccttagttatagcgccttgcttgcccagatatgtgccttattgaaaaggcgtgccttgtcagctttacccttcctttttaaacacttctattttttaaatttctaattatatacagaaatttatataatttcataactttttttattgaatgcttctttcaaatgttttgaatcttaaattttttattgatcagattcaattttgaatcatattttacaaaattgatgtgtatcctaggttgcatttcacttcactcaagtatgcgccttatgttgcgccttgcgcttaagctataggagacttttgcgccttaggtgtgccttacgccttttaaaactttactttttgccaatctctaattcgagctagcaagaaataggttaaattgtagtatagagattcaggttgatcccatggaaaaacaggtattgagaatcaaagtatggaggggttgagaagaatgtgatccaataggagaattagaatgtttggttggtacaaaaatagaaggaaaatgaacactagtgtaaagaaaatagagattcagttctcagaattaaaagattccatattcaggtttaatccaacagacaagtatcatggtgatcattgactttttaaaaagtaattttttcatcaagtgtgatgagaaactctaactcgagcaatcattcatatatgatctttcggtaaaatcatattacaaatcaatcaaagttgagtttcaatcttcgaaatcaataagtttgatttcatctcaaatcaacaagtaataccacttatgacaactctaaattgatatcagtgagtgaaacaagtattccttgaaccaactagttagtcatcataccaatatatataatttcattcaactataattaccataattgagctgcccttgaggcttggctcaagtggtaaagggatggggagggctttgtgggaggttccaagttcaagtcccaatggggagaaaaattgacctatcaaaaaaaaattataataattaccataattgagccaaatcaaaccatgatccttgtgtactatctcaatctttctccagaaatacagtgtctactccaaaactcatatttggtttgatggaaaaggaaggagaataaaagagaaaagatgaagagtagaaaacctagggcttgtttaacaacattttcaaaaatagatctcaaaaaacaatttttgagaatagtttgtaaaaacaattttcaattattttcaaaaaaaaaattgtttagaaactgaaatatgaaaatttgttttctcaacttattccccatggaaatactttatacttatatacaattcaaaagttctcaaattattcttcatatttttaacaattttcaattattttcagaagaaattatgtttagaaactcaaatatgaaaaactcttttctcaacttattctccgtggaaatactttatacttgtatacatttcaaaagttctcatattattctctatatttttaattgttactcaaaacactcaataaaaaaaccattgaaaacacctcaaatgtgttctagaaaacaacttatttttagaacaaattttcaaaaaacttttttccgtcaaaagtttgtcaaacatattttcaaagttagaaaactgttttttgttttaaagaacaaaaatatgtttttgagaacagttgccaaacaagtccttagaaactaatctataaatgctgaaataaaaatgtagagattaactagagaattcccaaaaaaaatttcaaataaaaattacaaatatttatagtcttccatgaatagggatacatgacttaggcttattggccgctttggaaccttcaccaactggatttcttggagtttgagccaaacatgctttcacatgcacatgcaaattgtatcctcactctgaaaactccctgcaactgtatcccccatgcacaaacaagtccttagaaactaatctataaatgctgaaataaaaatgtagagattaactagagaattcccaaaaaaaaatttcaaataaaaattacaaatatttatagtcttccatgaatagggatacatgacttaggcttattggctgctttggaaccttcaccaactggatttcttggagtttgagccaaacatgctttcacatgcacatgcaaattgtatcctcattttgaaaactccctgcaactgtatcccccatgcagagacactgttcaccttgcaatttcgccgtgcaaaatgaagttggtcatacactttttcataacctttcaactccattcaccttttgatccctttattcaacttttagtgattgtggcctcgcaaataagctccaaaagttcactgagccctccatggtttctttatccttatttacgctaaatgaagctaaacctacacagaaatcactaaaaaaaacaatattagtagaaaactaaagcttagctatgaacttgatataactgctatgataataactcaattgtggacttaaaagcatggtaaaccttctaaaaaatatgcatttttgagctgttttcattagcattgccctttgagttctttatttgtttccttattcagatttttgatagataattattttccttcattatgtaaattattcgttgaaaagcttagtagaaaagcaaataagtctgcaaggggaaggaaaaacgttcatttagcttctttattttattcataatagttgaaaagagtagttttctgcatctgtcccatacagagttttcttctgataactaaacaaaaagggaatagagagagaaagagagagagaggttttctagatagcatgttaacctgtcctcatgtcttttttcaatgcttctttgtcttcccagtaaaaggtaccatttattttgcaaatttttttaatcatcaggtgaagggaccttctggtaatcaaattcaagatta

SEQ ID NO: 13497 - DNA, 14105 bp, Vitis vinifera
  Intron number 2 from transcript GSVIVT01001864001 (locus G SVIVG01001864001) derived from phytozome v7.0 (chr-ID chr5 _random; pos 227236 to 241340)
ggggtaagtaactaacattctgatattttccttgaaaatagtaaattcatgttgacaataaaagagaagaacatgtggaagaatgcaattatgaaagttatgattttgtaaggagaattaggcaatcctgtgatcaaagggatttgttgtaattgagttaggaaaattcctaatttaggtgctaggaatctttgtatatacaagttctctaaaactttttggaattgaatcacagtcaacatcttgaattgttaactccataaacacaattccttctctttgaacaaataggggataaacaacaacctcctttcaccaataagcatgttatgattccgtagttcccaaaatacaaaagaaaagcatatctgaatatggagtatcacactctctaaaccaaccctccatattgcttttgtgaaactcaataacagtttatttatccaaactaaattagcaaagaaaaaaatcatgagaaacttgcctttaatatgggttccaagtgggattggcgacggtttcaccataaattttgacaaaaaacgtgtcgctcttatgcgtgcgaaaatatggccatggctcccagaactaccacacaaactgctagttcttttcaggaacacctttttgccaccaccgtcattctcagcgtctcccaaaacattgcatttcatcaaactctctcctatctcagacataacactttcattgttccaaaccttctagaaccatgaccataactccaaacatagtcttgaatcggttgccatttgtggcgaaaaggaactatacaatgacagttttgcatagaagtgtaagagtttgaagaagaagctatcgcagccatggagaggagaaaatatagaaaaaggttatgtgggcattggaaaaaaggggcttaggtcatcctcaagagtcaatgagtattatggttttaaagagaataacatgcataatgtcatttgatattaataggttatgataatagaataaattttgtaacgttagattagtattaatagattgtaataaataaattgatgagaggtatttttagatgacaattttgtagagaaatccaacaacttgaagaagaagttgttgcggccatggagaggagaaaaagatagaaaagggttatgtgcgcattgaaaaagatagggcttaggccatcctcaagaattaatgagtattatgggttttaaagagaaaaacatgtataatgttaattgatattaataggttataataatagaataaattttgtaatattggaatagatattaatagattataataaataaattgatgaggagtgttttttaaattaaaaggcaagttgtcagacattttcagaatgaaaaaaattgacaaacacctcactttttatagcagtatagatatgtgagtctctgtacaggctaaagattaaaggaaaagaagtttatacctctcattccttccatctttgttcttcatgatggtatcaaagccttagggtcataaatttgggaagaaaaagaatatttttttcgaccttcattaccgagttgaagaccaaagtcgaccttaaagtttaattcaaaccattgtaacaaacctagatcatgaacttggtggcaatagcaaccgtcgtcatcacattgtcatgccattgctacaagacatttttgtctttgcctctcatcactgtcacgtcactgagattgcattgcaactcctttcttagccttgccatcagccttggatctttgtcgtcggccttccctttcccttagacttccacccttaccttgtcacaaactcattgcgaaagagaaatcacgtcattatcgttgctgtaagcaaatatttttccttttacaagtgtttcttgtgttgggattgagtccctaaaagtaagatatgatgtaacaaagttaaacttaattgtcttctagctatccctttggtgtattgacattgatttgagtatttagcctatatctcttacattgtatatgacttgggtatattaagagttgcacagaagatataagtcatgggttccttgtgagtagataagttgtccatagtcggttcatgaatttaagcaatccaatagagattgtagtgtaccaccttttaattagagagatgacttgtcttggctatcgagatgagtttcccatggtgagtgcactagtgtatgtgatgcacactagataggacctacggtgaatcatgacacaaaactatcaattgtcataattcactaagctactatgctatatggactttcaattttgagtggatatcgagtctatgccaaaatcaataggaggttttaattgatgggtgggatcttaaagtggtcatatatccctatggattgggttgttgatagaggttggtaagaacaagtattctcaatatagactgttagatagtgtacagttatttaggttatttacttttccttttccttttctttccttattgtattgtgggtcccactaacatgtatatatatacccaagtccaatgtgtattatttataatttttcaataacaaaaattagggattctcctttttctctcttttcacatggtatcagagcctagggagaaaaaaaccctcattatttccgatttatctgtgaccgtgtttcattccggtcacccttcccatctcataaagctttctgattaatcgtatcaccgtcagaaaaccctagcgccggcgacttttccggtgacctttttccggcgaagtcctttttcgacaccgaccataccatcaggtgcgcaaggaggagatcttcaagttttctcaaagcaccggagggagactctcagccacgcgccggccacgcgggtttcttctccagcggcctgaatctcacgcgccggcgcatgagggcacgtggagcactttccggccatgcacttccacctacagcctcgtctgacgccgtctagccaccctccatctgtgcttatgccatccgagccctaaaagtgcattttttggagttttttgtctccgccggccctctaaacagcctttccggcaagctccgatgacttcctctccaccccgagccctgcacgtatcttaggaagtattcttctacccttccaatagtgccacatttgtttttctttactatttggtctctcacagccgcggatcctcggtttttcttctttcagccgcaatctgaagccgtattagggctctcttcgatccaaacatatttcattctccagataagtagatatggctactaaaagttccactttttcctctgtcatatctggatctcctatgattactttggagaaattggttggcagtgaaaattatttgtactggtctgcctctgtggagctttggtttatgggtcaaggttatgaggatcaccttgttacacaggaggcggatatccttgaggttgatagagtacaatggaggaagatagatgccagttatgtagtgtgttatggcaatcagatgatcctaagattctgcttcatcttcgggcctacaaaacatgctttaaattttggaatcaggcgaaagggctatacacaaatgatatccaacgtctttataaggtggcttcttctattttcaatgtcagacaacaagacatggatttatctaccattattggccagattgcctctcttaaggaggaattcttgaccgtgatgtctcttactactgatgttggggatcaacgaacacagattgacaagttcttcatggttcttacgcttattggcctccgtccagatctcgagatcgtctgcgatcagattcttggcagttcctccgttccatccttggatgatgtgtttgctcgcctcctccgtatctcctccactcagactttgccatctgataacacttcagattcttctgtgttaatttcttaaactaattctcgaggaggacgcagtggtaaccgaggtagaggccaacgtcctcattgcacctattgcaataagcttggccacactcgtgatcggtgttatcagttacatgggcggcctccccgcactacccacgtggcctagtcatttgatcctcagtcgcctcagcctcccagttcctccacatcttagggtatttccctcactgacagtgagtatgatgactatcttcgctatcaggccaccaagtcagcttctgttgcttctgttgcccggactggtaatgcttctacttgtcttacccacacatcttctcttggaccttggattctagattctggcgcttctgatcacaaatctggtaataaggatcttttctcttctattactactacctctgtcttacctactgttactttagctaatggttcccaaactatggctaaaggttttggtttcgctcattctttcccttccctacctctccattctgtcctttatgcccctgagtgtccttttaatcttatttccataagcaaaataactcgcactcttaactattctatcactttctctgataaatttgtgaccttgcaagaccggagtacgaggaagacgattggcataggacgtgagtctcaaggcctctatcacctcacctcgccttcaactcctgcagtttgcatttccactgatgctcccctcctcatccacagtcgcctgggccaccctagtctatccaagttccaaaaaatggtccctagtttttcatctttgtcgtcacttgcgtgtgagtcctgtcagcttgggaaacatactcgtgtctcgttcccaaagcgtttgaataatcgggcaaaatttccttttgaacttgtccacactgatgtttggggtccttgtcggaccgcgtctactttaggatttcagtattttgtcactttcattgatgactattctcgatgtgcttggttatttttaatgaaaaatcgagctgagttattctctattttctagaaattttatgctgaaattcaaacccagttcaatatttctattcgtgtgttgcacagtgacaatgttagggaatatatttctgcaccatttacttcatttatgtcccaccatgggatcattcatcagtcttcttgtgcttatactcctcaacaaaatggggtagctgaacgtaagaatcgacatcttgttgagacagctcgtactctccttctccatagtcatgttccttttcgtttttgggaggacgctgttcttacaacatgttatttgattaatcgtatgccctcatctgtattacacgatcagattcctcattcccttcttttccctgaccaaccactttatttccttcctcgtgttttggttgtacttgctttattcatattctcactcctggacaggacaaactttctgccaaagccacaaaatgcatcttcttgggatattccagacttcaaaagggttatcgttgttattcctctgagactcatcgctactttctctccgctgatgtcactttctttgaggagtcaccgttcttctccacctctgagtctcttcctgtttctgaagtcttaccccttcccattatctccccacctgatgtagtgccttctcgcccacttcaggtttatcatcgtcgtcatcgtgttgctgttcctccttctttggtcgaggtacctgttgactcacttcctatcccttcagcttctcctgccccggctctgccttcttctgttaacttacccattgctcttcggaaaggtaatcgatctactcgtaatcctcatcccatttacaattttttgagttaccatcgattatctttaccctattctgcatttgtttctgctatatcttctgtttctcttcccaagagcacccttaaggctctttcccatccaggctggcgacaggcaatggtagatgaaatgattgctttacactccaatgacacttgggatcttgttgttttaccctctggtaaatctacagttggttgtcgttgggtctacacagttaaggttggccctaatggtcaggttgattgccttaaggcccacttagttgctaaaggctatactccggtttatggttctgattatggtgacactttctcttctgttgccaagatagcttctgttcgtctattgctctccatggctactatgcattcttggcctctttatcagttagatattaaaaatgttttccttcatggggatcttgctcaggaagtttatatggagcaaccacctagttttgttgctcagggggagtctggtttagtgtgcaggttacaccgttctctatatggcttgaaacaatctcctcaagcatggtttagccgttttagttctgttgttcaggagtttggcatgttccgcagtacagcagaccattccgttttctatcatcataactcttcggggcagtgtatttatctggtagtttatgtgaacgacatcgtcattacaggcagtgatcagaatggtattcacaaactaaggcaacaccttttcacccactttcagactaaagacttggggaaactcaagtatttcttagggattgagatagctcaatccagttccgatgtgattctttcccaaaggaagtatgctttagacatcttggaagaaaccggtatgttagactgtaaaccggtagacactcctatggatccaaatgtcaaacttatactaggacagggggagcctttaggagatcctgggagatatcggcgacttgtaggtaaactgaactacctcaccattactcgtccagacatttcttttcctgtaagtgttgttagtcaattcctacagtcaccatgtgatatccattggaatgttgtaatccgtattcttcgatatatcaaaagcacaccaggccaaggtgtgttgtacgagaacagaggtcatacccatgttgttggttacacagatgcagattgggctagctcacccacagatagatgttccacttccaggtattgtgtttttatcagaggtaatctaataccctggaagagtaagaaacaagatgtagtggtcagatctagtgctgaagccgagtatcgagttatgactctagcaacatgtgaactcatatggctgaaacatcttcttcgggagttgagatttggaaaggatgaacagatgaagctcatctgtgacaaccaagccgctttgcatattgtatccaatccagtcttccatgaaaggaccaaacacattgaagttgactgtcacttcattagagagaagatcgcatcaggatgtgtggtgactagttttgtcaattcaaatgatcaactagcagatatttttactaaatctctcagaggtcctagaattaaatacatttgtaacaagcttggtgcatataacatatatgctccagcttgagggggagtgttagatagtgtacagttatttaagttatttacttttccttttcattttctttccttattgtattataggtcccactaacatgtatatatatacccaagtccaatgtgtattatttacagtttttcaataacaaaaattaaggattctccattttctctcttttcacatagacaccataatatctcatggaattgagacaatgtgttcccttgggtgatttaaaggacatatgatcataaaatttgtgacaccgtagtaattccttaagtgaaatttgacatatgctttttatgtgatggaatatgtcatttgattatataataagtgagatttgtaactcaatgattgaagaagtaattttgataggtgatagcactaccttattagattatggacaccggtttataggaagtttgcatgcagtggatagtaggtcatgaactcgagctttgtcttattgttatttacataaggtattgaagtatagttgattctctttaatggaatgttatttactttagaattgaattaagagggagtcaatactcctatggttcttagtagtcccctctttgaactcatataccatgatgacacaatttacgagggttagattggctctaggttcactcttgtgagtaagagcgttttggtaattatataaggttgcataaaggatagtgaacaaagtttctggattaggctaactgattaattagatggttatgtgtggttaatcaattaggacccgttttgggctaaattaaatgacccaagccttgttggactcaagtcactaaagccccataaagaactctataaataccccctgagaggttagggtttctaacacttttggtgagagctttcttccatctccagagagagagagaaagagagagagagtcatagcttcctcccttctaaaacccacactttggagtgctaagatcgtggttcaagttatcgagtggaagattttaggtgtacgagaccttgagacatgttcttcattgctaggaattaatctgggaacatccagatacaagtatgactaccatatctctaaatctttattctaatatggtttttatagcccttgacctttgatgctattgttacagccactgctatcccacatcgatacctgtgggagctctaacacggatccttacaagtaagtaagttctttacctaagagctcttatatattttccataaaaaaaaaaaaaaagaaaaaaaaaaagaaaatgtttgagatatcataaattaccgttgtcattgctcaatctaaagaagtgattactagtaataatacaggataattgtagaatattcaagcggtacacaggcttaatgggaagaattatttaaaatggtcacaacttggtcgtacctttctgaagggaaagggaaattaagtcatctcctaggaattggaccaaggagaggagatccttggtttgatgcttgggatgagcaagactctatgattatgacatggttgtggaactcaatgacgcttgaaattagtgacatatatatgtttttgacaactattaaagacatccagtatggagttcactaaacatactcaaaggcattagatgtagcccaagtttacgaaataaaagttaagattggagtggctaaacggggaaacaagagtgtcacagagtatgccaatatgttgaaaaatctatggcaaaaatttgatcattatcgatgtattgagacaaaatgccctaaagatgcaacaatcctgaagaattatatcaaaaaggatctagtctatgatttcttagttggtctcaatgttgtgtttaaccaagttagagttcaaatatttagcaaagaacttccaactttgaatgagactatctttaatattcaagcaaaagaaagtcgaagtgtcatgcttgaaccttagaatatgaaaggctcgactatggttgctaacaaaagtagtgatcataaggctagcattgctaataacaaaaggattgattggtcaagggcttcaaatcgtgataacagggataaattatggtgcacttactgctagaagcctagacaaacatggagaaatactagaaacttcatggtaagccaaccacatctagcaaagagtggggttacaatggagggtagcagagggataatgaacaagcatacttatcttttgttcagctagttgaagaaaaattcttggaacaaggtggaatcaggagaagattgaaaaactaagagttttgttggaaactcttgagaaactttcaggacctgctcactagcacttttaggtaagtttcctatttccattgaattaaaagcatcggataaaaccttctccagttcataggttatagattcaggtgtcacagatcacatgactcattcattatgctaatttaacaattataactcttgtctaagcattcgaaaaatagccacaacagattgttcattaaccactgtcataggtgtaggagatgttcaaattagtcctaggctaacatttaaaaatgtgctccatattccaaatttgtccactaatcttgtttctatacaaaagcttacataggatttaggttgcattgtgactttttacccttcctaatgtgtatttaaggaccaagacttggggaagatgattggacttgctaaggaagggaatgagctatactaccttgagacaccaagcaagtcatttgtatcttttcttttttatcatgacatattcaataaagaaaaaaatctagcttcatcatcatagactaagacatccgtcatttagaattctttaagatcatgttcccttctctatttaggaaattagatgttgagagcttccattgtgatgtatgtgaacttgctaaacacaggcgttcaaccttccccaccaataataaaagaagctcaaagccttttcatctaattcatagtgatatttgggggccctttccctatccttaatatattcggggcacgttggtttgtgtctttcatcgatgattgtactaggatttcttggattttcttacttaaacacaaacttgacgtaagttttgttcttccaaatttccatagcatgataaaaaattagtttgatgtcactatcaagaggttttggtttgacaatgccagagattatttcaatcaagttctaactccatactttcaacatgagggaataattcatgagtaatatgtcaataccccacaaaaaaatagagttgctgagaggaaaaatggccacctccttgatacaacataaacttcttgttccaaaaatatgtgcctaaatcttattggggaggaagccatcctaaccaccacacatctcataaactgatttccttttagagtcttaggtttcaaaagtcccatagaaagactcatcattttatcctaatgtgagaaccacaaaccatctcattcctaagatatttgggtgtctcatttgtgcatgttcataatccaagcaggggaaaattgaacttaagagcagttaaatgtataattgtgggatattcttcaattcaaaagggatataaatattaccatccaccatccaaaatttttattatcttagcagatgttaatttccacaaaagtgagtcttattttttctctcttttatctttagagggagaattcaatcaaggaagacaaggatcaagattcctatttcctttctgaatgaccctccaaaagtctttggtctagtgtttgaatctcaatttgtatcctactcctttgaactgtttttcagtgtatttttctatagtttagctgtctttggcaggaggattcctcatccttcttttgtactttttatctatcaataaatctttgtgtcgtttccaataaaaaaaaaatcatactcctttgaactcgagtcgtcatcgcttaagcatgttcctgagaattgaatgactggtaaaatgtactcaaggaagaaagttatagtccttagacttatgcaagtctaagaatctgaactggctttggggaatgaggtaatagtctctcatcctaagtcagaatttcagtttgaaaaacctatagatcaaaatctccttattaccattaagaagggaacaaaagaatgcactaaacgtcctttgtatccactttcccatgttgtgtcattcgaaaagttgtctccatcctataagagttctcttataagtttgaacaatattcatattactaccactctatttgaggctttatctaaagaaaattggagacaagccataaatgcaaaaatggagaccttggaaaagaataaaactttggagatggtggatttgcttgtaggagaaaatccaatgggatgtaagtgggtctatattgttaagtatagagcaaataagacattagagaggtacaaggcaagattggtagctaaagaatacactcagatatatgacgtggactatctggagacatttgctccgatttctaagatgaacacagtcataattttattatcattgatagcaaattataattggaatctacaatagttcaatataaaaaatgcatttctgaatggagatccggaatgagagatttatatggaagcccttcttggatttggtaatgacctagccactaaaaaggtgtgcaaactgaagaaagctctatataggttgaaacaatctccaaggacgtggtttagaaggttttcaaaattaatgaagaacatgagatacaaacaaaatcaagaagatcatacattgtttatcgaacattcagattcagagggagtcatagcttttttggtatacgtggatgacatcattatgacgggacttgatgagctagagagacagactttgagacaatgcttaactaaggaatttgagattaaagagttaggacggttgaaataccttataggaattgaggttgcatattctaaacaaggaattattatttccctgcagaaatgtgcagtggaccttctcaaggaaatggggaagttggcatgtaaaccagcaaacacatcagtagatcctaattataagcttggagaagctgaggaaaatactgcaatagatagagagatgcgtcaacatttagtaagaagactcatttatcttttttacacaagatcagatatgacatatgttgcgagtgtgatcagccaattcatacatagttcgacagaggttttgcaagttgctaattgagtactacagtaccttaagaggtctctaggtaacatcctctttaaaagatgctcgagactaatacttgaagcatacaaagatgtagattatgttggatctgtagttgatagaagatcaattattgggtattgcacctttcttggtgggaatttggtggcatggagaagtaagaaatagagtttggtggcaaggtctaatgcagaaacagaatttcgcgcaatggcctaatgaatttgtgaactactatggttgaagatcattttagaagatttgaagattaaataggatgagctaatgagactttgttatgataataaatctgcaatcagtattgtacataatccaatgcaatatgatcgaatgaaacacatagaaatagacagacattttattaagaagaaactagatagtggattgatttgtactcgttatgcatctactaattgccaacttgcagatatactcacaaaatgtttaaacagtacaaatttgtaaacaagtgtgtctaagttgggaatggaaaacatcgattcaccagcttgagggggagtgtgcaatcatgaaattaggaaagttgtgattttgtagggagaattacgcaatcccgtgatcaaaggggagttgttgtaattgagttaggaaagtttttaattgaggtgttaggaatttttgtttatatatgcgagtctttgtacaggctaaagattaaagaaaaagaatttatacctctaattccttccatctctcttcttctacatagctggtttttgttgttctcaccaaaattttgctaaaaagatccctaatgattggtgaggaattctataaaaaaggcaggctgtttttcttgatagtgcttttgtacctggagattgatgaaataagtgggagggtaggggaatagatgctattttctttattcaccatctctcttattttttcattgtggaaaccctagattaaattaatcttttgagatatcatttagagatctcatgtagtgttattttttcagtaaccttgtcctcctctggttacactgaaggagcagaagaaacgtttatgtttacataattgctatatctttatgttacttgcttgaatagtgggactttcctctttgaattttactggggatactaatacatgtttgcaaaattgacttcatggaattggaaagttgttacaaattgtcaaatacaacaaccaagcagcaaatatattctgcctgtaagacaagtcaataaaggacattattttaattaggagttgcttttatagatatgtgtaatgcaattatgtgacatcatggattacataaaccagatgaatttcctatatcagcatgaaggatatcgcatccttctttggattcaattaatgatttttatggaaaaatgatatgaaccacatggaattatcacaaaattgtacatgtagcaaatacatagacgtttactctagatcatcttatgttttaatgaaacttaagttgaaatgtctgaatgggtaatatattgatgcaggacaaaagagccaacctgga

SEQ ID NO: 13498 - DNA, 7536 bp, Vitis vinifera
  Intron number 3 from transcript GSVIVT01018573001 (locus G SVIVG01018573001) derived from phytozome v7.0 (chr-ID chr1 6; pos 13202811 to 13210346)
ttggagttgcagtcattgcaaagctcttcgtatggtcaatccatatcattttctattatccattaaaaatgtagtatcttttttgttctttttatttattttttctttgttacttgtgtattttgtgtactttgtgatcttattttcatgtttcaattgaagcttagctgttgcctaattgagtttatggtttccttgggatctttctatcacttgtttctcatggatggtatttttatgtctattttttgttgctttaactaaagaagtcaggttaaaccatatggtcctggaactttgaagtgcttgcaacattgtttgcaaatatgttattcagtgtaggagttcaattatatttcatcttaattcttgtagttacctggacaagatgatgatcatatggtatgcttgtggtgatgatttagattgattcatcagtaagcatgattttattgactccttcctataggccataaaagcttcagtttctggatacctgacaaattttcatataaatctaattgaaagtttgaaaattaacagtgagagactgatccattggtacggtacccaccagtagatctcctgtcagttgaagatcctgtctaatctgacttcgaaaaacatacaacatcaaggttggagttgtaacttcttctgtagagtactcccatacttatagtacctatgagatgccttaggattctatacactgcttctgaatgaatctattctttgaggatgatggataaaatgagaatcacttggaagatgaaggtgtccgaaagcaagtgttggttcgcgattgaatcgaaatcttttgagatttcgattgatcaagctggagggaggctagtgggtacaatcacggagagaggaagaggttttgtggagtggattaaatttggtgctaaaagtttgtcccagttactggaaggggtagaggaattttgcaacattgccgacaggaagaaggactctaagacatggttagaaggaggaagaagtttttgtctggcactaaggaagaatacagcaggatgctttttactttgcttggtcccgctctacggaaagaagaaggttttcccttgtgtttcctgaaggaagtggaatggtgggaggttgggtcttgctggccaataaactcagaagtcttgggattgtgccccctactgttagtcctgaagttcttgaaatggtcatctcctctcaaggtttgactaatagtactgttagaggtttgtcgtatgccgaagcagctaagattggccgcaggggaacagaagagaaagtgtggctccaaattggggggataaattccttcagctaactacaggattaagacactgtcttgtggggaaatggggagagggtgagcccatttcactgtcttccctaagaatttgggccaaggccttttggagattgaagggggagattcaccttgcttttcttggagagtctctcattcttttcaagtttgaactctgttcggaggtggagcggattctctcagaaggaccttgtttttataggaggaaaagactttggctagataaatgggtccctgaggctagctgtgttagagaaggtgcggaggtgggagaagtgtgggtaagactgttaggtcttcccctctttctttgggacaatgatttttttaaacagtttagcaatgcttgtgggagttttgtagcagttgataaagatactgctgggtctcagaatttaaaatggacgaggattttggtgagaataaatggtgacagcacgctcagtagcttgcaggttgtggtgcaagagcgctgtttttccattcctctatggtgggagatgtcccctagggtatcggtagtggaaccaagcagaggtggccgtaagctgaaggttggggatgacttggagtgtgattcacgcgcgagggtgagagtagagttggccactttctcaaaaggaaaaggtatagattgtgtgttgcagctggagcagaggaggggagctggtgatgtgatgcagcccaggtcttctgtttctgcaccgcagagggatggctctgagtctctgattgaaaagacagacctgggcctttcctcaggtggtgaaaaggcccatcaacgaggggctagtccaagggtgaaggagaggcctttaggggcttttgtccagaagaagaatttgggccaaggcattgggatgggcccaaatccagagttaagttttgagctgagttgcctgactaaagcctaaggggccttagtgggctctgagggctcatttaggaggttagaaggagtggcccaaacccttccctctgttgaaagggtctcgcagagaatggaaggcacacctcgcgagccccagctctatgtggaagatgtcaggctcgttcttgaccagcgaaatccttaggttttttacgctttgggttcagccgtcacgaatgacgcgttgttggaggaggccgctcgctttacaagccagattccctcagtcctttctctcgggggggcgggtttttctcttctactccttcttcttctttgccctctgacggaaaaggcttgggtccattggtctgttaagaggactcgagaagcttttcgatggatggggatgccgtggagctagggcctttgcgtattgtccaattagatggctcggaggtatagtggtcttcccatctagggcgtctcgaagacaacgaaagcaaggaaggtgcaactgaaggcactttcttagacgagacttttggaagattgctttcttttagtagattcgtggggttgacgatggatggctttgaaaatgaaatcttgactatgtttcaaagtttagagtgtagaacaaggggcaaaatttatgtgcaaggaggaaaaaagaattctttacttagatccaaagtcgagagagagctacggaagttagagtgttccattaagtatgggtccccctcggattcaggaaaaaggagcgggaaattcattggggaatgttcaagaagtgttgatgttaattagaattctctcttggaatgtcatgggaataaatgataaggataaaagaagggtagtgaaggccttcttaaggattcaaagggcaaacctagtttgtttgcaggaaacataatgcaaactcatgtcggattcggtagtgagaagtttgggttttggtagattcgtaaattggggaagtgtgcactccagagggcaagcagggggcatcttagttttctgggattgcagagtgttggaacttcttgagatggaaacagggcagtattccatatcatgtcgattcaaaaattgcgatgacaatttcatttggatttttaccggcgtttatgggccagtccattattttgagagagaattcctttggtttgaacttggggatattaggggtttgtggaatgatccttggtgtgttggtggtgatttcaatgtgattaggcttcccagtgaaaggagaaattgcctgaatatgtcttcggcaatgaggcgtttttcagaggtaattgatgagttgcagttgagggatctacctctggttaggggttcttacacttggtgtggaggtttaaataacagatcaacttctagactcgatcgttttttggtctcagaggaatgggaaagccacttttccaacctttctcaaagcttgttgcctaaacccatttctgaccatgctcccattttgttgaatggaggaggaattagaggcagaaaaaccccttttcgctttgaaaatatgtggttaaaagtggagggcttcaaagacttggtcaggaagtggtggtcttgctacaatttcagcggatcctacaatcacattcttgcttgcaagctaaaggctctgaagcaagatctgaaagtgtggaatagagaggtatttggtaatgtctctttgaataaaaacgctgctcttagtcagattggtttctgggacgccaaggaaagagactgtggtctctctttagaggatagtgaggctagaagaagggcagtggaggagttcaacaagtgggcagtcttggaagagatatcttggaggcaaaagtcaagagaattgtggttgaaagaaggtgataaaaattcaaagttttttcacaagatggctaatgctcaaagaagaaagaattttctttcttctattacagtggatggtaggaagttaactaaggaaattgagataaaggagggggtggttaatgcattccaaaatattttgttagaaaaaggggactggagaccaagtatttcggggttgtctttctcttccttggatagtgtccaggcggggcttcttgaggatgtcttttcggtggaagaggtctaggctgcagtctttggtttgaatggggataaagcccctggaccaaatggatttactttggcgttttggcaattttgttgggatatagtcaagcacaaaattatgggcttttttgctaaatttcacagttctggccgttttaagagaagcttaaattccacttttattgttctcattcctaagaaagaggatacagatgatttgaaggattttcgtcctataagcctagtggggagtctttacaagattctagctaaagttctggctaatagattgaaaagagtggtgggaaatgtcatttcgaactcccaacatgcctttgtggaaggtagacaaattttggatgctgtccttatagtaaatgaggccttagattcaagactaaaaagtgcaaagggtggaattatctgcaaggtggatattgaaaaagcatacgatcatgtgaattggggttttttattagcaatcttggataagatggggtttgggactaaatgggtgaattggatgaggtggtgtatttcttcaatccgtttctcaattttgctcaatggttctccagtaagctttttccaaagttctagaggcctaagataaggagatcctctttctcctttccttttcattatagcaatggaggcgttgtcttctatattgaagagggctctacaaggaggctatcttgagggtttcatggctggtgggagaggaggtgagggtgtggttgtttctcatcttttatttgctgatgacacactagtcttttgtgatgtatgcaaggagcatgtggaggtcttaagttgggtttttatgtggttcgaagcgatttctgggctaaaaatcaatcttcacaaaagcgaactgattccagtgggggtggttcctaattttgaggacttggctagggttttgggttgtaaagtgggttctcttcccttttgttatttagggctgcctttgggagctgctttcaaatcatcgcgagtttgggatgtagtggaggagagatttcaaaagcggctcgctttgtggaagagacagtatttgtccaaaggaggaaggttgactttggtatagagcactctctctagccttccaatttactttatgtccttatttatcattccccgcaaggtgagcctaaggctggaaaagattcaaagagacttcctttgggggggaggagtttctcaaagtaagtcgcatttggtaaattggtccattgtttgcatggagaaaaaggatgggggcttaggtatcagaaatctttctagattgaataaggcccttcctagaaaatggtgttggagatttgcttcagaacaagagtctttatggaaacaagtgattgtaaggaaatttggggaggaagatggaggttggtgctctggcaattcaagggagagtcatggagtggggctttggaagacgattaggaaagggtggttggagttcaacaaaagggaggcttttaaggtgggggatggtagtagagtgcgtttttggaaggatagatggtgtggataagattctgtggatgtggcttttccaaggttgtacaatcttgccttatccaaggatgcttgggtagctcagttatgggattagtccgggaatttgggttgttggaaccctattttcacaagattcaacaattattgggagatggaagaggtggaaacttttttcagaaggttacatggccatgcgcttagaagggggattgaggatgtcatgtattggagggtttcaaagaaagatatctttacagttaaatctttcttctgttccctagctccttgcattggtagagagttcccttcaagcttagtttggaatccttgggttccaaagagagtcagtttttttgcttgggaggctatctggggaagaattctaactttggatcaattaaaaaggaggggttgggccttaccaagtaggtgctatttgtgtaaagcggatgaagaatcagctaatcatgtgcttattcattgtcccaaggcaactatgatttggcaccttatttttgctctttttagtgttcattgggttttgcccaattctatcaaggaaaccattcttggttggaatgacacctttgttggaaagaaaagaaaaaaggcgtggaatgcagcccctctatgcttattttggacattatggaaggaaagaaatagaagaatctttgaagattctgaattaacggatcaagctattttacggtcttttttgtacatgttctcagattgggttagggtgcatgtaaattgtgcttcatggtccattttcgatttcattgattggttgggttgtaagcaagggtttttttgttttttctctacctttagcctagttgccttgtatactccgtgtatactgtcaggtgtaattcaggctttctttatacaattgcttttacttatcaaaaaaaaatagactgatccattggcatatttttggggcaactataaacataagctagggagtcgaggactttccccccaccacttggtgtgtagcacccaaagaaagagaagaaaagaaaaagaaaaatgccaaaatggcactctaggtgaataattgatgtggaatagagaagttcctcacatccttttctcataccaataggaggaagaaaaggaaactctaaatcaagtggaaataggacttctgttttggtggtttcatgttctgtttctgatcatgatatgccttctttcacattgaatttgcttaggttttccctcacagtttgcaacatgggctgaatcagaattatttcacttttattttcttttagggtgtgttgtacatgggaatatggattgagaaagaaaacttcattccatttcctatttatcaatagaaatgagaatgagaataaaaaattattatcatgggaaccaaagcccactcactctcataaggattttgactcgtttctttcatatggtattctgattcacctccattcctagtcctattcctacataccaaatgcacccttattgctagccttttttatgttttctgccttacttcggtggctctctctctatatttcgtgtgtactgggattttccctttttaagcaattgaacatacactctcattactatatatatacacacatacatatatatatatattgttatttcatggttaatgtaattggtcttgtatactggcagtacg

SEQ ID NO: 13499 - DNA, 3749 bp, Vitis vinifera
  Intron number 4 from transcript GSVIVT01022381001 (locus G SVIVG01022381001) derived from phytozome v7.0 (chr-ID chr7 ; pos 19391712 to 19395460 reverse strand)
aaaggtgatcattaattcaattctaacatttctaagaataacctatatgccttgcatcaacgcatataatgtcaagtaggcatcttcaatataggttttcaggagtaaacaagattttcttaccatgaaaataaaatatttaaggttaaatgagtaaaaattacttttctatgtcaagtcaagaggcatatatgtttgaaaattgaaggggccaaatataacttcttgatcttgggtgatcttgtttatgttggaacttcttacatttgttagtgacttggctagttttgcattcagtggaatattgactaatattgtcaacttatatagtgagtgatatggcagtatcctatcatggggagaatttatttcttcaatatgccttccttaacaagaagacctaatagtttacacacacacaacacacacatggttggatttgggatctacaaaaacaataccaccaaagatgaataactatcattaaaaatatatatttttacagacatgaatttgtttgggtataaaccttttaaattttaggtccatcttgctcagttataggtcaaatagttgaatctctaaatgagaatttgaaagcatagtgcaataagcatcctcatatctagagaatcatccattaaaaagagggctggagaatggcctaaaataaaaactttaatttttgattaatattatcattacaccttttgttaggctgttcttcaaggccttgggatatagttagcataaaaccattattttcaagattagaaccttgaggcttcaggatatggttagcataaatcattattgtcaagattagcatcttggtgttaagtggtgtttgttgaggctctaggaaaattttccttttccttttttcttttttttaaaaagaatttttgccatctagccaataggacaagccatgtgatgggaatggatctccaagatttacattaacaaagggaattagtattagttgcaattaatgtaggattagtattattttgaattaaattaggattaacatttgttagagtttaattaagaatagctaattagattataagatgattagaattagagtcataatagattattaaaatcttagtagactttggattttttagagaagcctataagtaaagctaattgatgtaaaccaaagtattggttgatgaatagtaatattaagttttcttacatactttgtaattttcaattgtgaggctccatagatttttttctaagtgagacttttagaaggccttggtaagactcttaaggtttctatctcttcttattcttatcttctttctctttgttttattttattttgttttgctgcgacaaattttatcccttgctcctctccttaaaccttaaaagataaaaaacgtagtccacctaattgattgtaagcaaccatcctagggttgttctacatcagttttggtatcagagcacaagttcttgacgtgaaaacatatgcaattgaggaacaaagcaatatatacaaccatggttgaaggctataactttttatgcaaccattggtgaacataccaaggctaaatgaagagaaggattgacgatgtactagcatcttccgaactctttttgttctccaagggagactatgtactataattattaagggaggtggtagttccagcttagctttggaagaacttgttgagaagcttaatctaaaaatagaggagtgtccaaatctctatcaaatagtatgggtaaatgacacatctattttggtgaattctcattatctaatgacaaatttaaaaataattttgagttattagcatggtgtgatattttgccaatgaaagttgccatattgtacttgaaagaccatggcttttttatgaaaggtccaacaagatggatatgagaacacttacatacttgtacacaatgggtataagaaggtcctccatccaatgaaggaaattccaacacttaagcaacaaaagggaaaattagcatccttgaaaccaagagagctatcaagtactcacattaagaagcaatttgaagttactagtaagggggaagaaatcgtcaatgatgaatctaaaatgcaaaaggtgatggaactgatcctgaaacaacctgtaaaagaactcaaagaagtcgtaaaagcttcagaataactggtgctttaatttccaaggcaaaacattatcatgattagtggcaaatatgaagaatcttatgattatataagaattgctgaaatttcgtttgaatattaagaattcaacaatcttgttcttgtataagatagtttacaaaaaatgagtgggaagcaacttgctataagcttgtgaatgacaattatttcaagaactattcacttatttctcaatattggaaaatctttcaaagtttggaacttgtcttgcatgaacttgaacaagttcaagagatctttgaggttctatcatatcgtggtacaaagtcgatgaacaaagaaagggtgttttttttcaaatcggagacatatatcaagaaaagggaattagcattagttgcaattaaattatgattagtattacttggaatcaaattaggattagtatttgttggagttaaactaggagtagctaattaaattataataacaattagaattagagtcataataggttatattagaatgctagtagactttgaattttttggagaagtttataaataaagctaattgctataaatcaaagtattgattagtaattaaacattttcttacgtactttgcaattttcaatggtgagactccattgattttcttttatgtgagacttctgaaaggccttattgagactataaggtttctatctcttcttcttttaattttctttctctctattttattttattttgctgtaataaactttatctctcgttcctctccttaaaccctaaaagatacaaaccctagcccacctatttgattatatgcaaccatcttagggttgtcctacatcaccatgtctgcccaaaaatggaaacttgcttgtttttcacacttgtcatctgatgccatcgctttataggctagtgcttcctcagtatttcaggtgtgcttgtcagcttaatttagaatagttgatgtagaaaaaataacaagaaaggaaaaagctcatcctaagaaagcataatcagatcctagtttaatagaaattaaggtttattagaagttttaagaagtttgctcttgagagcttttctttttcattttctgtgattgttagtacttggtgaaaaaaagaaaaaaaattcaaatatatgggtttttgcattgattattcatctagacttgaagcctgcacttttcccaaagttttttcacgagaaactggaaaatgcatgcattagtaagatttacttgggtgtgaacttttttaattataacatagacaaattcattaagatgtgcatgctagtcctggtttacaatcaagggcttaatggtttcaaaatgggcatgtcaatgagctctaagacaaagaagttatggaaatataaccatattttttgtctaaaatataaaagaatatgcatgacatcaacaagaattacagtgtatttctgatttactatgatattgccttgtgaaaatactcatcattttcttgcttactaatggttctactattatttataataatactacatctataggactgaagaatccaagtctgagagtaactctgaaa

SEQ ID NO: 13500 - DNA, 14954 bp, Vitis vinifera
  Intron number 4 from transcript GSVIVT01034358001 (locus G SVIVG01034358001) derived from phytozome v7.0 (chr-ID chr1 0; pos 17536522 to 17551475 reverse strand)
tctgaaaccacagttcttcttccacatagagaaaggtaataatgaattttagacatttctgctatttggttatgacattatttaaatgcttaggttgcatgtggtctttaatttttgttagagactgaagcctctcttgttgaaatttatctatccaattgtcaatatatgcactaagttttattatcaacgtagtgcatagaagattctctttagctatgatacttggtacaagcattcttctctaggatttttatgctattatttcctctagggaggctaaaatgagggaggtatgtgttagcagcaatagggagctgccttggaatatgattttgattagcatttgaataacagggagttagaggcagttgattctttgttgagaggttcatataaggtggggccaaggggagttctttggcttggaaaatacaatgaatcggacattattggtgaagtcttttttattaaatcctagtagaaggcaatgaaggcacctagtagaaggcattagaaaatacaatgttcatattcttcatgttcaggaaaacgaatggcccaaatagcaaacagatctcatatactggttaatggtaaaggggttatttgggtaaattcaaatatcacccttaattcagttttgcacgtaccaaatatgtcctacaatcttttgtctattagtaagttgacaaagtgtcaaaattgtttagtaaccttctatctaaattactgcgtcttctaggatcttaccatagggaagacgattggcagtgttgaggagaaagagggcctgtacttcttagattctaaaggagaaaagacctcaagcccatcaagttaggggcagtcccagcaaagagaaagaggtttggttatgtcattaaagattggtcgtccaagtttctttgctttgagagttttgtatccaaatttatttaaaaatttggatgtttctgttattagatgcaaaccttgtgaattggctaaaagtcattgtgttccctattattcacactgatgtttggggaccctctaaggttgcaacacttttaggagctaggtggtttattggttttattgatgattacatgcaggtgatgtgtgtttatttacttaagcaaaaatatgatgcattagaggtttctaacgattttgcgatatagcaaaaaagttagagagaaaaaggatagaacacgtctaatccaagacagtctggaatccaccaaagaaactctcaagttttccattgactgaaaatttagaacaataggaaaaatatctctcttcatcatcggtccctcctatttatcccaataatactttaatgtcttcataacttctgacacttagaaaatgaaaactcacataaatagctgccacaagtaaccaagtattacaagtctcaagtctcctagataatttaaatggtattttgatactagttgacttgactactttcttggaactaattttcctatgtcatttttcaaaagatcaaaaaccagttgatgcaaaagtaaaggttgtttgatttgatgatggtaagaagtactataatgaatatcttgtgaccgatcaagagaaaaaactagcattcaccgaattcttattgaaaataaaacaaagttacaaactataatttatacatagcaggacatgaaataagccttaattctaggaataataaaatcatatctcctaatcaaaaaagtcaaaataaaaaaagtcaaataacagccaaataattgctgattatttgactactgatttaaaacaaaatctgtccataattagaatgatttgattttattcaagttatccaccaacactccccctcaagttgggttgtacaaattgaacatacctagcttgtctattaggtgctcgaatgatcttcttgataatgctttggtgagtacatctactacttgtgtatttgttagtacataaaccatggaaattgtaccgtcttcaaccttctcttttataaagtgtttgtcaacttctacgtgtttagtctgatcatgatgaactgggttttgtgatatgttgatggccgccttattatcacaatacatcttcattggcatctcctccttcacaccaatttctcctagaagttgtttaagccacaatagttcacacataccatgagcaatagcatgaaattccgcctctgcgttatttctagctaccatcatttgcttcttactcctccaagtctccaagttgccccacacaaaggtgcaatagcctgaagttgatcttcggtcatctatggagtctgcccaatcagcgtccgtgaacccttcaatgcttcttgtttcatttttcctgaagtataatcctttcccagtagatcctttaagatacttcagaattctatacatggattccatatgcccttcacaaggagcatgcatgtattgactcacaacgcttactacaaaagtgatgtccgacctagtgtgggaaagataaattagcttccctattgggcgttgatatgttttggtgtcaacaggtgtgctttctttttgttctccaatcttttttactggatccattggagtgtccacaggtttacatcctagcattccggtttctttcaaaagatctagaatattttttctttgggaaactgatattccacttttgttccttgccacttccatacctagaaagtaacgtagaggtcctagatctttagtttcaaacttagcagccaacttttcttttaattgttccatctccattggatcattcctagtcactataatgtcatcctcatagacaatgagaatagtgaccttaccatcattgtgacgataaaacaaggtatgatcggattgagcctgtgtatatccatgcatcacgatggtcttggtaaatctctcgaaccatgcacggggcgattgtttcaacccatagagagattttctaagcttgcagactttcccttccttccatgatcgaatccaggaggtaattccatgtacacttcttcttctagatctccattcaaaaaagcatttttaatgtttagttgttgaagttgccaatctagatttgtagcaagggataaaagaactcttacggtattaagtttggcaactagggcaaacatttcttgataatcaataccataagtttgagtgaatcccttagctactagcctcaccttgtacctttcaatggacccgtctgacttatattttacagctaacacccatttgcatccaacatgcatcttttctttgggcttgtccactaaatcctaggttcggtttttttccagagctttcatttcctccattacaacttctctccattgaggattgtagagcctcatgaatatgtttcagaacttcttctcctgaaagtttggaaataaacgcttgaaatcgaggtgagagatgattatatgacacaaaattggatattgggtgttgagttcatgatcaaactcctttcctcatggctataggcaaatcaaggtcgcttaccttaggaatgacaattggttctgattcttgacagcactgttggtccattttggtctctactattctcgacttactcctccttgaatagacacgaagttctggttgttgcagtgaatctccccctggccttgaatctgtttttgttgttgacaccccaggttgagctgggttaggttgttctggtttgtcagtttcaaactctggcttgttaaggaggtgttctggctgttcaggtgggtcagaaggtttggtttaatagctgttttggtgacacaactgggttaggcagcaagtttggtggttgttttggcatagaaggctggtttaatagctgttctggtgagatagctgggttaggaaacaagtttgatggctgttttggcaatgggctcagcaatgttaattcccaaaaattctctttgcctacattctccccttgaagtgaattttgggagaaataaggttggttctcaaaaaacataacatacatagtgacaaagtattttcgtttttcaagagagtaacaatgataccctttttgtgtggttgagtaaccaaggaagacacagcctaatgcgctaggatccagtttggtttgattctgatcaggaacatgaacaaagtctttacagccaaaaacctaaaggggaagttggctaatggaccgagtttgtggatagaattgaaggaagttgtttaacggtgtttggtaattgagaactcaggtaggcatacgatttataagataataggctgtaagaatagagtctcctcaaaattgttttggtacgtttgtggtaaacataatggatcaggctacttccaataaatgtctattttttcgctcggccactccattttgttgaggtgtacctacacacgaatgttgatgcataatccctttttctaacaaataattccctagaatggtgttaaaataatcatccccattatctgttcctaagacttggattttagcatcaaattagttttgaatcatttgacaaaaatttttgaatgttggttttacctcatttttttctttcaagagatatagccatgtagtgcgtatgtgatcatcaataaacgtgatatcctagttagactttatagacgtgagagaccccatatgtcactatgtatcattgcaaagggtttcgatgctttgtagtcaagaaggacaattggagcgttgatgtttggcaaattgacaaatatcacactgaaagacatctttattattgaaaagagaaggaaacaaatgtttcaaatattgaaaattaggatggcctaacctaaagtgccacaacattattttttgttgcttagtcctagaggaagattcacaaccagctgttagagcttgtccatccttggtattgtcttccttgaagtagtagagccctccatatttctcagcactgccaatcctcttccttgaagacatatcctgaaattcacaatgattaggcaagaaataggcagcacaattcaaatctttggtaagtttgctaatagacagcaagttacatgatagttttgggacatgaagaacattgaaaagggttatatgtggccttaaaattatagcaccagtccctacaacagttgcaagggatccatttgcaattttgactttaatgtgcccacaacctggagtataagtagaaaaaaaccttgcaaaacctgtcatatggtctgttgcccctgaatctatgatccaagggttgaatttttctgttgttccactcaaagcagtccgaaatgtacctttttgggctacgaatgatgaattaattaggttctgggatgtattagtgcctgattgtgctggtactgaggctgaggatggcgttaacaatttgtagagctgctctaactgctccttgtttaaggaaatattgacaaaattttctcctagctgctgttcagtatccgaggtggtctgatatcccttgggttccctcctagttcctctgttatctctgaaatttggtggcttgccattcaacttccagcatttttcatgactgtgattggatctctgactgtgattggatctctgattgtgatcacaccaaaggtttctgtttcttctgttgttgctcgtatcttcacggggacagtcatttttacgggctgctagagcggagttatcaacagtagtatggccagcaacaataggagttttttccccaccaagcattacacgtttgtgtgtctcctctctcctcacctctgcgaagatttcttcaatagctagaagtggctttattctaagaagtcgaccacgaatctcatccagttcctgttgagccccactaagaagtcatagatcctttccttattaatccgagctctgaatctttcacaatctgctgtacagcttcaattgcagtcgtcagctaagtccaactcttgccatattttattgagtgatgtgaagtacgtagacgcatctgaatctccctgatttaaatttctggccatattccataaccaaaaaacctgagctgaattttctaagtcagaatatgcaagatttagagaatcccagatttttttttgcagtaggataacaaaaataattgctctgtacttcgtcagtcatggagtttaccaaccaagacatcacaatcgagttgtcggtgtcccatatgaggtaagttggatctgtttttgctggttcaataatggtgccattcaggtaccctagcttgccacggcctcgaaccaccattagcattgctcttgaccattacaaaaaaaaaatttcccttcaattttttcgttgtaattttagcggagcattttatgaggttaagacggtgagagcaattgtaggaggtgtctgagaagtgtcggacggctcctctgagacactacccctgcttgctccagccatggttgttttgaccatcgtttttttctcaactagaagtcggttggctttgattccatgtcactgatcaggagaaaaaactagttgtgaagagagagaaaaagggagaatccttaattattgttattgaaaagctgtgaagaatacacattggacttgggtatatatatacatgttagtgggacccacaatacaataaggaaagaaaaggaaaaggaaaagtaaataacctaaataactgtacactatctaacactccccctcaagctggagcatatatgttatatgcaccaagcttgttacaaatgtatttaattctaggacctctgagagatttagtaaaaatatctgctagttgatcatttgaattgacaaaactagtcgccagacatcctgatgcgatcttctttctaatgaagtgacagtaaacttcaatgtgttcggtcctttcatggaagactggattggatgcaatatgcaaagcaccttagttgtcacagatgagcttcatctgttcatcctttccaaatttcaactcccgaagaagatgtttcagccatatgagttcacatgttgccagagccatagctcgatacttggcttcagcactagatctgaccactacatcttgtttcttactcttccaggatattaggttacctccaataaaaacacaatacccagaagtggaacgtctatctgtgggtgagccagcctaatctgcatctgcgtagccaacaacctgggcatgacctctgttctggtacaacacaccttggcctggtgtgcttttgatatatcgaagaatgcggattacaacatcccaatggctatcacatggtgactgtaggaattgattaacaacacttacaggaaaagaaatgtctggacgagtaatggtgaggtagttcagtttacctacacgtcgccgatatctcccaggatctcctaaaggctccccctgtcctggtataagtttgacatttggatccataggagtgtctaccggtttacagtctaacataccggtttcttccaagatgtctaaagcatatttcctttgggaaagaaccacaccggaactgaattgagctatctcaattcctaagaaataattgagtttccccaagtctttagtctgaaaatgggtgaaaaggtgttgctttagtttttgaataccattctgatcattgcctgtaatgatgatgtcgtccacataaactaccaaataaatacactgccccgaagagttatgatgatagaaaacggaatggtctgctgtactgcggaacatgccaaactcctgaacaacagaactaaaacggctaaaccatgctcaaggagattgtttcaagccatatagagaacggcgtaacctacacactaaaccagacttcccctgagcaacaaaaccaggtggttgctccatataaacttcctcagcaagatccccatgaaggaaagcatttttgatatctaactgataaagaggccaaaaacgcatagcagccatggagagcaatagacgaacagaagctatcttggcaacaggagagaaagtgtcaccataatcagaaccataaacttgagtatagcctttagcaactaagcgggccttaaggcgatcaacctgactattagggccaaccttaactgtgtagacccaacgacaaccaactgtagatttacctgagggtaaaacaacaagatcccaaatgccattggagtgtaaaacaaccatttcatctaccattgcctgtcgtcagcttggatgggaaagagcctcaggggtgctcttgggaagagaaacagaagatatagcagaaacaaatgcagaatagggtggagataatcgatggtaactcaaaaaattgtaaatgggatgaggattacgagtagattgattaccttttcgaagagcaatgggtaagtcagcagaaggaggcagagccggggcaggagaagctgaagggataggaagtgagtcagcaggtacctcggccaaagaaggaggaatagcgacacgatgacggcgatgataaacctaaagtgggcgagaaggcactgcatcaagtggggagataatgggaagaggtaagacttcagaaacaggaagagacttagaggtggagaagaacggtgagtcctcaaagaaagtgacatcagcggagagaaagtagcgatgagtctcagaggaataacaatgataacccttttgaagtctggaatatcccaagaagatgcatttcgtggctctggcagaaagtttgtcctgtccaggagtgagaatatgaacaaagcaagtacaacaaaaaacacgaggaggaaggaaataaagtggttggtcagggaaaagaatggaatgaggaatttgatcgtgtaatacagatgagggcatacgattaatcaaataacatgctgtaagaacaacgtccccccaaaaacgaaaaggaacatgactatggagaaagagagtacgagttgtctcaacaagatgtcgattcttacgttcagctaccacattttgttgaggagtatgagcacaagaagactgatgaatgatcccatgttgggacataaatgaagtaaatggtgtagaaaaatattctctggcattgtcactgcgtaacacacgaatagaaatattgaactgggtttggatttcagcataaaatttttggaaaatagagaataactcagctcgatttttcattaaaaataacaaagtacatcgagaatagtcatcaatgaaagtgacaaaatactgaaatcctaaagtagatgcggtccgacaaggaccctaaacatcagtgtggacaagttcaaaaggagactttgcctgattattcaaacgctttgggaacgagacatgagtatgtttcccaagctgacaggactcacacacaagcgacgacaaagatgaaaaactagggaccattttctggaacttggatagactagggtggcccaggtgactgtggatgaggaggggagcatcagtggaaatgaaaactgcaggagttgaaggggaggtgaggtgatagaggccttaagactcacgtcctatgccaatcgtcttccccgtactccggtcctgcaaggtcacaaatttatcagagaaagtgatagaacagttaagagtgcgagttattttgctgatggaaataaaattaaaaggacactcaggggcataaaggacagaatggagaggtaaggaagggagaggatgagcgaaaccaaaacctttagccatagtttgggaaccattagctaaagtaacagtaggtaaggcagaggtagtagtaatagaagagaaaagatccttattaccagatatgtggtcagaagcgccagaatctagaatccaaggtccaagagaagatgtgtgggtaagacaagcagaagcatttccagtttgggcaacagaagcaacagaagctgacttggtggcctgatagcggagatagtcgtcatactcactgtcagtgagggaaataccctgagatgtggaggaactggaaggctgaggcgactgaggatcagatgactgagccacgtgagtagtgcggggaggccgcccatgtaactaataacaccgatcatgagtgtgaccaaacttattgcaataggtgcaatgaagatgttggcctctacctcggttaccactgtgtcctcctcgagagttagtttgagaaactaacacagaagaatctgaagtattatcagatggcaaaatctgagtggaggagatacggaggaggcgagcaaacacatcatccaaggatggaacggaggaactgctaagaatctgatcgcggacggtctcgagatctggacggaggccaataagcgtaagaaccatgaagaacttgtcaatctgtattcgttgatccccaacatcagtagtaagaggcatcatggtcaagaattcctccttaagagaggcaatctggccaatataagtagataaatccatgtcttattgtctgacattgataatagaagaagccaccttataaagacgttggctatcattcgtatatagcccttttggcttgattccaaaatttaaagcatgttttgtaggcccgaagatgaagcagaatcttaggatcaactgattgccataacacactacataactgtgcatctatcttcctccattgtactctgtcaacctcagggatatccgcctcctgcgtaacaaggtgatcctcataaccttgacccataaaccaaagctccacagaggcagaccaggacaaataattttcactgttaaccaatttctccgaagtaatcataggagatccagatatgacagaggaaaaagtggaacttttagtagccatatctacttatctggagaacgaaatatgtttggatcgaagagagccctaatacggcttcagatcgcggctgaaagaagaaaaaaccgaggatccattgctgtgagagaccaaataataaagaaaaacaaatgtggtactactggaagggtagaagaagttgagatttggaggtcatatggtctgtggcaccggagtctattatccaagagtcatcataaaccctatgtaaggcatttatgcaaaaagagagtgaaggtgtacctgaaagagccaaaaaacaagttccagtaggtttgtcaagggatcccaacaagcttctcagcttttccatttattcactattgaacccgcctattgctgaattttcctcagttttgggttgctctgacatgtgtgcttgaggcctttgctgccctccacggtttccccattcacgacttggtggtttaccattcagcttccaacacttctcttttgtgtgccttggtttcttgcaaaaggtgcaccagcgattgtccttgttctccttccactgattgtctctacctaagtgtttaggcagatttatctttccttgttctgaatattctgtttttgcaactagggttgatctatccaaggtttgtggttcaagcataacactccttcggctttcctcgcctcgaatcaatgctaccacctcattaaagcatggaacctcctgcttgccaagaatctggattctcacttgatcaaattctgggttaagcccaacaagaaaatcatagactctatcttgttcaatgaaatcctttagaatagcggcatcctcaggacatttggtttttatcaccctataatgatcaagttcttgccacaaagctttcaattgattggcatattcagtgactgttttacttccctgttttgcagcaatcgtcttcaccttaacctcatatactcgagccgcatctctagcttttgaatacgtctgttggattgcgtcccaaatatccttagctgtggccaagaacatacatgtgtcgctaatctcaggagtcatagaattccacagccacgccataatcatagaatcttcttcatcccatgcttcaaaacggggatctcccggtttcggccctatacccataagatggctgatcttccctttccctttcagcacagtgcgaacaagttgagaccatttaaggtaatttttttcatctaacctatatgtagcctgaatgttttgcaattcccctgattgttgagatcgaacaatctcctccgaatgtgttgtagtagtcatctctgtaaccttcgacatcatccaaaaaaatatgatctcttgggaattaaggtagatcgcaataaagaaaaaccagtagcaatgaaggttggtaaaagaacacgtgaataaaaaaaaatccagctatgaaggctagaaaaatggcgatgaaggccagaatgatgcccaggtcttaaaaacctatagctctgataccatgacacgaaatatgggatgaaaaataataagttttatctattagattgactatacacatggtttatataggaaattacaagacaagaaataggaaacaagagacataataggaaactaacttattcctaaactaacttatttctaaatcataaaactatttatttatagaaataagaaactaatataataggaaaaaaaattctcctattttatttacagctcaacagctatatatcttttaccagctgtaataatcttcaacagcatcgatgatatacaggggatgatatagaaaaaatgcagaatttgaagctgaaacttgtctaaggaatttgaaatcaaagaccttgggaacttgaaaaacttcctaagaattgaagtggcctggtcaaaggatagaatataaatgtcttaaaggaagtatattcttgatctattgagtgaagctgggatacttggttgtaaacctgaatcaacaccaattgatgctcaatatcaattaggaggagctgctgatggttttcttgtggataaaggttggtatcatgggctcatggggaagcttatctacttgtcctacacacaacttgacattctatgctgttagagttgtaagtcatttcatgtgagctcctttggaaagtcacatggaggtagtcatgaggatcctaagattcctaagatacttaaagcttacacgtagcaaaagactcttgttcactaaaaatggacatttgcaagtgacagcttacaccaatgtagattgggcaggttcactttcaggcggccaattgacttttggatactacacacttgtggctcataatttagtaacctagaggagtaagaagcaacctgtagttgctggattgagtcttaaaacagagtctagagccatggctttgggatatgtggcagaagaacctcttgaaagagttacaagtgaagatttagtagcctatgagactattgtgacaacaaggcagctattagcatagctcataattttatacaacattataggactaagcaaacctgcttgtggacagtttagaaggaaaaaaacagacttgcttttgaaaatggggagctttcaattcaaaggctcaaaaactcttttctttgaaatttctggtcttggattaagctgtttatacatgacagaccattatctttaatcaatttctttaattggttggctctaggtgacagcaggtgttgtttttcgtatccctctttttttctggttttgcctttaggtgtctgctgtatggtttaggacgcccttttggtgcccctttctttttatatacacttttgattttacctacaaaaagaatgatggaactaaacacatagaggtggacaaacagtttataaaggagaagatggtaaatatagttgtttgttctccatttgtattcttgaagtctcaattggctgacatatttactaaggtagttcctttggcgactttttcatcaatggttagcaagttgggaatgcaagacatcttccaaccagcttgaggggagtgttgatggtttttggttaattaatcagctgaggattctcagcctcgatattttatttcctggatttaaagattctgtctgtagccttcgtattttttaggaaactttgaatttcctgattatttagaattagatcatggaaatttcattttctttgattctttccttttgcatttccatttttggaacagaaactctgtatttgtagacatgtactctaattaatggaataaaacatttttgagttccaagtttacacaaatgaatacattttgtttttgattaacagaaaaatgagtttgtattctatggtcatgggaggattttttatctcccccactcctccccccccccccaaaaaaaaaaaaaaaaaaaatcccaggtgtaaatgtttgtttcttttctttgtatacttctggtatgcctggaccttgtccctttcatttagcacaaatgcttactcctcaataaataaataaataataaaagagaagacataggagggtttacattgaaagagatcagataataaagaaaggagatgacacaggagggtttaaattgaaagagatgagataatgtaagttattgcagacaagttaaagcacttgtcttactagattttgatgattatcaatcttgatttaggagggatataattgatctacaaacagttcatgaatttttttggggtttgtatataagtctttttttttttcttgtgttgtgttatagcttgcatatttctttttccgtgtgattctcttttaggatgaaggattttgggttgtaattctggacaatcaagttaggatggttttatgtactctgttttcttatgcttggaaacaaagcttcatcctgaaccatttgctggtttaagtatttgactgtaatctgcatgaatatatggccttgacataaataaatttgttgaaatgttatccatgttgtatattttcttattttcatttctcaccttagaaaagtccaatctctttgtggagaaggtagtttacactacatgctgtgcacagtgtagtattgaaaagatcttagaaacaaagtatcttttgtggtggaatgtgtttctgtgtttagaaacttgattaagttttggattttgtttttccagtgtgaaaattcaagacatacagcttttcagtggtc

SEQ ID NO: 13501 - DNA, 11611 bp, Vitis vinifera
  Intron number 17 from transcript GSVIVT01026496001 (locus GSVIVG01026496001) derived from phytozome v7.0 (chr-ID chr 4; pos 22660991 to 22672601)
gcatcttgccgtgcaacttatttctcatttctgtaggtagtttggtacatgtatgcatagttttatttgggttttcggggcaaatagctattttcccccctttttcttttttgtgtccaaaaatgggcaagaggctcttgaccttaagaatgtgtttggttcatgagtatcttaaacaaaaaatgtatagcgtacgtaagaatgtaagattacgaaaaaatgcatatcttgtatatgattaccatttttgggtgcatataccttgggaagtttttatttccttggatatgggagcctttcaaatttgggaaaaacttgtacctatgaaggacctttgcattttcttttattcacattcctagtgaattaagataaagcgtggactactctatttataattagatcaaatttttataaatagttcttggaaggttgtgatgtaaatttatattaatttccagatacctaatcaatatgatggaaataaagtttgattggaatttcaatttctaaacttttgtcgaacactagaatgaaaatcttgtatccactaaactcaagaattaatttttaaaaatacgattcccattctgaagtttagatgctagcaaatgaaaaaaaaaaaaaaaaaccattcttagtgatctactcatattagtttcttatcattatgcttatgaatgataatagggtttggttgctccttaatccttgtatctttcgttgtacttcaactttgcaaattgtagatcatcttggcaaaaaaaccaaagaacaaaggttgagtctctagaagctaattgggagatagccctccttttggtttgggacaccttttcccctggggacctgctcccattacttccttcctttgatttgcttatttgcttttattgattattgttcaagagtgacgtgggtttatcctatgaaagctaatctgttttccatttggaatatttaaaaaaagattgttaaaactcaattttcacaattttcacaattctagagaatggcctttcttagaagatttgtgaaagtggagatcatgctagaactagtcttagatccatgatctattaaactactcattcttgggtggaaggtaaccctaacctctattaatagcttcccaaaggttcatcccacaagtcttcttactttccttagccactcttctatcccaaacataccacaaataaatctactctacaaattattccgctcaatagagaacttccacacaatctcttattgagtaaagccttgttgagtgccaaaaggttcttgtatcctgatccgcccttaacctttttataataaacaattgatcataagggatactttggacagggaaagcatgaaggaccacaaatcggaagtccacttgcaatggatgtggatatgcacatatgattttacgtcttatttgcaaaggcaacacctttcaacgaaactttggcctattatcaaactttaatccaagagaatcttttcccaatgttggagtatgatacatcatgggcccaaatcctaataatttaagtttttagaaaaattggtgactctacatggtattacctctctagttaactgtatgtttcaggttcaagcttttctctcatatatttatatctttgtgagcttcaatttatgatttgtctattgtctatgcctcccatttgtagttttcaagctacatatgaaagagggagtgaagcgttaggggggtggttggtttggcctagggtttgtattggagcatggtatacattgtggacccaaattctaacttaaaattgacaacataacatccatgttgcctcctagacaaaaaatcactttggagtgaccccttgacatctaaatattttttagaaaaaagactcactggatgacaaagacttgtggaaccttctaaatcaatttgttgtcataaccacctatcaccttgaaaagagtcaagaaaccaaagaatgactccaccataaccaccttgcagtctgggaaaaaaatgttattatttgttgtgaacctccacaaccacttctctaccaaagcgtttttgagcaccttaaaacttccaagcccccctcacagctttttcagataaatagttaactacctcgccatatggatatcctctttttagtatgccctactccctatagcacctccctttaaattttcttaacatataccacaccttcttgatgggagatatagtcgttcaagtcataaaggggagagatgagagagagcgagggtgaacaggcgagcgaaggcgaggaaggggaaagccgggcggagaatcgtgggaagaggaagggaagtagattcgtggtggaatcgaaggtgttcgaagtagaagctgaggagagaaatggtaagagccatgttattatctcggaaagcaagggagagttagtgtcttgggtccgtctggggtcggcgagtgtggggctgttcatagaagggttgactcagtgcatgagggatgggaaagaaggaagatgggagaagggctggaaggaaaaagggaggaactattctctggtgagagaggccaacagggccgggagcttcatccgtctaggggtgacagacatggagaagaggagatttggtatctgtataccaaaagggaagggggaaaagggaggataggtttctatggtggagtccttacggaaggtaggactttggctcgaggaaaaggaaatggatcaaggagtaaggggttcaggcaggtcgtacgtggaagtggtcaagggcccggagttcagggataccacaagggtcagagtggagacaaaggaggaggaaataaggaacaaggtgagcagattgaagcaatgcctgataggaaaatggaaccctagatcagcacgagaagaggacttagcgagattggggtggtcagtggcaagagcgtggggtttgaaaggtaaattaggcttggctagactgggtaagggttgtgcccttttggaattcgagactctggaagaagccaagagggttttagccttgggggtgagatcagtgggagggactcaactgggattggagatgtggagcccgaagtttggatgttctttagagggtgaagataggaaagaagcttgggtgaggattttgggccttccaatctcgctgtgggtgccgtcgattctgtggagagtgggggaagcgtgcggtgggttcttaggcatcgatcctctaacggaaaggaaggaggatttggaatgggcaagggtcctggtaaagttgaatggaggggtcttgctgagttcgatggagatcggggtggagggggaggtacatgccttgtctttgtggtgggagatttcgccggcattgaggaaaaaacagggggatggccgagatgggtttgggcggcagagagaggaggtcaggggtggtggtgactcacgcgcgggatggcgtgtgggagaaatgccgagcgctggacccaaggaacagcgtcggtgagaggacgtgacgggagagcatgtgggaggggagggtaggggcgagtttgaaaactgggctcaactcgggcgggtgacccggcagagttctggcttcgcgggcgatgggtcgagtgcgtctggcccgggtattggccctgtgggcttgaagcgggactctgggccaactaagcaaggcccgcctccttctaggggggctgagttggctgtaacagggatagagcgtgggccggctaagggacgggcctccgaagggttggagctcttgtctcatgggcccgctattatggttgggggctgtctgggccactcgcaggcccaaatcattggcacaggcaatgaagacgatctgggccttaagttggaaatggaattcattaagtgttgtgagaaggaggttagtgggaagcagcagccggctctccagagctcaatggcagagagggtgattgtggatgaagccttaaggtatgggtctatttcaaacttaagggttgtggaatcctctttttcttcttctactctttttggtcggacttcggagagggagttttgcgaccactctggggaaataagggcgagcctccagaaagaaaacaagatggagctcgcagctacagggggggctacagcgagtagagagggctgctgggacctgattgaggtcaattgtgatgttttagaggttcaaaacccggaatggactccagctcggactgggtcccaagatctaaggagcgagaaggagactaattgggaggaaagtagtttggctaagtttagcaagcttttgggattttcaatagaaggcctggagagggagatactggactttttgtccaaaattagaaaaagacgggaaatgatacatagcaaagggttattggagaaatcaaaatttgagagagagctcaaaaggttggaatgttcagtcaaatataaggggaatgccaagaagaataatcatctaaaaaatagagggggccaattattgtttgtttaatgaatcttaaactgttgagttggaatgtgaggggtgcaaatgacattaataaaagaaggattattaagtctgtggttagaaaacagaaggtggacttgttttgtatccaggagacaaaaatacagttaatgactgaaggggtggtgaaaagtttaggggtggggagatttttagattggagaactcttgaagctgttggagcagctggaggtgtgctgatttgttgggacaaaaggtccttggaaatgctggagtgggaggagggccaattctcaatttcctgtaaattcagaactgtggaaaatggggtagtctgggtgttcacgggtgtttatggccctttcaccaaagaggatagggagtgtctttgggatgaatttggagcaatcagaggtctttggggagaaccttggtgtgtagggggagactttaatgttattctatctcaaggggaaagaagcaggcaagggagggttacctcagctatgaggaggtttgctcaggttatggatgaccttgagcttattgaccttccccttcaaggtggctcttttacttggagtggggggcttcataatcaagcctgggtcaggttggatagatttatggtttctcccaactggcttgatcagttcaacaatgtgacccagaagagattatctcggcctatatcggatcattttccaattctaatcgaggggggtggcaaaagaagaggtccttcacctttcaggttcgagaacatgtggctgaaagtggaagggtttaaagaccttatgcggagttggtggcaggggatgtcggttagtggaagggttagctataagctggctacaaaactgaaggcgattaaacagaacttaaaagtatggaacagggaggtgtttgggaacttggagagtaataaattggctactttacaacaagtggactattgggaccaagtggaaagcgagaagagtctgacagaggaggaattttccagcaaaaaagaagcaaaagaaggttatgctaagtgggttaagttggaggagatacactggagacagctctcaagggagctttggctgagagaaggggatagaagtacggggtattttcatcgaatggcaaacgcgcaccgaaggaggcataccatggaaagaataaaaataaatggggtctggctgtcagaggagcaagaagtaaggaccggaatagtatatgcttttcaacggttactaacagaagactcgaagtggaaggtagatataggggggttaaatttgaatcagattagccaacaagaagcggacatcttggagcttcccttcatggaagaggaggtccattcgaccctaatggacataaatggggacaaggctccaggtccgaatggcttcacgggggccttttggcaattctgctgggagtttgtgaaggaggaggttttggagatgttcaaggaattccatgagcaaaatgtttttctcaagagcctcaataccacgtttttggttcttatcccaaaaaaaggaggggcggaggagctgggggacttcaggcctatcagtctcttgggtgggctgtataaacttttggccaaggtgctggccaataggattaaaaacgtgattggtagagtggtttcttcagatcagaatgcctttgtcatgggtaggcagattttggatgcgtctctaatcgcaaatgaggtgattgactcatggaaaaaaaaagaagagaaaggtctgatctgcaacttagatattgaaaaggcgtacaacagtgttaattggcagtttttgatgagggttatgcaaaaaatgggatttggggctaagtggagtggatatggagctgcatctcaactgctaaattctcagtgttagtaaatggggagccagctgggttcttttctagctctaaggggcttcggcaaggcgaccttctatccccatatctgtttatcatgagaatggaggtgctgagtgcccttatttggagggctgtggaagggggctgcatctccgggtgcagaatccggaggggtagggggcaggctgttaatatttcccaccttctctttgcggacgatgctatagttttctgtgaggttaagaaagatgacatgacctatttgagctagattttatgttggtttgaagccgtttcagggttgaggattaatctggctaaaagcgaaattattccagtaggggaggtggatgagatccttgagatggctgtggagttgggatgcaaggtaggtcagctgccatcaacttacctggggctgcctctgggtgcgcctaataaagctgtttgtgtgtgggatggggtggaagaaaggatgaggtggaaattagccctttggaagctgcaatacacctccaagggtggtagaatcacactcataaagagtactttggctagcatgccattatatcagctgtccctcttccgtatgcctaggatagtggcaagaagactagaaaagttgcaaagagatttcttgtggggagggataagtacggaaagaaaagcccacctagtcaattgggagagggtgtgtgtgggtaaggagaagggggggcttggtttgaggaagttagtccctttgaacaaagctctacttggaaaatgggtgtggagatttgctcgtgccaaggaggagatgtggaaacgtgttcttgtggcaaaatatgggcaagaggaatttgggtggaggactaaaaaggcaaatggggcgtttggtgttagggtttggaaggagattctgaaagaagctgattggtgttgggataatatgatttttaaggtaggaaaaggcaccaaaatcaggttttggaaggacccttggtgtggggatgtggagctggcccggaggttccctcaactcttcaatgtggctgcccaaaggagtgccactgtgggggatatatgggaccagaattctggccaaggaggttggaacctaaggtttattagaggcttcaatgattgggagctgaacatggtagatgaattgcttcaaatcctaaggagtcaaagaattaccttggaggaggacttggccttatggaagggaggaaaaaatgggaagtttggcgttaaagaagcgtatgggttgatgatcagccatagtatccctttgtttcctaaaaagggcatttgggtggagaacgttccttccaagctagcgttttttgcgtgggaagctacttgggggagggttcttactcttgataggcttcaaaagagaggatgacagtttcctaatcgttgttacttatgtggtagtgatgaggaaaacgttaatcatcttcttattcattgtacattggctagtgtgttgtgggggattgttcttagtctgtttggagcctagtgggtctttccagaaactgtaaaggaggcggttctcagctggaagggttcttttgtgggtaaaaaaagggagaaaatttggagatccataccgttatttattttttggacggtttggaaggagaggaatagattagcattcgggggggagttatctatacagaaagttaagaattcttttgtttgtaatatgtgggggtgggcaaaattgtataatggtgcggagcctcgttcccttataggtttcttggagtggatagcctccagttaagggtcggtgggttttttggtccttttggtttttttgttgtgaggtcttcgtcgcctcgtatactccctgtatgctatgcggcgctttgccttttgctaatatatgtgtttacttatcgaaaaaaaaaacatataccacaccttcttatggatgacaagacttgataaaaagtaaatagtgagagtagaaaaagtgtgccctttaacaaggtaaatttaccagccttagacaagaactatgtttcccaagaagttagtttggtcttaaatgtctctttaccaaagcctaagtagaagaagagttgagcagtaatctcaagtggatgtaggatagtggtgcaaagaatatagagcagaaaaataaaagtagaagagaaaatttctaaaagaattataaatattattaattgaattccaaagtgtttaacttcactaggcctatatattgataggctatcctgactcttatagaaaactaattctaatgataatatgtggctaaagaagaatggttttaaggatttgctaagaacttggtggttaggtctccattttggagggttctttagtttcatcctgtctgaaaaattgaaagtacttaaggttattttgaagacttggaatagggaagtgttaggaatgccactgctagaaaggagggagccttgaaccaggtggtgttttgggattctgtagaagggaatagggctttatccgaagaagagcagaatctcataaaacaggctacggaggagtataagaagtgggtggtgatgggaaaaacctcttggaggcaaaaatctagggagttatggttgagggagggagacataaatagaagttttttccacaaaacagccactacccataagagaggaaacttcatggtgaagatcaagatcaatgcagcttaggtactagttgttttctctgtttggggtgttgtgggtgcttccattattagttagagagatgttaggttggcatggttttttttgtgggtaagaagataaaaaaagtgtggcttgttgctcctttgtgcctattctggatagtgtggaaggaaagaaacgctagggcgtttgaagatgagggtcatttggtacaagggtgtgaattttatttcctttgcaatctttgggtgtgggctaaggggtttttagttgccgacctttcttctgttgttgattttatagattggttgggctttgtttaaggcggtgctgtttttgttggttccctactcttttttgaggcgcttttagacatcctttgtatactttgtgtgtattttgggaaacttttttggagtgccttgttttaatatattactatttacctataaaaaaaatcctaactctgataaaaatccatcactaaattataaccgctcataaaataaataacaaaattgttgcctactttgcatcccatgtgagagatcaataaatccacctattccaccctcctaactggattaagctcgcttttgtctgaattaatgtttaaattagaaactgcttcaaagaacaataaaacctatctaatgtgcattaactgaaggcgatcagccttacaaaacaaaagagaagcatcagaaaaaaagaaagtatggaatctttacctccttgctccttatggcctccaccctaaaacctattgaaatcctcatctacttctctagacataaaccaactcaaagccttcatcacaagaataaataacgagagaatggatctccttgcctcaaagctctaaaggtttggaaaaagccaatgagagtcccattcaccaaaattgataccttaaggtttggaaaaaatcaatttactcactcacctttgggtggggattccagttgaactggtactgtggtcaatttctgtgtatttacctcattcaagcaccaatgtataaacaaaccccatcccttttatcaattgtaaactaataggctaaagaaggctatgggggcggtgggagtaggggtttggaaggagatttggaaagaatcagagtggtgctggaataacatgatcttcaaagtagggaagggcaacacgatcagattttggacagatgtgtggtgttcagagacaacgttgtcccattgttttcctcatctctttggcatggcgattcaaaggaactcaacggttgaggatatgtgggatcaaaattcgggtcaaggaaattggaatctaaattttttgagggatttcaatgattgggaattggagatggttggggattttcttcagatattgaggggtcacaaaccctcttgggaagaagattcagtcctgtggagaaaaggaagaagtgggcaattcagggtcaaggaagcgtataatttgctggtgaggtatgatgatacaggctttccttcaagaagcatttgggtgacaagggtgccaactaaagttgctttttttttgcgtgggaggcgacgtgggggagggtgctgactttggatagacttcaaagaagaggactacaacttccaaatcgctgcttcttgtgtggttgtgaggaagaaagtgtaaatcatatccttatacactgtacagtggttagagctctatgggatatagtgtttggtttagttgacgtgaaatgggttttcctagtaactgtaaaggaggttttagttagttggaggggttcgtttgtgggaaagaaaaggaaaaagatttgggattccattccgttgtgtattttttggacggtgtggaaggagaggaatagattagcttttaggggggggaggggggtggtgaacattcagaagtcaaaagaatttttttgtttgaaatttgtggagttgggccaaactaactgtatgtaggtgaggaggcgttctcccttataggcttcctagagtggatagcttccacttaaagggaggtgttttttttgttgttttttgaggctttagctgccttgtataccccctgtatactttgtggcgttttgccttttgattgaatatcctttacttatcaaaaaaaaataatcatgagtggttttcaatgcattgggcttgttttctgttcacagacagaacaatgataatctaacttgagaattttacaggatttatattctccatccttgatgttgagtgtttttttagctatttgtgttatagcattttgaagatcttttttgttggataattcagtcattatgatttagtgtaatgtgatcttccttgtgaacaaacaaatacaaaattttactcaattttttctgttgtgccatccaaagttttcttcatcatacatttgcaactggtaaataagaaagatggatggcaaactaaaccaaatttgactacaatgtcctaactgatttattttaagaatgttgagtggtcttctttctcattctgtttaattgctggttgaaactttttgatcattggttgataatgccagatatattccaagaagctggtcttcctctctggctg

SEQ ID NO: 13502 - DNA, 6800 bp, Vitis vinifera
  Intron number 13 from transcript GSVIVT01010758001 (locus GSVIVG01010758001) derived from phytozome v7.0 (chr-ID chr 5; pos 22314142 to 22320941)
ggtggtgataaggcgacagcttcagcaggtttgtggaaaaattgctaaaatacctttacatttaatagatactattacaatatactacattagcagttagacttttatttaagttttagttttctcatggattctgcaactgaaaacctacagtatttggaattggtttgtgcttttttaatgcttctttgtacattcaaatggactttaggtgtgtatgagcacctaatattataataaaactattttttaaagaaaagaaagagaaaaataagagagagaattggacaaattttatgctgttcacttaaacttgaggtatgtccaagggttgtattggttccaatatgctctcaaacagaaagaaatatagacaatagcatagccttttggcaactaaccatctctatatcctccaagtagttaggttttaggttttagtgccttcacaactccataggcgaaacaaaagcaaaagtggtggcactttgtgcccatgcgccttacagcatgatatgatgcatgtcatcatgactcagatcaggaggagattggaagacgtttagggcatgggtggctttcttggcatggaaagatgttgcaacaacatggcacacaatatgtcacccatggggtggcttgagatgggcgaaaaatgaagatattcaattaggttgacacacggctaggggacagaaaatgtggattgctgaagcatgcttgcaaacatgtggcatggggttagaatatgggctaatttgtggggcaagtcgtgagcattgtgggaagttgggacaactatcgtgtctgatgggcacgacagttgtggggcacttggtgtgacacctggcttgagggaattacaatgtaccagattgttgagcatgaaatgcgtatcaaggaagcgtgctagacatgtgacacaagccaagcaagtctctaaagcgcctaggcatgcacaaatgcaacagggcaataggtgacatgatccaaggagaaaaattgagcaacactaacaaatggcatcattataggtcatgggagcaactgctggccatctagacatgggtagagaaagttggggctgattcttctgatcatgggagcaatccactaagcacacaactgctttgtgagtcggctgaagtggtctgctggtggcccagtgggggttgcaagagtaacctccttagtttataaatattagttgtcaaacttttatgcctaaagtagagagatttgcctgagactctcagtctaagtgtcttgttttgcaagcctaggctgtttcttttatttttttactagaattatatcacagtccacctctttaaaaaaaaaaaaaaaaaaaatgggattcaatctgaaaactttccccatggacccactaaacaaatccaaagggcttccattttacttttcacatccccttcccccacctgaatccacatcaccttgccaacctctgcttaagaagcactaacaacttcaacagaggacttacccttaagggggacaagtgaaccacccaccacaattagagacttatcctctggaggtaacatagcaatattggatttaggaactaccccaatctccttaacttcccagccaaaatactccagccccctggatacctcctgccttctaggaacaccaaggtgaatctctccgcctctagagagcaaatgagctcaacaagaaatgacctgtgacattgctatgtagctccagcttataaccctttccccttctccacaccttcttgaagggcctgcctacatccttaagaaaacatgcttccaccccttcaaaatgaaaccaacttaagaattcctgacccctctctagatttcaagaattttgactccactccaaatgagccattgcctccttgcattgcagcttctcttttaataggattccacctattccaacttttctaaagcttgaacaccattatcagagatttctcagcagattcaggaatggctaatatatcattttgatgtcttagcatgtttgcttcatgttgagtccatgtcccatattcatgtccatgctacataattcttttttttttttttttctggataagtcatgctacataattcattattgaggatgccttttagaatttaagaattaatctcttatatatcttaaagtcactggaagaaagaatgttattcattcaaaatttaaacactaccataactagatgtgaagcacctaagtggatgcgatgcatattgttatttaggacctcatgttggatctacaactaaataaagaagcatgagacgaataaacaaaagaataaaagtttgatagaactaggaattcctaagtgattactgaatttgatgtattggtatactaagcatgagctatttgtcatcttagaactaatcaatatgtaaaactaaactaaattcatccttgttatgtgctttcttcataaggtcatcttctcacagtcaatcatgttgaacaaccaattttcttagaagcttaagtttataggatttgggtttacaatgtatttcatgctcttcaacactttccctcacgtgtaggctctttttttatgagggcttacatgcaggcttaataaatgggggaaataaatatacgatggaaagttctaactcatgacctctcactaaacaatgtcatgatatcatgttgaacaaccggttttcctaaaagctaaagctatgaaggtgacttgatctgtctagccacatccatgggctaccaaggcgatgtgagctataaaggccttttttaaaaaaaaaaaacgagggttcccataaattaaatgtttagtgtcatggcacacgacttgtgcttcaacatgtgatatttgtcatagtatgtaccatgatgcctaggatggcatgtgccatgattcatgccaagactcatgtcatgatgcacaacacatgtcatcgtcgattccatgacacataccatgatgtgtgacatgtgccacaatcagtaccatgatacatgttatgacttgtgatataatgcataactcatgcaacaactcatgccatgactcgtgtcatgatgcatgatgtgtgtcatcgctcgtgccatgatgtgtttcatcgcttgtgccatgatgtgtgtcatgtctcttgctatggtaagatgatagccccatgttgccataggttatcgactcatgctaccatgggctattgaatcatgttgcaataggtttccaacacgtgctgccaattcgtggttgtagagcatgctaccatgggttattgagccatgctgccactgactgttgagccatgaaaatgaggcttccgaaaagtaaatgtttagtgttgtgatgcttgctattgctcgtatcatagcctgtgtcataatatgtgatgtgtcccacggcccgttccatgacttgtggcatgattcatgccatgacacatgccatgatgtgtgacgcgtgccatgactcattccgtgactcgtgatgtttgccacaacccatgccaagacttgtgccatgatatttgtgatggcttgtgtgatgacttgtggttgatactatgacacatgccatggtgtataaggagtgtcacgattcatgacatgactcgtgccccaaccagtgccatgatgtgcgatgcgtttcattgcttgtgccttgagtcatgccactgctcgtctcatgactcctagtacaactcgtaccatgcgtttgaccccctatgccatgatgtgtgatgcttgcgaccgcccttgtcatgaatcatgcaaatgtttagtgtcatgatgcgtgacaagtgccaaatcctgtgccataacgactataggcttgatgcaccatgactcattttgacacgtatcatggcacatgacacatggcacaatacttgtcatgacatggctaatacacaagcttttacgagtatgccactagctaccttgttgtgtatttaacaacgccattgatggattggtgctaatgtggcttcctaccactatgccttgacacgttgttagattatggagtaggctcaattatgcaatgttataccttgcttaggagctcttttaacttcttgtgatttcataagcttcattttcatctaattatagcatattctcacccaaatgctattttactatttgttaaggtttttttgaatttttttcttatttattattaattttggaattttcatctcttataattttgacaaagaatggtgcattaatccatggtttcatgttccaaatattattccatgtgaaatacaatttataaaaataattaagctaatttttactatttttcctcattttttcttatattttatatttgggcctaaaaaaaattatttatcttttccatgggtacatacaatttttccaaagacatttttgcaaaagaaaccaaattaatgtgttttgaattaaaatacactattatgtctcttcaagtatgggtgttgtctgctctaagcactttgaaaagggcttaaaatgttttttttaaaaagggggcggggggttgtttacctgcatgagctaggcaacaacttaggcatgtggcacaacatgccacccctaagtccatggcacacaaatgcaaagagtgtatgtatgctaacaatattgttggaagctctttcatgcaattgtggtcaccctatgtctagtttcttagaaaaactacttgtctcaaaaaacatgccaattggcaagccatcatcatatggagggttgcacgtgcctttggctagacgttgtccattgaaaggcatgcaaatgttctactccctcatacaactattgcccctcccacacactcttattggtccttcctaacctagaagccgtcagcccacccacctcatggttcattaggcaacacgtgtcactctcagaaaaacgttgcatgttggagttccacatgcctttgtcatggtgtttccatcgaaagggcatgtgaacattcaactcatgcacttgatgagtgtcgtttccctcccactcactctcaattcctccacaacaaggacctcctaaacacctgcctaaggctcatgtgggcactatacatgttgctcacaaaaaaccatcattggtgcaggttgcacactcctttagcatgactttgcaatgaaagggcgtgccgatgtgctacattctctcctcaatgagtaccacatccctcccactcaaacccattcctcctgagctaagtccttcaccacccaatggtggcttgtgtgggcactaagaatattcacgtcatcgtgcctgtattggtcctatattgttcatgtgatgttgtgcttgagtgaacttgattgtgtatgagtggtgtctaggtcatgcgggttagtaggttccttactttgtcctacataaggatatattttatggggaattgatccctttagtaccaagaaaacctatttctatgaggatatgtcacaattggtaagcccctttgcaaggaagcattatttaataggatattcttgaagaattagcaattgaatgcaaaaagggtatttgagacagtttcgaacacaagagattgatgagctttggatatcatcacttgcctatgaacaaaatcacactaaacacacaagtatttacgttgttcagcatataccctacatccaccattgaagagagcaaaaagaatttcaaagttgtacaaaagagatcacaatctagagctttcaaacccacaagccttacacctaaaacctctctgtcaaaatgtaactctctctctctctctctctctctctctctctttctctctctctctctctcaaattttccctattaacatggaatatatatatatataggcaaccactccctttattatgaaggaaattaacttctatcattgcaataaaaaaagcccctgtacatagaagtatttctaatagaaaattctgaaattgaatgcaaatacagttttgaggcaatagatgcatgatgctttggatatctatcattgtcctccaataatttggcacatgggactctatctagaacaaaagctaaggaaaaaccatggtgattacaaagtacatcttttatgaacaggtaagagttgtaaatgcacacttagtactgaatggaatctagccatagctgaagggggctaaccattgaggctatccaaagctgaaggcctctccaatcttttagtttagggagatttttcaatggttgtatcttgggcgaacaagaaaggaagaggttcttgaaggttagataggtggctctgtcaaatccttgatattgcctcaaagttggagtgtgccttttgtcagattcctcaactagctaatcaagtagcaaactcattagcaaagaggggtgcaaaacattttgacctcctttgcaaaggatttttttatcttcatgaggaattgaaactctttcttgcttttgatcaaaatgttgtaaggttgttatggggagaaggatttctaggatttctcatccttctgtgtacctaattattttttggcaatgaaatgtttgtttatgatttaaaaagtgctgaatggattctccctctctgtattccgagctggtaaggatatttaagcttttattgttagagttaaaaaggttcttcttgatttgtgtctgtgctattaatagtcttgcacatcaagaactatgttgcatgcagaattgagatggcaccaagtgaattaaagtggcttttatctcttactctgcactcctctgcaggaacttaatctagcagaagctgttgtaaataggtt

SEQ ID NO: 13503 - DNA, 9884 bp, Vitis vinifera
  Intron number 3 from transcript GSVIVT01017738001 (locus G SVIVG01017738001) derived from phytozome v7.0 (chr-ID chr5 ; pos 3036032 to 3045915 reverse strand)
atcgggaatcttttgaagagtacattactacgacggtaaaatacatttcatccatcttatcttttttgtgtatattcattttgttgtcatgacatgaatttgaaatgtagtactctcaacaacgacactgtctgatgtaactgggagcaagattctactactgttatgctatctagtatcacctaggaaggtccagtcggttaattgaaatgggtgtttgagatgtaggaattgctgttaatgttggtgttcattttcagtcaggacaactgtgatttatttagtctgatctctattcctctggaaagctgctgaaggggtcttcttccattaaggccaatcattttgtctttgggtggtataacaataattttattttatttgttggcgactgttgtatacttcttgtgtacattggggtgctcttttagcgtttccttatatatatatatatatagacacacacacgcacacgcacacttacatacgtatgtatgtatatacacctttgctttccctataaaaaacaataattttatttgtaatttagatcttattggcttgaagggaagactttagattggagttgtgggatagattgtcctccatcgccacatgaaggatttccatgcttattgctttgaaataaaaatgttttgatattttttaagtgagaaattaagtatcaaaccttcccttcgtaagatcatcttggtgtatttagacttaggcttgaggggagtgttaaagataagatatacacattatgaattcaaatcctaacaacttaagtttttagaaaaattgatagcttaataatattggttcattgatcatatcctccttcattgtgtaaagaggatttggagtccattgatcatatccttcttcattgtgacaaggcgagaattttatggcagctggtgttctccatttttggtatttagtgggtttcatttgagttgattagggaaactctcctagggtgacatgactcttttgtagatagaaggtggattaaggtttggagagctgcttctccttgtattttctggaagatttggaatgaaataaataggagatttcttgaatgtcaggaattgttagatcaaaggttaaaaaatgttttccttaacaatttctctatgtgggttagggtgtatataggcagtggatatacacatatcgatgagggagtatttttttgtgttccctctttccttttgttttttttaaattttttattttatgtctagtgctctttgtaaatgtcttatgtcctcttgtgcgctttcaacatttattaatacattatctcacttatatattggttcaatttttaaaaaattaataacaatttttaaaagctgtttttaattggtttcaagaacaaaattttgtttaatacctcaaatatgaaaaacaactttatcaatttattatttgtgatggtattatacacttccatacaatgcaaaagttctcaaagtattttctatatctccaattattctttatcaataatttgttaaatatgtcttttaaattagaaaaatattctatgttttaaagtatgggcaaactgttttaaaaaacaatttccctactatcccttcaacttttggaatcatttgtaaattttaatagttcgatattattatttactgtgttttcacttgtgaatcattggtatttatgatatcattaaaatttaggattagcatattttttttgataagttaaacttaggattaccatatgagacaagtgtgtcatgtttgtgagaatcgacatcttagtaaagcaacaaaacaacaagaaattcaaagtaggttatgcccattgtctaatttcatgtgattgagatggtctaaaggggaatttattgaataggttttttattttattcctttttatatctatttattttttatcaatgtgttattgaggataggtggtgtattcatatagatatcccttagagatattaatgattactgttttgaggctttgcattgattttattctattttttctataatgggaaattcaacccgacaagaaggtatttatcccaactgcttggagccaaacctgagtgatacaccctctcttctaccttagactactcaactaccagggaagcttgaatcaggacatgcggttcaatgatagactgcactaccattgaactacacctcaaggggcttgcattgcttttattctgttcaatttttttgtaaagtcattccatgtatcaaacaagaaatttagagatcttttggcaggttcaactttatggaggttttctttaattgatttatttgtggtggtggtggtggtaggttgggttaggtgggtatggcttacaaagagttgtaattcctttctaaacttttcccactggatgatgtttcatagttgttgttaagttttgaatggttgtagattcatggatggtggtaatgaatgatcatcacagcctattggataagttaccttagttatataagaaattggaaattgtatttctagtcagattgcgtaggcaaatcacatggattgttttcttttgataacatcttctaagttatcaagagactcagaacctggtatctgtagcttgctgaggatctttttctaggaaagagggtgaggagggtttggagtgcgcttttgcatacattcttttggagtctttgaaaagcagaatgatataatttttgaagatattgagatgctgatcaccagttcagcgtattataactagaggattttactttgggaaaggatcaatagtatctcaaatagattctttgttgtggattttgtttgtttttctcatctctgcacttgagagacactatttcaccggtgagttataggtacctaacacatcatactaacaattttccacaaagtggtgatgaaatgtataactcccacaaacttttccattttccaattatttgttggtagagttgtttactcacttggagacatttctggaactcgttagacaatcaacttgaaataacttatggctaacctcttttagaatccaaactgtagttgtgttgttgttctccatccctgcaatattcccttcttcctacgacatcatctctgtaggtccactgatgtaaaggaaggacttgagcctgaattggtgaatgaaatcactttggaactatactgtacttcctacagctactgcatgtgcagtccaacaggaacacgcagcacaaacgaaaatgaactgctatactgtatcctcccctagcagtttttatttgaccttttccatacattgcttatatttgagtgcctttggcctttccttcttttttttttttttttgtgtacatgcaacaaggtatatatatataaacaaccttcctctcttgacttcaaactcaaccaatccacaaagcctatcattaacatagaattgtcatttatgtacattatagcacaatccaaaaggatacacaagaaggaagatctcatcaattgatctgtctattctgcatttttgaatgacttcctatatcttttttttgatagattgaatgacttcctatatcttaccttccgtaacatccaaaacacgtacaaatgagcaatccgccaagcttttttccacttcttcccccacaaaagaaccatgctaactcaggagatttcctcttatagagtagtgcattacctagacttctccttttcatatatgataaaaatcattttactttttgaagacatttggtttgtcttgaggtagtatgaaaaaatagaagataatgagtaaacctagaatgagatttgagaaaaataggttctaggtagtgtacctttgaggattcaaatttttgaatcctctactttagtcccataagccagtttacctctttttttatgcaggtagtatatgcaatattacaacaaacaccaagagacatataccaaaacaacttacaaaagaccacactattcacaagttagactatctaagaaatccatcaataattaactctccatttccatcaaagtgtgagaccactacaatagggatttaagaactccttcaaccttaatatgagagttatacattgaaaatccttttgttgcgctctccatatacagcaaaacaaacaaagagcagccatacgacaaaataatcttttctatgagtgttaagaactccttcaacctttccatcaaagtgtgagaccactacaatagggatttaagaactccttcaacctttaatgtgagagttacacattgaaaatccctttgttgcgctctccatatacaccaaaacaaacaaagaggagccatatgacaaaaaattattttcttcttatctggcaccttaaatttccactctaggaggagatttctcattgaagttagacactcattcccatttttaggccaaagattgctaagggaagtgcttgtagcattcttgtcttttcatagtgaattaagacatgatcaagtgatttttcattgtgtttacaaagactatctgttgaccatcatccaccccctctttatgaaaatatctaccattaaaatctccccccaaattgcttcccatgcaaaaaaaacacaatctaaggggagctcaagatccttaaatctctttggctaggaatactactttagttttagcacataatgagttgtagaacaactttgcgctaaaactgcccctcttatcctccctccaaaataaagtgtcctctctttcttgtactcttgtagagtaaataagatccataaattaggccacatcctccaactcccaatttcagaagagccttcgttgcaatatctaatggcctctgctccctccccttgccataaatctgcaatggtagcattcttgttaaaagctagtctaaagagcttagggaaaatgtcttttaaccaatcctccctcagccatatgacccacaaaaattttgtctatctaccaattttgattcggatagctaatatgagactaatgcctcccatccttttttgagctcataccaaaagactccctcacttctcgagtgcactaccctctttccctctctccctctaactcccaaaattttcaaggatgatcttcctccacatggtctcattctcaagagaaaacgttcacatccatttgcctagtaaggctagattaaggacctatagccttctcattcccaacccttcatacttcttacccttgcacacgtttgaccagctcacaagatgcatttttttcccctttccccaagctcttcccatagaatgtgtcataagcatgattttcccttgtaatttttcacgattgtgcggtacttggagcccctctaagccaaccttcccaaaagctacatgagattgaaacaagaggcccacaaaacacccaagagattacaagccatcaaccctaacttttattttattacctcattgaataagaatacaaggcacgactttcagcaagactcccataataaggtgaagaatcccctatggtcccattgccaaattgtggcatcttttttccaagttttctttcttatcgggtgtttgaatatcagtaagggaggggaattcaatgctagatttcctttgacacatgtcttgtggttttatagttttccttccctttttctttgtgttggcactttgtccttgtaggaaagcccttaatacattgtattcactggtggtccaaccccttttttcagtacttgaaaaaatttgttcaacaaacacatttgtggttcctagtatttcaaacttggatttggatagtctaatttggtgggaaaacactacctaatgaattggattttcctttttatgtgccaacaaatttcttggtcattttttacaaattttgtaattgtttgctttttgttctctttcttcccattccctttcagcctttcctcaaagaaggttagggttcatgggcttccatggaagtggcttttttgcatgggaggcttcttggtaaatgatttggacaatgttttaaaaggctattgtggctatagccttaatagagggtaattgaggtttaagcctcacatgattgtgggtcatagccttgaggctattgaggcttaagcctcaattattcaaaaggttttaatgggtttagggccttcatcggttttttatatacatttgttaagaggtttaagcctttatttttttgttgtagtgacttgtgctttatagggttttggtatagatttataagtattgttttgcatccaagattagggttaaacctttaaaaaaataagggcttagttgactaccaattaaccttttaaatggaaatgaaagaaagagattaggatgaaaaataaaagaatcgttagtcactgtaggttatttcagttggctaagatggattgggttcccccaaggagcatatatgacatgatgtccatcaaatttaaaggcttcggtaattctaagagagggatagttttatggcaagctgcgagcatggctctaattctggttgtgtggtgggaaagaaacgcaaggattttttaggataaagcaaggaatttagggttcctttgggactctattgttttccttgcttccctttgggctttctgttccaaggcatttaaggggattccccttaatgtgattcaactggattggatagcggtgtgtactccatagggtttggtccttagtgggaggtcgtttgttttaagtgtattttcttgtaatttagttgtctttggtggaaggatttctcatccttcttcttgtacttcttttttatattaatatatctttgtggcgtttccaatcaaaaaaaataaaaataaattattatcttattatcatttttttttatcagaaacgaagaagaatatattaatataagaacaaatacaggagagataaaagaaacaaaagaaacaaaagaaagagaaaaaaccaagggaaagatgagaggtccttcctacacaaattgaacaaaggagaaattcccaacaatagaactctaaaaacgaagagaaaccccatcaatcttcaaacttttgaaatgcaaaccgcaatccagttgagttgtaaaacatttagaggaactcctctaaacgcttcagtacaagaagcctatagagaagaataaaaccgaatcaaatcccataccatctcttctgttctccctttatcctcaaagatcctattgtttctctcttgccacaccatccaaatcaaagtaaggcaagcaatttgccaaagtgtcttgcctcttaatgagttccccaagcctttaaaagtaataaccaacatgtcctcaagactccttggagggacccaaaccaaccctactagattgaacaacctgtgccagagtccaatggtaacgggacaatgaagaaaaaggtggtcaatcgactctccatttcctttgcaaagaatgcaccattgaggacagaggctttgtagggtcttctcaattgcaacttgtcattggtgtttaccttcccatgtgctactaaccaagcgagggccttaacctttgaagggacttttgaactccataagaacttggccggaaggaacaatataggatttgagacttttgacaaggccaagaaaaaagatttcactgaaaacaatcctgacgaagacaaagacaaagaccacgctcttgaatatgatgaagaaggagagaaaaacatagaactaagagaggacattaatctctgaaggagatcaatttctgaatccgttattgttatcttattattgatggataaaggataaaaaaatcactttaattaatggataaagaagaaaaatggattgacattaactttgatggagcggatattagagcaattggatataattgtgattcattagaggatcctacttatgatagtgatgtagtttgaagattatttgataaaagcatgtgagagttagattttagaagagacacaaaaaactaaattagaagctattgaagatgacatacaattaatttgattattatatattgtatggttttcttattatttaatttttatgtgatttaattagtatttttctgatttttaagatttttttctttttattattataaaagttgaggcttatgccttagtccacctcaaggcttatgttgcacctcatttggggaaaacacgtcaagactgcctttggccttttaaaacattgtatttggacaatggaccaacttaggagaagaggttggctgttagcttaactggtattgttctgtaagagcaatggaggatccaccaaccatattctaatcctttatggtaaagctaggagcttatgacagttgttattgttatgtgggccttgcttaggtgttctcttggttggtatgaaaggttttattgggtggcttgggaattttgaggggaagaaatgaagtgtaggacaaccctgttgggcttgttttcaaccattgggcaggagtaaaattatttttacgttcgaaggtatcactttgatcagtcttttattcgttcctttttttagtgctgaggatctctggaaaatgttattttgactttgttagattttatggatctttgagagtcttgccaaagtgatagatgctttttcttttctctttttggtgttcctttttttgttaggcaattatttgcctataaaacaaggtactttccccaaagttgattggggatgagctatcatttttagaagggataagcaaaaaaaagaaaaagagaaatgtttggattgtagcgaagatgagtgaagaagataaagaacatagagcagaaacttatttaacagttaatgtcagagagacaggaaacaggattagtgcttgactgatgtgttacaaatttttaaatacatggaactttgttaaattcttttacttctatattaaatggcagtggttcttgtgctgaaacctccaccatattgccatttacaatccccataaccttgctagcagcaccagtattgttgcattagaacattaccgttgaccttttttatgagatgatgggaatcaccttcatagtcatattgaaaatatccaactatatgatgggaaggcgtttccccttgaattggcagatgtgtagaacctttcaactagatggtgctttttcaaaactatcaaaatggaatctattccaaacatatatgccatggttccttatttcgacagggtacaaatatctaaagttgatgtttttagatatttgtgatgatttattattagattagtcttttgtacttgaagaaattttagattagtgaatccatcctattgtcacttgaagatgcaggttttatatttttatattttattttattttttttatctctttttattatatagatatatacaacttttatcagcaattccatttccaattaaatccaaaatttgcaaagataaataaataggattatataaaagagaagctaaaaatattccaaaataatctatactgactgaaaatattgcatttataacaaactcctaaagctcaatttttaccttggattttctcaatgttcttctaatgctttccaagtttgtggtactaatattgcaaccgacagttgtacctctaattgctatatgttttgatcttatcgtgtgtccagctcaacattattattatgagctattttaaatgttaataattttgattgtaatgaactctttgtatcaattgattctttagaatcctctgcacttttatcatttgcttccttctcagagttaattgacttgtgttttttttttcctttttttttctttttctttttctgtttttttgtctaggtattgccctctttaagagagaagc

SEQ ID NO: 13504 - DNA, 6108 bp, Vitis vinifera
  Intron number 26 from transcript GSVIVT01025133001 (locus GSVIVG01025133001) derived from phytozome v7.0 (chr-ID chr 6; pos 4064318 to 4070425 reverse strand)
tccctgttacagaaatccagagtctccttgctaatgtaagtggaaaaactgccttcttatctatttttgtcttaagatatccaaaagaaccttatacacagtcaataattgcatctataatttaatgccactgaatttcatttcaactgtgggtgggacttcgaaattcctgtgtggcctgtggctaaagggttttctaagaaggcattctagtagctgtttttactgcagtttctgcctgcaacctaggcttttgagtgtcaaaactgatatttttttctaaagcttgctcaagcctatgctaaacttggttttcaaacatttaggtcatgtttggttagccagatatagcatgggataggataagttatcctatcacttgtccgatcttgtgttcaaccaaacatgggacaggataagtgatgagatatattatccaccctctttttttcatcccttttatataggatatgttaatcccatggtaagatatgagatatgcatatcccatgtacaaaaaaattatttttatcaattttttattttttaatatactcattttacaaaataaatttttttattataaattaaatttatgattaaaaaagaaaaactaaaaaaatatttataaaataatattaatatatgatatataaactatttttatatattaaataacataatataaaaaaattatttgtaaagtttaaatattttaatcatgaatattgttaaatataacaaaattttcatttttttaaatagaaaatatttgaatgtgataatttttattttaaacattgaaaataatatatatttcatattattttttattcatttcacaaattaaatataaatataatataataaagcatatcctattggatatgctaccttaaaatatcatgtcgataagatatgtatatcctaggatatcatctcccattggaaatcgtatcctaggatatgcatatcctatccaatgggatatgatatcctaggatatacatatcctaccctatcctgccaaccaaatgtagcatttggccatgtttgatatgctagaaataaaacgagatacaataagaagtgggataacatatcctatctcatgtttagttgatgatggaataaactatgttatctcattttttatcctaccttatgtttggttgagtttggaataagataagaggtgggacaagatattcaccttctttcccttgtacatgatatttaataattttgttgatgcacaaacttccaatattgggttgatagatgagtgagtccaacaacgacttgccccattggcgggtgaccgagtgaacatttgattctcttgggataatctcctgcaaacaagggtaatcaggagatccacaattatgcctgcccttagtcgaaggtttggcccctgcaacaagtgaggggtgcgagttgaacgttaagattaggttgaaggggaaagaaacagggtccctctttctagggaactcaatgcccttatataggttccattgactcaacagacacttgtgtggcgtatgaaaataaagcttgaacatcattggtcagacaattttagtatctctaatgcctaggttaccgagccttggtcatcattggctggtcaagagagttccaggtaatgaccaagggataattgagaatgtctccttggtgggggcgggcaggtcaacacctccatgtttcagttgtagcaaattttgggaagacaattttgtcaatgaaattagatgacccttgcaataatagaattttcacgtgtgcttccatagagcttgactaagatagcagtcttggtcacatcgccatgctcaggcaatgagctacaagtcaatgtgtctgggatggaaacgctcgataataatggcgggggcttgagtggggccgttgtcttgcatggcctactctggggtccgaatcctccccaaaggatctgagtccttcaatgcccactttcttggccaacattcgaacaggcgcttagggactagcctaatcctgggcacatgtggtgggaggtcaaactgtgcaagcagaaagcttggcttctgagggaattcaaattttcaaaaatttcaaatctggaaaatgtagccacaaggcagcctaggtttcaacactgccaaggtcacattgagcaattatgtaatgatggtcatagtgctcgattgcccctagtcccggcaataaataggggatttcccctctcattctcacttttcagtctctaccttgagttcttgcctcttcaactctccaccactgcctttgctctgccattagcatttttggttatgttctattcagattttttgtctctcgttctttggtaacttccttttcttcctatttctcttttttctgttttcatttgagtttgatttgtccatgattggtggtagtggccatcatcggtggtgactgtcatggctttgcccaatgcaaacatttctttggctaccagtggtaatgccaacaacacaattagaattggcaatggtggtggcttccttaggcctctgccttcacttcactaccttaatctggttatctgctttgccatttatcaatttttagtttttgctgctactgctgttgttgttttcccccctctttagacccaaccaaagggtgcttgtgctgggttatattgtttttcccaattatgggtgtctagttatgccccaggcctcatgtatgctgcaaagaatttcactcctgattagcccttgctctagatgtttgtgagcgatcaaatcttgagcatctttgggtgaggtttcaactagggtatttcatctcacccactccactttcatctaggcagtcccaaagccacccaatcatgtcattggagacagggagtaaagagcagtagcttatggaacggggattgatttcctagatttgggcaaagtcttctcagcgcccttcttcatccactcagctcatggatgctgcaaaggtggccccattccgaacaaaaatacactatattgaagattttcaacatctgattcctggggacattgatgaattggagtccatactctactactgaaatttacatcaccctggagcaattcaaggcttcgcccactactacctctagtgaggcagttttttcattacaccatggtccaccttgtgcacatccatctgaacatcatttggatcttgatgggttgctgcgtgatcaatcagttgtccaaccttagtctctcccttcttgagatatttttcatgtacactctaaagtcaaacagtttgggcaagttcaccctttcagcctagtgccaatgattcaaatttctaacgggctcccaaaaaccattaaaggctggaacaaggggaacgtccttgtgtttggtttatgggaaggacaagcaaggatggcttgtcaagtgggtttagaaggcatcatttgaccacatatgtcgcctattaggaattgaagctgcacaatgcaaggagaaggtccttctgcccttagatagccttctgagtgttcagtcatttgacgattgggctgattatctgttttgttaaaattaccaaacaatgtataaaatatttttttttttataaacttacaaaataatttataaaataatctattctttttcaaaaaaatttataataataatataaaatgataatattttttaaaattataaaataatagaatatataaattttaatttgtagataaaattaaataaaataaatttcgttctattttcaatatatatcatcgcatctaaatattatatgttttattaataaaatttaaaatgttaatatatttatatttatccatgatataatttgataatatcaaagatgaaaatataaatattattggtttttaatttttttatatatgttttttaaagtttataattattttaaaatttgataaaatataaattatatattcaccaattggactatgattaaaccacccattcaatcaatgaaccgtgaaccaagtaacttttttgcatgaccggtccaattatctgaaaacatcatgttgagttgcaccttgagagatttgttcaatagatactctgatgcagcgcacccaaccacttgtccttggtgagcatatcgtccctcagggatactaaggtataggaagaggtccacaatgaggaggctaaagtgaggtgacgaggaattgaaagcagcaagaggggactttgctccaaacccgagcacaaaggtccactttctttgctggacaagattaggcatacatgtccctcaccgcattgtttggttatcgcaactcgtttggttagcagataaaccaagcatctgcccagaggacatgcaagaggcggatcctactaatggacctccatgactagttgaaaggctgcacaaggggggcatctcccatctaggctgctcagaagaggttatagtttccatcccctccagctcgccctcccattcataggaggtacaacaggagttgtcgctcacaggagtagacaaactcgcagcagtgaacttttctcgtgtgcttccataaagccttgtcaaagatagtggtcctagtcggatacttgtgtatgggcatggagtcatggcccttcctttggtcaagttgttcccaagtttgaggtgttcaggggacagcattctctgcccaacaataatggagtggactcttgagtggggccttggtcctgcatggtctgctctgagtctggatctgctgagaaggacccaggaccttcaaatcccatgggaacagatgtgatatgcttattccatagattatcaattgtacttctcatatattctcttttattttttattttttagtttttttcatgttagatactttgcaaaacaaaagttttaattaaaaaattaaaattttggttcagaaatgtaatataatccatttataaaacttcgaatattttaattattaatatcataataaaaaataaaaattagctattgaaaaataaattaggtagagatctttaaatgatgctaaatgtgagtttttatatttttttaaactatcaaacatcggaaaataatttattttctgttttccattccaatttttatttctgtggctaatcaaacattcacatggtatgcatattatattagatataatgttcaagaatattatatcctattcagccaattaaccatagccctaatggattaaaatcagatatagataacatttatttatccaagaccgtgtctaaggtcttgttgaactatgtagggatatatctagcacattttacttgactggattccacatctatgaagaggaatatagacctggattctagatgtcttgttgaattaactgccctcatgaatttgacatgccaagagataagaccaaattaatccaaacataatctccaccacttattcatttggatgattaaaaaaatatggaaaattaatgaaaggggccaaagccagtttgaacaatggcctggaatgtcttctgggctaacttggggacttaaaacactctcgtttagacaaaggaaacctgaattctactaatggaaatagaaatggaacttggtacagggaaggctgagctatccttcaaaccaacactcaaaacgaaactaaaacacgactgcctgcaaaacagcagatgccaataagccccagcagaaactcccactggaatcccctattaggaaaccctgatgaaataaacccatatgctcaaccctggatgggggagaagttcttagctaataggtgatgtaaatttagatgaggtcgtttggtcctgcaacttttctgcctcccgagcttttaaacttctttagtggtttgtattttcctcctcttgctttgttatctacttaatacaagtatgttctccattctaagaataagaatgcttgttcagttttagctttgagtttattatgtatatttctggggatggattaaagattttgcccacccctaaatttcaagcacatttactacttataaccttattttgaccctcattttattgaatcagttggctgagaagaatcccaaggtagaagctttctt

SEQ ID NO: 13505 - DNA, 3119 bp, Vitis vinifera
  Intron number 1 from transcript GSVIVT01018377001 (locus G SVIVG01018377001) derived from phytozome v7.0 (chr-ID chr1 5; pos 10116140 to 10119258 reverse strand)
gtcttgatattcttcacgatccttggttcaacaaggtaatactactatcaatgcacttcaattttgtccctttttgcttgatttgctctttggttgtcgttgagaagtcgtgtgatcgttatcaattggattcgtggtttgctcactctttctgatgattctggattgttaattataattcggaaacttggatgctgagagattggttgtttgtgattgctttgaaggctttgctaatggttgctacttggcggtacactaatttgggagtggtattatttattgatttggtttgaagtcgctctgttttttatttgaaaattttggtgttggtgggagcatgttggtcagctcccagaggtttgggttcccatggagagttcgaagggctcggcatggaaggctcctcgattacccaaaaaaaaataaaattcttgaggatggttatatcttatgtggtgaaaagtgttgccgttttgtgtcttctttaggatgctttggtctggttggagaggaactctagaatggttaaaggtaactgcaaacacaagggacaaaagtgataaaattagcctctttttatttttatttttattttattttttgtcttttgtttttgcctttttatatgcattagtgcttattgtgcattatgggattggggcagagcttgtaatatgcagtcagtcaattccacatgtacccaactggcatcgtccaattggatatggttggagaaatttaattttgagggatggttctttttagaatggggatcaaattggtatgaggagtacctttagtgtttatttgggtggattcaaagggtggagtttcttgctcttcttcaaggccctagtgagacaatggactgtgggtgggtgaaatttaaaattgaagggggctcttctgctattattcactaggtatcctatagtttcatgagttcttgtaggattgtttgtttcatgagagataatttgagcacctaattctagcatgcaagttgagttcaattttcatgctgtggatgaggacgctgatttgttgtccaaaaggggaactcccactttttgaggagtttaaaggaaatttttactctccatcatgttgggtttgagtgtagtctgtctagattttagatctttgcacattcttttcctttttcaatttttttaaaagaaaaatattcctttttttttcaccttcaaaatatttgcatcacaatggtataatgtcaagaaaataaagaatcctagatattaggaatttatttagcagagatattgggatccttgtagcacaaaaatacctaagctagtaaactattttttttgataggtaaaaacacaatattatacataaagagaaaagggtgcccaaaggacaacctatagcatacatggattatacaataggcgcctaaaggtaaaaacaaaagagaagagaggttacaaaaaaacctcaccccccctcatctagaacccgaccaataaaaaaagttgattgagggtaaagacccttctcttataaacaacttagtccaagactaaaaactacaaacaaaagaaattttcagcttttgaatcgaaagctcctcattattgaaagcaattctatttatctagtaaactatttttcacacttctcctcaatccatatatctagaagacccaacccaacgtgcacaaagtagaagatatgcttcttccaagtgcttttagtatgtaagacccttcagtcctattttcttgggaaccttgtgtcatggattaggatgaatatatagggggttcctctaaccatgatagattttattcattggttgggaacttcgcgagggacttttgttttttaagccccctttcttttttgctttacctcttggcgtactttgtatataacttgtgtactttgttgcacgttttgtttgctgcttataatatatttttgcttgcctatcaaaaaagtgctttagtaaacacatcaacctcttgatcctcaaacttaacatatgaagtgatcaccttcttgctcatacaaattctctaataaagggatattccacattgatcgaggattccatactatttgacaaccatgctacgactgcaaaatcatgtttctgccattcagtaaatctcttagattcttgtggagaaggatcttctaacaagtgagtcaactttcctttcactccagcatacacctgttcaacactagcctacaagagataatcagggggcaattcaattctagggaagtaacttgaacaccaatgcagtttatggaatttctagatttgttttcaccaattatagccataatcaccaactagataatgaggaacaatgtatactgaactttaacactgttgccaagggaaaaagtggtcattttaacacttgacactgatttcaggacattgagtaatccaaacacatgggagagtatcagaacactgagttcatgtctcacacaacagcacaaaccatacttggcattgattttggcacatagagcaatccaaatgcatgaaaaagcaccagaacatggaattcatggctcacggcaatacacattgaaattaatgcacccctcacaaaaaccagtcaatccaaatggatcacatcaaaacagaactatcacagcctcagaaaatgcagtcaccactggaaacaaaaccatcagagtctcaaaaaaactgcagccaccgccaaaaaagtccctgatctaagagaagactttgataccatgttgaaacagaaaaattcctctttattaatgttaaaaatacttgcattgctatggtatatttagcgaaaatatggaaatcctagatattgggagagatcttaggattccccctagtacaaaaagaactaagctactaaactgttcttaacattttccttcttctattttcggaaaggactcctagtactttcttccccttgtttctctttcaccttttaatagacaatcatttcccacaaaataggaatgataactaatacattggtgttttttgaatttcctaataatgctttacttttataagttagggagagtttcttttcatcttcatatataatgacatgtagggaacggcattctcc

SEQ ID NO: 13506 - DNA, 1375 bp, Vitis vinifera
  Intron number 2 from transcript GSVIVT01022031001 (locus G SVIVG01022031001) derived from phytozome v7.0 (chr-ID chr1 4; pos 4094262 to 4095636 reverse strand)
acttgggcctctctgtggctgaggtaagtactaagtagcaagcaacaagaaaatgacagatgtatatcgacagaatgataagtaccaaactcctaagctggtgacatactgtcactcgttatgatagtggcttcaattttatagtgcatgcctcatgaactacctttcttggggaagggctatttgtgctccattttaagcattcccactccacatccaaatatttttgaattttacatgtgttcacatttttcaatgactccaacttttctttttccctgatatgttctgtgctttggtaacccatcctctaatatatgttgtttgattcctgcatcactttgtgacaaatgctctgtttttattctgtgatttcaaatacccatatcaaaccaaagaggaatacgaggaaacaatttggtagcgtttggtgtcttttttctgtttgaagtttcatttttgattctttatgttttcagtagtttgggtgaatatttggctaagcaatctagaaaattggtgaaattggccaaagttggacaaagtattctattgctcataaaaattttcttgacaaactttggcagcagttgtaatgccattaagatttgaactgagaaacaactcatcctaaactcctagtgacaaaccatgcccattcccaaattactgtaaattcatcttacctcctccctgttgacttctgatctcacaagtcacttaaatcatgcttttactttctgctctttccttcaatttttttgcttaattcatagttgttccattgagttctgtatctttattatgactaaatcaccctaaatgaaccttgtaaccctccttaaattatgactaatcatggtgcattgatctaaccaaaccaactcttgacatttagtgtcgctggctcatttcaattctttttaggaaccagcattttactcatcaggggacaaggggattatggaactggactgtagtggtatttcatgcatactgtctattgaaagaggagtcaggtttaactgaaaaaggaacatcattgagacttcagactataacaaccttgttaagctacaaagtgcttatgaacatggtgttaaactatgagctccatggcattataattgtcttagcatagaggtaacttgtgaacatcatggagtacacttcaccctgtgatagatacaggaaaattaactcagatatgtctagcattgaaaatgatcaaaggtgaagttacttttgcagccctggagtgaattttatttatctggtttaagtggagtttattattttgttttctctgagttctattacttacaatcctctctttgcagtactcagtttttggctcaattttgacaattggagg

SEQ ID NO: 13507 - DNA, 1530 bp, Vitis vinifera
  Intron number 16 from transcript GSVIVT01009148001 (locus GSVIVG01009148001) derived from phytozome v7.0 (chr-ID chr 18; pos 5527464 to 5528993)
gatatagagatccacaaccaacatatacttcccaggtattttttttcacacctggaatggttgtgaaactgtgtattgtgtcttcagttgatttttggggttaacattttttttttgtggtattattcagttgtaattgtgggaaaaaaaaaacaagtagcattatgcagtaatgcatgtaatgtaatataatacaacatagtttgattcttaaatgaagatatatagcaaggggggttgggtggagatctgtgaggttccaggtttgagtcttggaaaaaaaggttctctatcaaaaatgaaaaaaaaaatagcatgtctctgtcaatgtcatggattatatcataaggtctaacagatgagtttttgaagggaaaggggttggtaatgacataatctttatctccttgggtgatttccagagttggaaaattgacgtcttagtataaataatttccaaaaattttaaacaacagattataagatctgaattctcagatcatgctgtttcattttgaaaaattatcttgtgtttggcttcatacaatgctaggaagcatgaaatgtaacatttgtttccaagcaaaattgaagctataactgtgcaaaatttaatagtctttcttttgattttttttttcccttctttttcttctttttttttttttttaaacagctgttaatttcttttagtctgtaaattcctgaatgccttttcttctggtttcctaaatatgttttaattattgacattttctttgtagtcttttgtttttttaacttctagtctttaaaaaccagttcagaatattttcaagaattagtcaaactatgcatatactgaatataaagggaaaatatgatacttctcaattatgtgttctgttttgcttgcagttgttttatttaggccacaatcatgtaccatttgaacactataccatggtgcaactttgtattactttgtgtggtttgcatttggaacttgtttttctaagcttcattattttatacaagttgtcatattttacttggattctgatatagcagcagtaattgttgattcttggattttgagcctctaaactgaaatgcgtggtttttgcttagttgtagaatagggctttgccttgcctattatagttgggtggattagcacacaactcgtggtttccaagttaagttatcagtttattcctttaaaaggcaccaatgaagccttaatcagcactcactctctctctctctctcatttgcatgcatgcatgttgataatcttctaagcatatgaaatgattcttgatttgctctatagacaagcacaaatgcatgaatggaggaatggttccatgaggtcaacttaacttaggcattcatgaaatttgcatgttgctcactctcacggctttttgcttgttggtttggctggctgtgtaattttgtttctatcatgttgatatcctaatattgatgaagtgttttcccccaagtgcagttttatagaccttccaaatctgtcttcatccatat

SEQ ID NO: 13508 - DNA, 6546 bp, Vitis vinifera
  Intron number 4 from transcript GSVIVT01027492001 (locus G SVIVG01027492001) derived from phytozome v7.0 (chr-ID chr1 5; pos 16253255 to 16259800 reverse strand)
cagaaactatacttcctctttatagtaagatttgaactttgtatacttttatgtccatttattatttaactttgttcaaatattatgcatttaaaggatcatgaggtggttatacatatactctagtttagctcatggtttaatgtgtttgtgtgtccatatttactttatttctttcttttcttaatgattctattgtgattttagtcacattagttctttatggatggttaaaaagtgatttgtgtggtataacatatttagatactacaatgttttgtttgtgtttatcatgtctcactcacgagtcaattacacaagttttcttccatcaaagtaatattattatgtataagtgatatttaaaggttactctttcattaatttgtgttgtcactaatcaaatttatatcacattaaaaccatgttttacatttttttaaatatttgttctaaatcactatttactcttaaaagttgtaccaaacactctaatagtttttcttgtcatggtgataagttttaaaaggagttgcaaaagtatcttgcaagagctcttagtaattttattcaaaattgttcttatgaagtgatacattccatgttaaaaataaaaaataaaaaaaatgaacaaagaaaaaatggtatccacaaatgtcaaataaaatgaatgaccaaggtgtagtcatcttgtaaaaaccttaatatagtattcactaattgatcttacctctattaactttctttcatttgtatcatagtgaggggatcaagaatccttgttttatagaaactttataggaaattgttgttaaaaaactatttaaaaaataataataatagagagaaagaaaatagaaaacacataaagcaaaccacaattctcatggttttcctaaagcttgcatcattgagtgaagataatgaagaactttcattgctgttcaaggagattataatctagagttcttgaattcttaaggcccaattacacccaaaaaggctcttattttctaattcctaattacttaggaatattccatacaggaaactaatttcttaattataaaatatacatattcctataacaaaatttcataaaaatcttttaaacaaatatattatagtagaaaaatattagaggcttacaaattgactcgaatgagaatttaagatactttctcacaatctctaccttaactacaaatttcaagttctagaaaaactcaaaaagtcttcaagccccaattatacccaaaaaggcctttttctttcaatcaaaatcctttcttatattttttttcctaattacataggaatatttcatataggaaactaatttcttaattataaaatataggaatctaggcaccacaacttgtacccttgtatattatgtgcatatcgttgcacttccatgcccttgctccaaacttaccatcatttgcatgactataagcaagatgatcaaaaaaaatttaatctatataattagtagaggaactagaccatatttctttaggagtcctatagccaataaaaattgaaagagctctcataagataacaagaagatgtattctctatactaaaagcttacaccattatctctttgaaagaattatatttatccattatggaaaactattttattgtggagtatgtccaactatgtagtgtgcattcataatgcattcctatttgcttcttgattataacttttcattacttcaacttattaaaaacattgttctcatatttcaagatataaaccttgacctttctaaagtagttatcaacaacatatatttttcaccaccatgtgatacaatccaataagtggcctcaaatatctaacatacattccacaaagtgttgataagaatttggtagagaacatatcaaaattgtgacaccttagtcttcattattaattctaagatcattcttccttagatccataagttttattgaacttgtcaaggtaatcttcattagatatacctttcttcattttgagagcgaactatttcttcaaacacaaacaatttataagagactttgtcatatacaaacttctcatcttcaaccaaagctcaatagttgtatcctcttttacaactttatgaagtacctcattacccaagtgcaacaaatatcttcatgtgctttcttcataagtatatccttctcttcatcaaacattattgttggtagagtctatctaccttttaatattttagatgatccttgttgaataactaaggcatctaaggcacatatcttaatgcactataaactaaaactatttcttctatcatacttcctaaccttgaacttttcaccattctatgtttaataaccttttccatagtacaattttttaatgaaaaaaccatgacaaaaaggcaataatactcaaaagaaaaatatgatgataaaaatggaaaatacatcaaggacacaatgatttttgtagattgtcctaaaacctacatctacaaagaaagacaatgaagatatttcactattattaaaagttattacaagtttagagcttgcaaatctcaaatccctaactatacctaaaacattctctcctttactcaattttttttatatataattacataagaacatcccatgtaggaaattaattacctaattataaaataaacaaattcctataagaaagtctcataatataatacattttttatataataggagcgtccttaacatgaatatatcctagtgagaaaatatgaaatctaagacactttctaacaaaaactaaggtaagacaatttttttttctttgttataatgattgacaaataagaaatgcaattggaaacctaatgcaaatccatgtggggccaaccattggtttaataagttcttatataaaagtgttattctgcatatttgacaaaccaatcattttcgttagatattttcccaaatttaaattctaggggaattttctttatatatatatatagttgttccatttattcattttctccttgatcaactattatgaaattcattacatgtcaacttgagttttttttagggttttatgaaggttaacaaacaaaggttacctataagtcctaatgttttaataagtaatttattcttttatagaggtaattaaagaatgaacaagacttttagttattacatttatccattaagttgtattttttcttactaacttcttaggagttcaataaaatatttcgtcttatcttactattttcccaaatgatcaatttgatcttatttattggtagatcacaaaaaatgcccattatctagccacatgttaaggaatttagatgaagtagtaaaatctttcaccaacttttaatgtggtaacaaaattgtttatgtaccttatttgtgtccttttatagatgtatatgatatacaactagtttggccaaattaccttgactatcctattatacaagctaataattcaacctaatcttaagtcaatggatatactttaatttatggtatttttccccaactttctatagtattaggaaaaaataattatttaagtaaatgaaaggtaatttagtaagattaagtcatatctttttatagtttcttacttggtattaaaattgttagaattacatcatctaccacttgttggttctttcatgttttggaaatgtaaggattattatatgtataaaacacataaagaatttctattattattttggctttatcttgtctttagaaaaaaaaatgatgatttctattttttttcctttttttcttttttgacacacaatctgctcattttttgttgttttaatagtgaatagaaattcatgttgttatattgttatggtatgtttaatttaattttcatttctctttatactattatacaatatctatcatatctattagttgtagcctaatagagtttttaaatgtaccattaattagcaactaagagcattttccttaagaaaatattttttcttatgtttctaaatcttctatattttaatagttaagtgtcttgatgatgatgcatcttaaatgtttaatcacaaaaggggaaaaaagtgtggagtcaaaataggcaatgcttgtctaagccaaagtaaaatttgaaaactcaggtttataggtttttaaaagatgtagaagtattaatatatgaatcaatatcttagtaggttaattagagtctagcaactctagggttgctagtgcatgtaactaaaaatatatatatataattaaattaggctttttatgaatatttgcttgtggtagtgagacactattacccttttcttttttgtgagatttctatttaaaaaaaattaaaattagtgagattctaagacacttttatttctgtttctgcatctctctcattttctatttttattttaattttgcccattgatacaatataatcatagttcctctacttaactcctaaacaagtaaaatcctagtctaattatttgattatgaaaaaccacttaagcattgttctatatcatatctacctttttcttttttcaatttacattatttttccttttttagttttctttctctttaagacacaattttttcgtcaaacatgcttccaatgaatatactacctatgtgtcaactatttcccaactagctttaacaacttcgatttgaataactttagggtgttaaaagattgattatatgtaacaacccgcaaccaaccatgtggatactggccattcaaggtccaaagaggccctcacggctttaaaacacgtctacaaggttaagaggagttcatatgtatataaccctagtaactttctcccttttccaatgtgggatatcacaaacaccctctcatgtagacacaacatcctcattatgtcccacaaattgcagggtcaaataaacgaacacccctcataaacaaactcgcacattgaggttggggatcggctcgcacactggggttggggatagactctaataccatttgcaacaacctacacccaaccatatagatactatacactttgggcccaaaggggccctcatgactttaaaacgcgtttacttggttaagaagagtccatacatatatagcatctcgaactttctcttctatcaaatatgcgagatcacattataacttatagccaacatgtactcccttataaaattcctttaagcatgtctaataaaaatgtttgcattagaagaagttggagttgtgtacttttgttttaaatttatttgacctatagggacctaaatctagaaccttcttggattctttagccaaatacttacaacattaatcaattcttaaggtttttatagaacctataaaaaaattctttaattttttcattttttttcttagataatatctcaacatacatatatacatatgaagtgggtttttgaaatcatatttgagttgaactttagagacaaaaagagacattggctggggatatggagttgcacatacatatcaaatgggtgtttaaactcatatttaagataaattttgcaaacacaaagaaatgattggaatatggaaatgtttttaccatagaaacataagttgagagtaagaagaattatggatttgctaaatactatactatgaaatttaattcttcacatctgtattatacatgatcatttttctttcttatttacaacattgcacaagaatttgctccttagtattcccactttgtagtaccatagataatgttggcttcaatatgagaaaaaaaatttaagagggtttcaggaggaactaactccttgtttaaatggaactaatcatggtgtccaatattgatgtatatgaagaaagcataatgatatgacttttaagagtagtaagactgtggcccttaagttaaattttctgtgtcaattctttattttatgggggtcgaactcctcttccccatccccaccttcctccatctcctagctctaccttcccttttgcttttggaaattttaaagataggttgaatcctaattattttttagcttgttagtcatttacgtaatatgttattgcttaaattttggcttatggtggaaacaacaaattttttaattttctaggacaatgagattatcttattttgtttttgtgaagaaaaaaaaatagttaataatttctttaagattgtttttttcctcccaatattactctctattatttgttgtatatatatatatatatatatatattttctcttttcctctaagtgaagattttgaaaacaagtggagtcctaggtcttttttagctttatggtacatctaatgtgttgtcacttgcataacatgtcactatactcaaatcaatcatttttaggtgaatttatgggataatgagggtctattacttcattcttattaaaagaaatttgtttgcctatttttattaagatcatatttttttttctcctgaatcgctctgtacttcatcttgtagaaagggataataaaatcaacc

SEQ ID NO: 13509 - DNA, 11665 bp, Vitis vinifera
  Intron number 2 from transcript GSVIVT01034473001 (locus G SVIVG01034473001) derived from phytozome v7.0 (chr-ID chr1 8; pos 20763987 to 20775651 reverse strand)
tccccttgctgctgtgcagtcaagctccgccggaggtatgtcttgtcaagatagtatgttattttaagtgctttgactctactgccgagcttgaattttgatatgcgtagagtgtgtggaattttgatttggtaacaccatggaattgttcaagtttggttcaattcggttgcaaatgttttcaaattagatagcaagtgtgtcatggaataggtgatgaaggttggtaatgcttgtgctatatgatttggaggtattaacatgtagtagaatccaacatataatatggaaaaatttatgtgatgcgggaataatatcttagaatgtcaattactggtgaagaaagggagcattttgttgttcagttgctgaatgcatattaggaactaaggagctcaattgaacagtagttgaactttagaggttggtttccctggcttgatggcatttatctaagattcacttgttttatgttggaggattccatgcctttctactctaatcagaaatcaatcagcatatattctagttgtcttgttcatccaaatggtttctcctcttgaaatttcaattcttcagaaatcttgctgactatgagattgatgattttgctaagcttatttgtgttccttagatagagtttatattttcttgtatttttcaaaatttttatagtttcatttaactcctctataaaaaaaattatatttgatgagatccaattggacttgtaaaaaataaaaaatcaaattaactatatcaaataatggcatttaatacctttgattgtttttagaaagtttaaaatagcttacatcattaaaagaacttgaaataaaatgaaattttgataacatcttttgagatgctaaggtttgattgaataattaagaattccaaacatagctaacttagatagagcaagaatccctaaccctttttttttttgttgttttgataattgaggaaccttccatggttgagcctttccgactctacatagggacccaaatcgtagggtgttgactacacttgccacaaccaacattgagtgatctaggatatttaaccaacggtaggaatcaaactcgagattatgtgcttctaccacacatcttgtcattcgcacaacccaactaggaaccccgatgggccaacaagaatctctaactataggaactttgtttcatcaatctttctctaagttgttataaaatcccttatggggcaattaaataggttgtattggactattattaggacctagctaagatgtatttacattgaattatgagctaatttttttcctttttggtgaaatctctctctcacatatcttttaattcatatttcctccttgttgccttaccctggattcatttgtatttcatatccctctatccttagtatgatgttggcatcatcgactatttcataatagatagaaaccagtttttgagaatttttaggggagtgtttgtatatcctaacctaaagggtaatatattccctaaagagtaacctaatggctatgggtattgttaatatatttccctaaagagacatctaattgtggggggtattttcttcatgcaaccttcattttttctttgtttcccccccttatttaatatattcatcttgaaacactttttccattcaaatccagtttttcccaaataagttgcaattattgatgaacgagagcaataatcattccaatcaactatatctagttggctagtgattccttatatttataaggaaaatttggagttaagagattacataaaaaaaaaaacaaaccatacataaaggaaaaccttgatggttattagattatttcctatctattagatatctttgtctatagggtaactaagataaaaaagtcaaatatctaagggtaaccttatcgataagatatagaaaataaacatgatatttatatcttcaacaatcctcctcaagctcatgcataggcaaattatggacgcaactcccatggtcaacgaagcaattggcttaaggatggaaaacactagagttggtgtagtttccaagtttaatattgaaaaagtgtatgactgtgtgaattagatatttctattggaggtactaggtaaaatgggatttgagttggattgaatggattcggttttgtactctaaagacaaggttctctacgatggtaaaatacatgcctactagttattttccgagctcaataggcttgaggtagggccctcccttctcttcttatttgtttgttttggtaatagaggctcttagtgttcctttgaggaggacaagtgagggtgatttagtttcagggtctaaggtggaaggtaagagagaaggtgtggaggttccttacctcctttttgttgatgatactctcctttttttgtgtgcattgttttgaaaattttacttgcctaagttggatctattttggtttaagacttcctcgattttgaaagttagaaaagtggattaattcccatgaaggaggttctaaatgtataggctttagcattcttaggtctacctatgggagcccccactaatgcaatgtagtggaggaagaatttaaaaaaaaaaaaaaaagttgtcaagatggaagtgacaatatctctcaatgggtgagagactcgcttcgctcataagtatgaagtgtatctatttacttaatttcctttttcattatccttagagcaatgagtttgggtttggaaaagatccaatgggatttcctttagccaagggtcaaggtggggggataagggcaatagattagagccttatctacccttaacaaaatgttgcttagaaaaagatgttgaagattttctataaaaggaaacatcttgtggaggtgggtgatcaagggaaagtatagtgaaaagtcaagaggttggtgttcaaaggaagggaaggcatgacaagatgtttggtatgggatatgagctaagttttggtaagatgtttggaatggaaactctcctttggaagaggctttcctttatatatattcctttgaagtttctaaggatgcatagttgagcaatttttgggaggcttcaagtggataggggcttttgaacctggataactttgaacctttgtttaggaagccttggtggggggttggcggggggtaggaggaagaactcaaagaagatgaggatatgtcaattcaggaggatattaaggttgagaagctcctttttaggtccttttctacaatgctttggagtcggataatggggaggctttctttccaaaggaggtttaaagctttttagcctcttctaaggtgggctttttctgcttgggaggcagcttaggaagggatcttaacttgcaatcaacttaaaagaagagggtggcttcttacaaattgttaccacacgtgtaagagataagaagaatcaactaatcatattctcatccattatggaataacaagaggactatgacatgtttggtctattcaacatctcttagattctcactgattcattgagagagtttcttcaaggttggcatgggagttctctagagaagaagaggggggaaagtttagagaacaacccctatatgtttgttttagattatttgacataaaatagatcctttaacagtatgagtgatcaaaccactaacttaagaagtctttcattttgcacccttttctagtggtcttgtcaacttctttttaaaggttctccattcttttgtttgactctattgattagttgaggtttagatattggttggttgttggggatgttatttatttttatgttttgctacttttttttttccccacaaatttacaatccatagtacactttctcattaagttttccctttcttgacacaccactctctctataaaaaatttcaaaagttttcctcgaggaaaaatgactactcatctcttgtcaggttagttgttttctatgcaatgggttgcattaagcatgggattccctaagggaaaagactttagtttcatgatctatgaaaaggaaatctaaagaattagttagtaaataaaaactaaacttgaagaagtatgaagatttgtgaggtggaaaagaaggcctttaaggttaggtttgaaggttcccatgggaggaggtgatttctgttactgagaggagtggaaatgctgctttttctgtgcctttcgaaagagaagagatgggttggttattggaacactctaaaaagacatcagggttagagaggcatttgggtttcaatgggaagttcaaaggaaaaacaaggacacatctttggtgattcgttttaataacataggtaggttcatcaagttgttgaaatttctacaaatcaaagaaccacaacactggtaattcttgagggtgataaagggagaggatgggaaattctcaggaaggtgatatatgtactaatggaaatcacttttagggttcctttggttagttgagtggaagttgggagaacaaagaaggaaatggtggaggattttggtaggaagaagcattcttttgtgagtggtagagggagggggggttggggtgaaagtaatgttaggttgtaggattaggtggaagtgaatagaacgattgctagagagttgggtttgaggagtttggtgtctataaccccttttgcatctttcaaagggttgctccttgcgtaatcttctgaaagggttgtctaacttcaagagcaagggaagatatcagtgaagggaggccttagtattactttaagaagttggtcactagagaaaacacagaggtccttggaaaattcaagccggaatggatcgaaccaaggggccttcctttccatttatagttcaagaatcattttcgacatttaatgaagtcgtgatggagggttatagagatagatagtcacaccttgaagcttgttgacttaccaaaggctataatgagagtggagataaatctaaacatgatgcttccaacactattggtggtaagatatggagcatggattgtcacggtttcaattataattattaggagggaagaaaaagggtaacaagggaggtttgagtcaactcgtagtagaggtgagtttgacttagcaggaggtggtgtggtttcaagacatcttcaggacatggggacacatggctttgccaggtagaagataggaaataatagtcctccaactcctttgttctgaaattcaagacaaaatgaagccttaaagaggaaggtagcccattttgaggggaagaaggataacccatgttattccaaagcccacttaataatggagaaaattttaagtggtagcaggcttaatgatattttaatatgtagggctcaatctagtggaagcccaaaagatggaaatgggcctttgctgtaatggcaagcccaaaagatggcaaacctaactataggtcacttcagataagggcctttgctatgagattcaaggctcttttttcttagtgttggtgcctcaaccttccacaatcacacatgagctactgccttgaaggctagtcctagatattattcctagtttatgcgcaagaagttggcctccatttttccaaaggtcatttttgcgcaaagctatggtttgtgttgctgtagagatcaaagaaggccttcattgaggagaatggctgcattgtcccgttggaagcagcaaggtcatcaaaggtctaaggcttgactacgatggacggggatgagttcaatcacaacctagatttgtttggggcaacatcaagagtggctgagggtcgaggaggtgttcttcattgtggttttcaagcccatgtactttcatctaacctagaatccattgccaatggctagattttagatagggcctctgatttgcatcctattctcctcacccttgtttgatctttgactacgtttttccctcattttcggacaaattgcggttccttaatcaccctgcttgaattatcagtgcttaaccatgtcttatctaacactaaagttgtcccatttcaaaaggtgtggagtctctcatagttatttctagccaagaattaaagggcttatttttccataggtggtgacctagcgaccctagtgacactctttccctagttatatgtttgtctctagaatcagacccttctttataggaaggttttcatatagaaggtcttacacctagtaaaatggccattattcaattggttttgggaactatgaacatcaagcttgtcaaacatagtgatgatgccattaaaatggggaataacagtgcacgatctttggataaggtctattccaggaggaagaataaacccttattttatatccctagtgtttcttaggttctgttcctaaggtttttcaggttgaaatatatatttatgaagatcattagttggaatataagaggtcttggttttagaaagaaaaaaagggttgttaaggaatttcttggcctatgaaagttcggatattgtgatgttttaggaaacaaagagggaatcttgtgatacgaggtttgtgggtagtgtgtggaaggttagaaacaaagaggtgggctattcttctagcttatgggtcttcaagaggggttatgattatttgggacacattgaagtttagatgcttaaaggtggttctatttagtgttcaaagacaataaacttgaatccaaatgaagaagggattttttgacgtacttcagtttataatccaactaagttcaatcttaggaaggtctttttggctggagctataagaccttttagttctaacttttttgaaatggtgtgttggagaggattttaatatcataagaagaatcttataaaagttgggcagttccgggttaactttgagcatgagtgattttgatggactcataagagaaagtgatttaatcaatccttctcttcgaaacacgtctttcacatggtcaaacatgcaagaactccttgtttgcaagaggttggatatatttttaaattcaaatgaatgtgagcaagggttctctaaaagcatccaagaagtgctccccatattgacctttgatcattgtttgattgttttagacaccaatccttttaagtggggaccaactccgtttaggtttgaaaacatgtggttactacacccaaatttcaatgaaagattagttcggtgggatgagagttaggttgtaggatgcgaaagtcataaattcatgaaaaagttacaatttatcaaattaaggctgaaagataggaataaggtgtcttttggagatttaaaggagaaagagaaaaacattctcatagaaatttgttagcgttaatgctagggagcaagaaaggaatttgattccttaactttcaatagtgaggaccttaaggacaggggaattggaagagttgttaaaggaagaggtgttttgtaggcaaaaagctagggtcaaatggataagagaaggggactgcaactcttaagtatttccattgtgtggctgatggtaggcgatataagaaatttataaagttattggttttcgaagtaggggcgattctagataacattgaaaacattttggaggagataatgcattttttttggaaagttatactctaagactccatttcagcagagtgtttcatggttaggctgccttttttctcagaaaaggagattcacaatgctatattttagttaaatagggaaaagactcttgggcctaatggattcaccattgtagtgcatcaagagtgttgggatgtgattgaagatgatcgtcttagagtgttcttaaagtttcacaataatggggtaataaaccaaagcaccaatgctaccttcattgttctttggccaaaaaagagtcaaatcagcaaaatctcagaatttaaacctattagcttggttacaagtttgtataagatcatagctaaggccttattagggcgtatacgaagagttcttcatgttaccatcttcatggtcgaaggagcttttggggaggtgaggcaaattttggatgctattttgattgctaatgatttggtagatgagaaaaagagataaggagtgtaaggggtagtcttcaaaattgattttgaaaaggcctataacgatgtagattagggttttttagactatgtacttgagagaaaagggaaagttcacaatggatgtcttggatgaggggatgcttctccttgacaagttttgcggtcttagtgaatagaaacacaaaaggttaggttaaggcaattagaggcttaagacatggagatcctctttccctatttcttttcgccattgcaattgatgttttaaggagaatgtttttgagagtggcttattagagggtttcatatgggttaaaacaggattaaagtgtctcatttgcaattgcagatgactttatctttccctctacaatttctttggaagatgtgcaaaatcccaagctaatattactagtttatgggtgtttatcaaggcttaggatcaatataatcaagaacactctttctagtatcaaacacaagttaagattagatctccaagttggctttgatacttgaatgtctctgattgacttttagtgtacttaggtcttctattaagggaaaatccgaaagcaaacgcttttttaggatccggtgattgagggaatctcgaggagattggataggtggaaaaaaacttttttatctttaggaggtagaataactctaatttagtcttgcttatctcacatcttcttatccctcttcaaaattcgaatatcaatagcatcaaagattaaaaaattgcaaagagattttttatggttaggtactagttgggacctagtgtgtatgcttaaggagtttggagatttgatttaggaaaatttctttgaggtatcgtgctcttttagggaagtggttatggaggttcactagggaaagttattttttctttcttttttgataggtagaggttcttccctaggaaaagttatgccctttggcattatattatttaaagtatttatgggacacatcctaataggtgatacatcaataatacagtcagatggtcacattggtgcccttgaaaggccattgcatatgttttccaatttttttttccacacacttgctttgtggtgatgggacaaaaattcatttcaagtctttatttcaagtcgttacaaatagaaatctctctatttcaattatccttggcagttcttccaccttttcttggaaccttaatttttatcgcaacctcatagttttgtagattaaggatcttgaaaaactcatgacctctcttactcacacacacttgtctccattcatcccatatccaagagtttgggaactatctttttcagggttattttcagtaaaatcttacttcttcatttagtttaacatattagatttagtctttttccatctagccaaatttttatggaaatctaaggctccatctaaggtcaaggcttttatttggttagtggcacataagaaggtaaatgccaataatatgttacagttgagaagacctttcaaaacccttaattctagttggaacatcctatgtagtgcggggagtggagagacgattaaccatctctttctacattgtttgatgactttagggttatggtataaactatttaaataggcaaaatggatcaggttgagcctaggagtttttgtgacatgttgattattgcatatatggagttagggaactccattagagacaagaccttgtagaagattgcttctcactttggtatggatcgtatggcaagggagaaatgctaggatctttgaggatcaatggaggatgtcagagatgttatgagatttacttaacttcttttcttctttttgggcctcttatactaacgaatttagaggcatccctctaaatgccattcaactcaattggtattcggtgtgtacaccattagagttagacctacaataagaggagcttaaccagatttgaagagatgaaatctttatacatttttttatgatccatctttttgtatatatctccttgtatagtggtagagttctttgttttgatcaagtttgtgtatttggggaggattcctcatccttaacatgaactctttattaataattaatacacctcttgtttggtgtctcctctttctttttaatatacttctctttacttatcaaaaaaaaaaaattaatacacctcttgtttctgataaaaattaattaatgaaatggaaaaggagggagaaacacatgtgggatcggtgcaactactaaacactatcaactactaaactccatattaatgttttggctgctgaattcaatgctgctagaaattgacatgctttttatgtttctttcctcggtaaggggcttgggatgatgtttcataaatatacttctagaggggagatgctgcatagatctatgaactgaataccatgatccaggtaagaggttaatacttagtaaagattctcttccatctttatgtgaagtattcttatgtgcattagtgaagcatttggaagggttgtcatgatgggaccaacttctcaaactcaacactccatatagtttaggacaacagtcttggacttcaaaagattggagaaaaggagacttgatggtatgattattgcaataagccaagacacacacaagagacttgtgggaaattgcgtggaaatccataatctgggggggccaaggatgtagctagcaattgagaaatagcaaatgggtttcttcacgaggtagtgagtttttcttcaacctcacatagtcttcctttcactaaagagtaactggatctcttgtacaagattttggaaaaattcaaggtttcttcttccttagtttttcaaggtttcctctgcctccacttcatgtgcttttgcatggtttgccacctttaaaacaagcctcgagacttcaagctctcttcatcctaacacttggatcattgatttaggggcaactgattaggtgaataaagagtctaatgtgtttttttatcccatgttcaatgttttagtgaacaaaaggtatgggttccgtaacacacctcaaggtctgaaacaacagctcaacttaatatccaaaacaatctatgattacagaacttgaagtgtgaattatagaagatactatggtgtttatgttaattagattgagagtcaagtcccattacaccttgatttgtcatttatttcggttgtggtgatttcaaccctagtgtacagtgaatcaacatgttttaaaattttaaggctttcaaagcttacttctagatgacagtacatcatgccctatggtgaaagatttactatcctggttaggactcaattatctcctctaaatacccttataatgtagttctacgagtttaagaacattgagtgaactcagtaaatagaccgaatagcttagatttttcactgaactaagattgctgtctgttttttcactttcttgtggtactatattatcattttaatgaagtttgtaactaaacaatggtccccttctccacttttcttttcctctgaagatgtaatatctgaaggtaacttttggtgattatactgggcagatttaccttgggaaagtggtgctgttaaatcaaac

SEQ ID NO: 13510 - DNA, 3551 bp, Vitis vinifera
  Intron number 9 from transcript GSVIVT01000497001 (locus G SVIVG01000497001) derived from phytozome v7.0 (chr-ID chr1 9; pos 15020853 to 15024403 reverse strand)
caacatagaaatcttacttacaacaagtgtatttggtatcatgaccaacaagaccatcattctcatccaccagaatacacctgaaaagtttcatcacaaaggaagtgttacaattaccaggaagaaacaagggcttctgtgttgctaatctaagcacccaattaatataggctgtgaatagaagaaagggaaaaatggctccaactctactaaaagcaccataacaaaattaaattagaaagtaaaaaatgaaaatgtattaattgttccaaggaatgtgcacaactctattctatggagctaattcggcctacctatgagctaaatgtagtgatgattttttcttcttctttttgctcttcctagctttgttattttctctcattactaaagaactaactggaatatgcttgccaagttgtatttcacttattatatttgtcttttaaataatttacatgatggaaacaactaagaaatgccaaaatgaagaaaggccttttcttagttcatgttctaaaattctaaaataggcatatgatagtaggttccaagaataaaatttatgttctatgtttcaaagaaaaatctatcattaatatatgtgatatgagattttttttttaaaatcctatttaatcccattaattgtacttaaaagcttgttatgttcttgttttccttttatcagaaggttattgtttgaatcccatcaaaggaggatgtgatatattttttttctcttatacggtgttcatgacctaatgcaatatccatttaataagatgagatgaaaaaatgtatgcggttattctcttgtttgatttggtattagagtcattcacttgaagacccttttttttggttcaattcaatggacaatgtggttgcacaataaatggttcaggttaattcttattttttcaatccaatgcattggaaatcatgtgacaatgaagcgagatttgaaaaattatcttctttggagagatcaatttattccctttcttatttccaatgggtttttaaaatatgttgatgggttagaaccagtaccactgaaactatcatattccaagtacaatcatggtttgttactaatcaatatgttgtaagcttgatcaaaggttcattgtttcaaagtgcatgtccacatgtcaaaggatcacctccctaaggtccaaaacccaactcaccaagatttttaaagcttcaaccacatccctatactgggggaaccgcctttttacacacatacatttgggagtgatcaaaagtggattttcttaagtacaagactagttatattaatagtgggagtgaccaatcctaaagatgaaactcttttcttagtaatatggatgttaaggattttttatatacccttagataaaatatgaagtggaagaatcacttaaagtggtctcacttgcatgatttaagggttaaacataaatggtatgtcaatcttactttaagaaacattccaaggtcatgaccaaaatattaattagagagggtttctctacataataataatatcatgatctacctaaagtagccttcattctaatgatcctacaagaaaatgtgttttttccaacgaaaaatttgggatgaattaaaatatcatctctaaaactaacattccttaatgaaattttgaatattatcactaacatgaatttcctacaaacttttcttgacgaatttcacattttcatcaccaaaaatggggtagaaaaatttagcaattatttatttatttttggtgcaaacacttttgtgatgaagatagattttttgcctatgaaatttttgtatcactaaatctaatttttagcgataaaaataatttcatcactaaaagttacaactttttttttcttcccaaccaaggtttttagttgatgactatattatttcctaactattaaacttaaactgttggaaaaaaaaataaaaaataaccaaataacaagatgtgatatgcaaaaactaacacaagaattcaatcaacagtgcagtaaaaaaaaaaaaaaaacaattatttacatggtttaatcaatttgatctacatccataaagggaaaaggacttggatggtgcactatcaccgaaaattatgctgtcaaaactcttatatgaattgaggttttatgcacacaccccaccatacaataataatagagatctccctaagaagaaaacagttaaccttgtttcccttagcactctttttctcccttagctattctcacccttctagtacaaaaattttccctctcacatggttcccttgaactacaagagaaaaagccataactcctagcaaaatgcatattagtaaccacccattcaattttatcaaatgtgagtcacacaacaccaataaattcctagatgacttattttattattaaatagtatattcttaattttgatataatagtcgcattattatgaaataatacaatatatattgttgtagcaattaatatttacattatattaatttgtataaataataataaaataattgaaaaaatagaagattaaatactataatataaatttatttaaatttaaatgttttgcaataatattattgttatgaataatataaaaatatgatttgagtaattaatatgtagtgtaatttgttatttatattatttcaaataaataaataataataataaaatattaaaaatatgcaagattacatcatataaatttattacaatttcaatgctttgttatatatagttatccaaaaataaataatattgttggttctaagccaactagaatcaggtctgtctaactatacgaaagtcagacaaccttcctcccttcattgtgcctcttagagggtttgccaagcaataataaagctagatggactattttcttgcacaaaaaggatgtccagacgggtggtccgggcacgcccttttgagcttaagtcaggcaagaataactcaagctatttagtgggaaaaaatggataggcgtatgtgtgcgtacctcatttgtgctttttaaagggtttttatagtgctgaagagagtgccactgtagtgttgactaagcactttgactttctttgtaatgatgattttcttgtaggcaactaggcaatcatcatagttttgggtggctggcaagtgccatcaactaatgcaccatgatcttagactatgcagctgcctatcccttcagcttgttgatggtctggggttatgtgcagcaattaattgacatggatttgagagctagaagaggtcccatcagtcgttcacatatcaagcgtggatgatcacgcatgccaatgggtcttgaaggctttgactggagaatcctacttgtttggggggtccgacctccctttgtcgtttggccctatagagggaaagatccttcttatgcctagtgccagacataattggtcgtggttcggatggaatgattaagatgggttgcatgcctatgctagacggttaaggtgttcaggttggaaaagggacacgtggaggggagtcccctac

SEQ ID NO: 13511 - DNA, 4112 bp, Vitis vinifera
  Intron number 3 from transcript GSVIVT01008127001 (locus G SVIVG01008127001) derived from phytozome v7.0 (chr-ID chr1 7; pos 5560101 to 5564212)
gttcaatcccagctcctcgaactgtggccgttgattttgggcaagtagtttcttaatgttgctttctttctaatttacgtgcctttgtttttagtgcttcatgttttgatttttctttcaagtgctttgttggacaaaatttgttgctaaaaattaaggatgttgattaatattgttacattacatgtagttagaatgttacgatattggtataatattaaatgaattcagaccaataatattaaatgaattcaggagcgtgattaatgaagaggttggggtattggaagggagatggtccaatagggtgtgacatttggaagcgattttggaaagcttgggatgtttctaaccagtgttgtcaaaggcaaaaggcagtgccaaggcgataggaccccttttagcctgaggcaaaaggcgaaaattaaggcaatcacctaactataataagacaataaaatagtatatatatttaccattttacctattctatactcaaccaatataaatattcttcaatattcaatactactaaattttcatcccctatgatgccttataaaattaagaaaatagtaataatcattcaaagtgttaaatataataccacaaatcataagaaaatccatactatttagataattcatcatgtccatatgcatattctaatgttccaaacatccaaaaataaaaataagaaacaaaataagataatgaacgtcctaaagaagctttaagcattatcgttgtagtcatcattgaaattaaaattgtcatcacttccatcaagactagattggtatccctccatctcagtatcatcctcttcaatgtcctctaaattgctttctttctcttcaaaatcaggttgtgaagtagcagccactaaattcccctttaaacttgtctttgatcttggtcgaagtctagtggaaatatttgcatctccaacacctgatgcacttgccactacaccccatgtcaagctatcatcctcaaaaaccaagtcatcctccgcatgaatggtggtgtcttcttcacttatttttccaatcaaccactcattactttcatcaatatctactaatgagatgtggtcaatgacgttgcatctatcatattgtgctttaagagcttggttgtatttaacaaacacaaagtcatttagccgtttttgctctagtttgttcctcttattggtatgaatttgcaaacatttattagtaaatgttaccacaagctacattagttataacaacttaggttacttaactaataaaaattctaattttataaatttacatattatataatcaacaaagtattaaatacttacatgctcaaacacactccaattacattcataacccgatgcactacaagtcaagctaagaatctttttggctagttgtcgtaaatttggggttgtgttgccatatagtttccaccattcagctataatgtttcaaatgcaaactaaaaattagtagactaccaagtaatattttatctaatagctaacaaaataagttatttaatatcttatttagaaatataaactttcttaaagtactttatagtttatacctagagctagtgtcttccttgatctaatggctattggaataccaaagtgaccctctgcattcttataagtcaacaactcacgaatgatcttatcttgcacatcaatgtcaaaaactaatctatctatacaagaatataattctgatgttacttctttatcaaactccacacgagggttgtcatagaaaaattctgggtttaagaagtgaccgcaacccactaaagagcccttgagaaggaagggcctctctcactttcctcccagcctctttttaaaagagattccaccccttgcggttaggcttccacatgaataggcccacttctaacctccccaggcccaattctgttctggtccaaatgaacagacccacttttaagcttctcaagcctaataaattgcccacctagtctgttgacaccccctactccttgacccctattcactaggcttccttccccaacaactacctcagtgccattgacagtcccccctgcagaggatgcaaaagaaaagtctgctatactctttgaaaagcttccaaaggatgacatgttttgtaccccaacctgcaccttgaactgaaactccttttccagcaagcttccactgtacacagcgtgtggtctttccccaacttcatcttcatccgctaaaacacccaccccaagatatcttcccactgacaccacctgagaaaaccaaggcagggtttcccaccacagttaaatggagaaactccccgacccaaccacaatctgaatagagctaggtaaatccctaccaaccaacttcaccaaaattctagcccattgcaactctgtgaagccgtattctcatccactgcaatgaaacatccacaaccatctcttatcaatttaaacacctcgcagctccaaagatgaagagggagacccaccaccctcacccaagcctcgttagcgatggctccattacaaaagcaccccacctccgggttccatttttccaaaaataaaacgttctccttaactctcctcttgcttctagctaggactcgcttaacctcacttaacaactcaaactcaaatagcagaagtcctcttcccaacacagctatgttcaaactccctttgaggagccaattgtgataagcccaactctttagaaaatccaactcagggaaagggattgagaagtttccccaccggcccaccaaatagcgatccaactgttccaatcttccttgcatctccctcctccccaactccaaccagattttgtctcctaacctacccgttttcgattttgcaacatccgcaaaagtccttggttccaactccttttccttcctaaacacctcaagggattgagaatcctttaagcctccagagggaacgaccccagtctctctcaacttctctgccaagatattccagcttccaatcaaccccttcctttctagaaaaattagacaaaatctttttgcctctagatcatgaacagagcaaagaagaaatcttcccgcctcgtttgagcgacgctccagcctatacttccttcccccctcctcccaaacgagggaccaacttctattgtcactccttctacagtaagtctcaactccatccaacaaactactaaggcttgcatccccaaatctgatccaggaaggtagccctctgcatctctcccaaatgcaccttctcaacttccctcctacatcgtcaaccaaaagctcaaaagatttggattccacagcaaaccatcttctttcacccgtgtggccttccttcatctccatacccttcaaacctctatattgaagtaccaattctccaaggaatcataatcatattctattgctttatcattctccccattattattaatgtccacctattctttttcttcatccatcaattgcagtgatatttttcctcatccattaataataagataatgattatatatgagctcaaccactagagtggccaacaattttcctatttcttctattaaatcattccttttcccttatctttaaaaggttaattggaagttaactaaacccttattttgtaaaaggttttaactcaagcctagacctaagccaaaacttaatttataccaatagtccacaaaagcataaaaccattaaaactcttgaataataaggattaaacctcctataaaatatatatatccaaaagcacacaaaggtccaaaatctattaaaatcctttgaatatttgatgcttaggcctcaacaaggtgaggcttaagccttaattgccctgactgaggttgtagcttcaaggctaatttggagagcctcccattgagggtggcctcaaggcatacgcctcaataactttttaaaacactagccttcattcacaattagttttaggaaggatggggaggattcttttcattggaaggtgtttacgaagtggtgcttcttagagaatctttttcaaaagtgctctccctgaacatctattctatcttcaattcttcacattgttggtggttaagggct

SEQ ID NO: 13512 - DNA, 11626 bp, Vitis vinifera
  Intron number 9 from transcript GSVIVT01015528001 (locus G SVIVG01015528001) derived from phytozome v7.0 (chr-ID chr1 1; pos 4528760 to 4540385)
tgctggacaaagcccttcaaactgctgcctaccaggtacttttgtcgaattaattaattatactttagttttaaattgttaaaacatttcttttccattaggtgctccattacaggaaccaaattttcatttatttagttaatgctgcccatatttgtaaacctatgggaaccttggagtaaaattggctagtcttgtactaggtctctgggttccaacactgatgactttggtgcaattattctattgcaatttgtagattgcctctgtgcatggatgttcttcttttacttaatgcattagactaaccattttataatttatacaccttttatgaaaggttagaactattcactgaaagatacaaggttccttcttgcagaaatgaacttttagggcagttgttatttcgtgaaagagagaaaaagattaatatcccaaggctaaagtctctaactcaaatggctatacccttttggatatatttagggaatgctctttctagagttccgagatgatccatgagtgttcctgcaattgttgttgtcatggattacctagagagcctgatcaaaattcagtttaaaagaacccattggaggatgagaccaaatagggagtgtttcctttgacggcctaataaatttattaatgacatttctatctagcaacataatactctgagtgcctcaggtgttacataagccggtgcccagagggaagaggagaaataaaataaatcccataatgctcaaaagttctctatctatcctaaaaattgctcatgtgcctcttccaacaaatagtccatattaaggtgagactagcaatttcccacaatgatttgcctctaggaagacttccaaaaccttggtaagaaatagttagtgtctccattatatctctaggtagaatccagtaaatcttaacaagtttgagcaacctataccataatgtcaacgacactgcgtaatgtagaaaaatgatccactaattcctcacttacgcatggcataccattccagagtgagggccttgtaaaacctccttttctatagcaaataagttgtattaatttttttatttgccaccagtaatgcaaaggtcttgactttcggtatggctttagatttcgaaataaagtttgtgttgagagagagagaaagaagaaaaaccttaattctcattcatctgtttacttacaattgagaaatatatatatacaaggctaggagttctaactaccatacatgtgacctatattaacaaggaaagattatataccataaatacattatattcaacactccccctcaagctggagcatatacgtcatatgcaccaagcttgttacaaatatatttaatcttaggacctctgagagatttagtgaagatgtctgctagttgatcatttgaattaacaaaacttgtagcaacacatcctgatgcgatcttctctctaatgaaatgacagtcaacttcaatatgcttgaccctttcatgaaagattggattggatgcaatatgtaatgcggcctggttatcacagatgagtttcatctgttcatcctttccaaatctcaactctcgaagaagatgtctcaaccatatgagttcacatgttgccaaagccatagctcgatactcggcttcagcgctagatctggccactacatcttgtttcttactcttccaagatattagattacctccaataaaaacagagtaccctgaagtggaacgtctatctgtgggtgagccagcccaatctgcatctgtgtaaccaacaacctgagtatgacctttgttctcgtacaacacaccttagcctggtgtacttttgatatatcgaagaatgcggattacggcatcccaatggctatcacatggtgactgtaggaattgactaacaacactcacaggaaaagaaatgtcttgacgagtaatggtgagatagttcaatttacctacgagctgtcgatatctcccggggtctcttaaaggctcctcctgtcctggcacaagtttgacattcggatccataggcgtgtctaccggtttatagtctaacataccggtttcttccaggatgtctaaagcatacttcctttgggaaaggaccacaccagaactggattgagctatctcaattcccaagaaatacttgagtttccccaagtctttggtctgaaagtgggtaaaaagatgttgctttagtttctgaataccatcctgatcactgcctgtaatgacgatgtcgtccacataaacaaccagataaatacactgccccaaggagttatgatgatagaaaactgaatggtctgctgtactgcgaagcatgccaaactcttgaacaatagaactaaaactgccaaaccatgctcgaggagattgttttaagccatatagagaacgacgtaacctgcacactaaaccagactccccctgagcaacaaaaccaggaggttgctccatataaacttcctcggcaagatcaccgtgaaggaagacatttttaatatccaactgataaagaggccaagaacacatagcagccatggagagaagcaggcggacagaagcaatcttggcaataagggagaatgtctcaccataatcagaaccataaacctgagtatagcctttagcaactaagcgggccttaaggcgatcaacctgaccatcaggaccaactttaactgcgtagacccaacgacagccaacggtagatttaccagagggtaaaacaacaagatcccaagtgccattagagtgcagagtagccatttcatccaccattgcctgtcaccatttcatgggtgctctttggaagagaaacagaggatataacagaaacaaaagcagaatagggtgaagataatcgatgataactcaaaaaattgtaaattggatgaggattacgagtagagcgagtacctttccgaacagcaatgggtaagtcattaggagaaggcagagtcggggcaggtgaagccgaagggataggaagtgagtcaacaggtgcctcagcaaaagggagaggagcaacgacacgagagcgacgatgataaacctgaagtggtcgaggaggcataacatcaggtggggagataatgggaatgggcaagacttcagaaacaggaagagactcagaagtggtggaaaagaatggtgagtcctcaaagaaggtgacatcagcggagataaagtatcgatgagtctcaagggaataacaacaataacccttctgaagtctggaatatcccaagaagaggcatttcatggctttggcggaaagcttgtcctgtccaggagtgagaatatgaacaaagcaagtacaaccaaagacacgaggaggaaggaaataaagtggttggtcaggaaagagaagggagtgaggaatctgatcgtgtaagacagaggagggcatatgattaatcaaataacaagcagtaagaacagcgtccccccaaaaacgaaaaggaacattactatggaggaggatagtacgagctgtctcaacaaggtgtcgattcttgcgttcagctaccccattttgttgtggagtatgaacacaagaagactaatgaagaatcccatgatgagacataaacgaagtaaatggggctgaaaaatattccctggcattgtcactgcgtaacacacgaatagaaatattgaactgggtttggatttcagcataaaatttctggaaaatagagaataactcagctcgatttttcattaaaaataaccaagtacatcgagaatagtcatcaatgaaagtgacaaaatactgaaatcctaaagtagacgcagtccgacaaggaccccaaatatcagtgtggacaagctcaaaaggagactttgcccgattattcaaacgctttgggaacgagacacgagtatgtttcccaagctgacatgactcacacggaagcgacgacaaagtggaaaaacgagggaccatcttctggaacttggagagactagggtggcccagacgattgtgaacgaggagaggagtatcagtggaaatgcaaactgcaggagatgaatccgaggtgaggtgatagaggccttgagactcacgtcctatgccaatcgtcttccccgtactccggtcctgcaaggtcacaaatttatcagaaaatgtaatagagcaattaagagtacgagtgattttgctgatggaaataagattaaaaggacattcaggagtataaaggacagaagtgagaggtagagaaggcagaggaagggccaaaccaatacctttagccacagtttgagaaccattagctaaggtaacagtaggtaaagtagaggtagtagtaatagaggagaaaagatccttattaccagataggtgatcagaagctccagaatctagaatccagggtccaagagaagatgtgtgggtaaggcaggcagaggcaataccaggctgggtaacagaggcaatagaaacctgagatgtctgagatgcggaggagctcggaggttgaggcagcggagaatcagaggattgggccatatgggcagtgcgaggaggccttccatgtaactgatagcaacgatcgcgagtgtggccaagtttattgcaataggtgcaatgaggacgttgacctctacctcgggtaccattgcgtcctcctcgagaggtagtttgagaaactaacacagaagaatctgaagtgctatcagatggcaaagtttgagtggatgagatacggaggaggcgagcaaacacatcatccaaggacagaactgatgaactaccaagaatctgatcacagataggttcaagattcggacggaggccaataagagtaaggaccatgaagaacttgtcaagttgtgtttgttgagccccaacatcaggagtaagaggcatcacaatcaagaactcctccttaagagaggcaatctgaccaatttaagtagatagatccaagtcctgttggctgatatggacaatagcagaagccaccttataaagacgttggatatcattcgtgtataatcctttggcctgagtccaaaatttaaaacaagttttgtaggcccaaagatgaagaagaatcctgggatcaaccgattgccataatacactacataactgtgcatctatcttcctccactgtacgcggtcaacctcagggatatctgcctcctgggtaaccaagtgatcctcatatccttgacccataaaccaaagttcaacagaggcagaccaggaaagataattttcactgccaaccaatttctccgaagtaatcataggagatctagatatgacagaggaaaaaatggaagttttagtagccatatccacttatcttatgtttggatcgaagagagccctaatacgacttcagattgcggcgtggcaccaccgaaaaaagggagacggcctcagatcgcggcgtggtaccattagaaaggtagaagaacacttcccaaggcacgtgcagggattggggtggagaaaaagtaaccggaatttcgccggaaagaatgtttggagggctgacggagacaaaaatccccaaaagaggtacgtgcagggctcggatgggagaaccagggaggtagggatgctggtcggcgttaggcgaggctggaggaggaggcgcgttgccggaaaaggcctcacgcgccctcacgagccggcgggtgagattcagttgccgatcgtaaatgtgcgcgtggccggtgcgtggacggttttctggctccgatgctttgggaaaagttggagatttcctccaggcgctcctcttggtgtggtcggtgttggaaaaagacgtcgtcggaaaagttcgccggcggtgagtgttttctgacgacgatccgactgatcggaaagtattgggagatggggaaggtgatcggaatgaaacacggtcaccggaaggtttcccggagttgatgacacgggaaacaggaaagaattaagttttctcccatggctctgataccatgttgagagagagagaaagaagaaaaaccttaattctcattcatctgtttacttacaattgagaaatatatatatacaaggctaggagtcctaattaccatacatgtgacctatattaacaaggaaagattatatactataaatacattatattcaacagtttgcatggagaaaggaacttgagttagcagaggcacgaaaagctttaaaaatatgaattcattgaaaagaaaccagaggatgtcaaggaccaaattcttagattagggatagtggatcatggaaatacatactaactaaagttgatttaattagagtaagttgttgattgattggggtcttgccaagggaggggagttgtttttggtgccttatctcttttaggttgtgccttttggtccccgttgtatacaaattgtgtattttggtgccttcttttaagagctttttaaaaatttcttttcatttgcctataaaaaatatataaggagagtaagttccttaattttacatcggaaagtgatgatggaaattaaaattccatgacaaagaggaagaggatgaacttcaaattgaagaaacactaaaatctctttccttcaccactctatagagatttggtgattgaacacaaaaagttgatcgcaccatccaatatcatttcagaattgaatttttctaccatcacccattgaatattgggtgaaaagagtgaaattacaaaatacttgtgcaatgtcctcccaatatggcactcttctctagatttatctttaatcttggaatgggtttagacactaataaaattagtttaagacttggtaagttttatagtttttaaaagtgtgcttacaccaaggtgcaatgactcactagttgtagcaccttgcctgttgaagcatgtgtctcgttggaggacacctcatttatttatttttctttcttttttaacacttgttttctttaatttttggttgtatattgaatttatgacattgcataagtttttgttgatgcttgtttgaaatgcttaaaatcttgaatatttttttttgttgtttgaattgaattttggatcatattttattaaatagaaatgcaccataagttgttccttgcttcgcttagatgcatgcttttggttgtgtgcgcactgaacccttagaggacttctttgtcttgggtgcatattaagccttttagaatgaacatggtgtcatcagtgagttgtaaatttgtcaccctcgttatacttctgcctacttaaaaaccctaaaaagtgtcacacccttccactctcaacatcaatgtgctcaatacatttaccacaatagtgaaaagagatggaaagagtggatcacattgtcttaaactcgttaaagaactaacccaagagctttcctgttcttgtaaaggaaaatttctattgtgaaatagaaataggttccttcaataaggatggacttggtgccttataattaagttcatctgtgtatttatgaggaaaaaatatgtagagagatttgattgagagaaagaactttttgtgtaattgaggctttgggttttgtcaatttgagagctctaagggtgttatctcgttgtccaattttggaagttcttcaccatcttaagcccatgaacatggattttaggttgaaccatgtcaattttgtgtgctttgtatggtttatgttttcttattttcttctctatagtaatttttctttgagatgtatcaccatttttttttggtttaaaattgaaggttgaaagtaattttgtcattttgggtaaaaaataattagatccttgtgattgaaagaatggatgtggtattctaacaaagaaacacaatttttttcttggccaatttagagttgtatgaacattttatgtaaaatattggtatttgatatgtttgtctcagctacagttgatactgttgtgaaatatagtggacaaggttcttttgggatagaaaatgttgttgttatttattattgcttttgtaatttcagggggtgagagttattttggttctcttgtttgaattaattggtggaaattttgaagaaaagggccacatatgtgtattatggtcatcccctatagagtgttcacgatgtgttttatttgatgttagaaaggcattttgggaaaaaaaatattgatttttcatattggtaatcctgtgtttattatttattcctctgttgtgcccttgcttatagtgatactaaaaaggcaaaataagttggtgatactaagaatgcagttttccttttaataggaaatgcatttcctaatactacattataccttttttttaagttcctttttataaagacagaaataagatgttgctaatgtatcctaattatcccttaactcaggtctgatagctgtatcaaaatactccttaaccttattattatgttgtgttaatgtctaaaatgtcatgtttttattgttccctttttatgtatgtttctgccttgggttggggtttcatgtggtagacttgagatggtttcaaaccctttttttagtgggatgtgttgtgttagtggaagctttgatggtactttctgtgcaataacataaagataaataaatcaacacaaaatagaaataagatttaatatggttccatgagccatatttacatgaagagagcgactgaatcccctagaccataaagattattataaaggaaagagaacaaagacacagcttgagccttgaaacattccatgtgttcctgctctaatatttaccttctgggcctccaaagaacatctcagtcttgtgactttttgccttcaagacctaggatatttatagatatatttttaaaatttttctttattcaatatggaaatttatttctgaaggaaacatcaatgtaagaaacactctattcaatattctccactaaaaggctttgtcatgcaattgaaaagtgaaccaaattaagaatttgatataccttccaagatgatgtgaggcaaagtacatgcaaggttttccaaaattgtgaaatggagtgatagaatgcatttttggggcttggagccatctttttactcaactgttcttagcaagccattctcgatcatctttgctttaaactgaactataaaatattttttatctgctttgtataatttctgtcattaccaatagaaacttaaaccttggatttattgtaataatttacattcgagtattatttaggcttgtttagcatagttttttgattgatctgattgataaagtattttgacagtctgtttggctatacattaaggccatatttggtgcaactgtagcttttctgtaaaacgcttccttaaagtttaaagtactgagtggacaagaaagcactctgtaaagcttatttaatagtgtaaataggctttagatggtcaaaacagtgtgtcaaatcctttaagacccttaaaagtagaagaaaattggggcataaataaggcctttttttatgaagttggcatcaagatgactttgtagaagaacttaaagcaaggagcttttgattgtttttttttttttttttttgatgggacacaatagtatagtatattaagttaagtaagaataagtacaatagaatgatgagaaatcctcccaaaaaccacacaaaaagaaagtaggaaccttcgaagtacaagcaaatctatacgactatgaggttccacaaaccagtccatgtggggatatacaaaaaataatctatccttgctagcccacacccttggaactacacaccaacattcaatcaagttggatcatattaaggggaatatccttaaaaattgtggtgccaaaggcccaaaaggaagctgagaaatgaattatatctcaaagaacctttttaagttcttagtctcaagtggtaaagggatggggaggatttagggggaggttctaggttcaagtgccattggggacaaaaatttacctattgaaaaaaaagaccctatgaagttcttgccttgtcttaaaaatccctagcatttctttcccaccacacaacccacatcaaagcaagacaagcggactgctacaacaccttgcttgtaatggtcctttccaatcctttatatgggataatcatcatatcacatatactcctataaggaacccaatccttatgagccaagttgaataatctataccatagcctcaaacaatgtaagaagatatgatttactgtttcactactctccatacacaacaaacaaacattaggattgagggcttcgttggatcttttcagttgtagcatgtcattaatgtttaccttcttgtgtgccactaatcaagcaaaagattcgacctcaaatagggcttgcgatttccaaatagaatcagtagggaatgatggaatttgattagtatggttggacatgattgaaaagaatgactttactgtaaataaacttcaagaagataaggaccaagctctcaaattaggaccagatggagataaatgcaaatgagaaagagaggacatgagttttttaagatctcctatctcaaaatcagaaagatcgcgatgaaaatttaaattccaagagaaaggattagtggacccaagaactgatgaaatattgaggttttgaattgtgacacttctaaatagacatgagaattgagaacacaaaggttgatcctccaactacaagtcttcctagaaaagatttcttgtcctatctccaacacggtgtctagtatttaccttccctgaacaaaagctccttgtgtgatatggatactttcattaagaacaccttgtaaccactctgataagactttgactatgaccttacacaaataagtgatcaagctaataggtctaaaattgacaatccttttggtttgactctttttgggcattagggcattgaaggtagcatttgtgctttgagtaactacccacttttgtgaaattctgaaaacaccctcattaaatccttcttaatcacatcctaacactcttggaacacaacaatagtgaaaccattagggcttagagctttgtccttatctaaatttcttatatgttaagtagcattctaaatttaatttttttcatattaaatagcaatatattctttgcacaaatcttttcaaataagcactttagtagaagttatagctacaccaattgggtcctctatgttattgatgttactatgattaaactcctgcttcaatttgtttttaaagttggaaatgttttgaatgccctgcaataggcatttccttataggaggtatattttgcattttcttcttgatagaaacaaaaaaaaaagttattctttaaatttgctcttcattttgaataaaaaaaaaattgctcttcattctatcttttgtttacctatgtttttgcaatgtcgatctcttgtctatatgttgtacaattttttattgtttatttatttatttattcaatatagaaagaatggaaatttattggtacgttttagtgaagtggttgatttttttattaaaatttgttattctgactgtttcttttttcattgatctatgtgcatattttgaataaggttccctttttgttttattgcgattcttgcaga

SEQ ID NO: 13513 - DNA, 10988 bp, Vitis vinifera
  Intron number 15 from transcript GSVIVT01011680001 (locus GSVIVG01011680001) derived from phytozome v7.0 (chr-ID chr 1; pos 5239787 to 5250774)
gcagcaggttagtcattgtactccattttctaaaatgatgggtctagtaccctgttatcgttattattgttgtagctgctgcactgccttcatacttccattgctctctatctatctatctatctatccatctctttatcaatctgtcactcactctccctctctctctctctctctctctctctctctctcacacacacacacacacacacacatatgtatatatagttgttttgcttattggaattctaaaatttttggttgattgagatttgactattttctttttcttttttttaatcagaaacaaaaacataataaaaataagagatcaccagagaaggatgagaaatcctttcctaagttacacaaccttatcaaaaacaaaagaaaagaagtatggtccaaaatacatcaaaacaacccttatgttctgcgtattgaaatccaatcaacttcaataatgttaagaggaatgcccttcaaagttctagtggtagaagcccaaaaagatgaatagaaatagattagaccccatatcatctatgaagtccttcacttgtcctcaaagatatgtgcatttctttcttgccatactatccaaatcaaagtaagacaagtgatttgccatagaaaaacttcgcctctgttagtactccccaaaccatcaaaagaaatggtcaacatgtcttcagggttctaggaggaacctaatccaatctgaatagtctgaatagtgttttccataaccccatagtcgttagatagtgtaaaaaaaggtgatctatccatttgctacattccatctgcctttgtgcttccattgctttgcaacttgttatcatctgcttttgtgcttccatttctttatgctgttattgttgtctattttgctggttggacttgtttaatttttggttggttgagattgaattctaacctacacatcaacaacctagtgaatatattccacccacctctgtacttccattgcttgacaatttgttattgttgtatatctacagttatgttggaacaaagaggcatgtaaagatgcctgaagaaggctcggatttctctttttgttgtagacgcataattttttccttctagcataaaaaccaaaaggttgcagcatagaaggcaaatagaccaaaatgtcttttctaatgctgttttatgccttcttagaaacaaagtgataatatccatcaaaattttatcacatccacatacaaaagagagaaaaaaatgttagtgatcattgttgggccaaatgagcctcaagtctgcctcctgatttccttgtctaccaatctacccatcccacataatgaggaagaagaatatttcatcttatttctttaatgaatcagtacaagatatttatacaagacttctctacactaacaaggaaagaattatgattctctaactgtaccactcctaaaattaagggattggattgcttagatttacagtaaaggaaaaaaaaaatcattatgttagaatctagcctaaattaaatacaaaaaaagtacagatcattctgattctgtagctacagctcatttgactttctaacacagctacaactcattctgattttttaatactccccttggagaatagatattttccattcccagcttgttagtgattgcttgaaatgagtcattagctagtcccttagttaggatgtcaaaaagttgccctcctagtgaaacatatagagtgcaaatcaacccactatccagtttctcttttatgaaatgtttgttgctaaactggattgtgagcaatgttgatggttggctcgttatcacaatataactttattgttccttctcatcttattccaagatcatcaagaatgatttttaactagagtagctcacaaattccttgtgccattgctttaaactttgtctttgcgctcaatctagtaacaactgtttgcttcttacttttcctagtaactagatttccacctaaaaaggtataatagttgaccttcgatccatcattgatcttgcgtaatatacatccgtgtaaatttccaagtttagttagtcattcttcttaaacataattccttttccaagtgtaggcttcaaatagtggataactctgtatactgcttctagatgtgtttccttgggagagtgcatgaattgactcactacacttacaacatatgttatatttggtcgtgtgtgtgtaacaagtagattaatttcccaattaaatgttgatgccatcctctgtttaccactgttgattcaggtgaatcacccaacctatgattctgttcaattagcatctcacttggcttgcatcctaacatccctgcttctttaaggagattaagagtgtacttctgttgtgacacaaaaatgccatttcttgaatgagcaacttcaattcttagaaaatacttttaacttttagaagtcttttatctcgaactccttggccaatcgttgtttaagttgttttatctctcccaaatcatcacctgtaacaatgatatcattaacataaactatcagagtagtgactttgccagaagaaaagtgtttgataaagagagtgtaatctccttgactctgctgaaattccatctctatcatggctttagtgaaccttccaaaccaagctctgggagattggttaagtccatacaatgccttcttgaatttgcagacttggttagttgtaaactttttattaaaccctggtggagcatccatatacatctcttcctctaaatcaccgagtaagaatgcatttttgacatcaaattgtcgcaacatccaatcatgattagctaccaatgataataaaattctaataatatttatctttgtcactggtgcaaaagtctcctagtaatctactccataggtttgggtatatccgttggcaaccaatctaggcttatatctttctaaagtcccataagctctatactttatggtaaaaacccatttacacccctttggtttctttcctttaggaagttccacaatctcccatgttttgtttttctccaaagctctcatctcttcactcatggcttttctccaattctcatccctaagtgcatcttggattgtttgtgggatttcaatgggatttagttgtgtggggaaggctcggtttgatggtgacaatttattaaataaaataaaattagagatgggatgttgggtacactttctagttcattttataagggtaataggtaagtgtaaatcttcaacaatcaaagatggtgtagacgatgacaataaaggtaaaattgaagtttcattaccttttataggattagagtcttggacttgcataagttaaggtacgagtagcttccttcttgagtaaaattgtagtggtggggtgattgaaggatcaatttcctctcgaatttcaccatcggactttgacatgggatgtagaggtgggtcagaattggttggttgagagttggtggtgtcgatagtgcttgtaggagaagtaataggtaggtcaaggaatgtcagatcctcattttcttctattaaagtctccccctaaagatgagtaggataaaaaaactcttccacaaatgtaacactcatagaggtgaaaaattttcttatggctgggtgatagcatttatactcattttttttgttattgaataccctacaaaaacacatttgagagcatgtggattgagtttgctgcaatattgaacatggatatgaacaaaggacacaaccaaacactttaggaggtagtttgcaaaatccatgaaagttagcaaaaaactaagagaaaacaatcattggacttttatggcctaaggccctatagagaagctagtttattaagtgggcaatagttaaaattgcctcttcccaatatgacaggaatatttttttgaaacaataaagcctgggagacttcaaataggtgtcgatttttctctttagcaatgccatttttctatggggtatatgtgcaagaggactaatgaataatgccctccttctgaaggaatgaggatagcatttgattaaaagtatttatcagacctgatagttttaatttggaccccaaattggttgctaatcattttatgaaaaataggaaacacattgctcacgtcaagtttattttcatatgaaaaagccaagtcactctagaacaatcatcaataaaagacacaaaccactgtgcccctgaaatatttggaattcgagaggacccccaaatatcagtatgaattaatgcaaaaggggtagaggactttttattactcataagaaaggacacacgatggtgtttggccaattcacaagtcccacaatgaaaattattaacatccaaatgtgtaaatgatgaaggaaacattttattcaataaagaaaaaggtggatgccctaaacggaaatggtggagccaaatttggtatttattaggtgaaaatgttgaaagatgagaaagaggtaatatatcgccactgccactactagtttcaaggaagtagaaccccacccattccctagcatgtccaatcatccttctcataatccggtcctgaaaaacacaataggatgaaaaaaatgttacactacaattcaagtctttagttatttgatgaatatacaataggttgattaaaagtttaggaacatgtaatacaaatttgagtgtaagagagagtgtgagattaatgtttccttgtccagcaatgtgcaagcgtgccatcagcaatcctgattttttagtgtccaaaacatgggttatatgtagtgaaacaggtagggcagtaggtcatgttgtctgtggtacttgaattgatgatccaagacctagaacaatagtcttttgagactctaaaagaatgagaaatgagatacttacctgactgtgccaaagagcaggaggcacttggcttatctattgaagagagaagggttcgaagtctttcaatcttgtccttgttgaaaccaccattgttggaagtagttgaagcgacatcatcatcacaatgagccatattttgtcctccccgctgatcacttcgatttccaatgcctctgctaaaggattaaggttttccatgaagttttcaataagtttctttggtatgtcgtggcttcttgcagtaattgcaccataggctacctttgtggctggatggttgaggcctctcattttttctagaatctacattgttgttgcttccattatttttaattggcagtacactaggagttgttgtggcaaaggctaaacttttagaagttggattatcaagcatcactgtcctttgtccttcttcagcccatatgagtgagaagacttcattcaagggtggcaaagattccttgccaagaattgggacacatacttgatcaaattccacattaagaccagcaaggaagtcaaaaattctctcatgttcaacaaataattgcaatagggcagcatctttgctatacctcatcttaaaattcttgtagtagtctaattcaagccacaatcctttcatgatattataatattcaatcacaggtacaatacttgtttggtggttgtaatatttgttttggtctcataaatttgagctgcatcacacactttggaatatgtctctcaaacaacttcccatatctcgtgtgcagtggtaagtaacatataaggcccactgatctctggttgcatagagttccatagccatgtctgaagattctggtattctcctgatgatggagattgggtgttgacatttgaaacagggacagtagagattacttctgatgttttagacatgattggtggtaggaatgagaagaaaagaaaaaaatatggaaacaaacaaaagaaggaatagctgctgatggataagcaaaaaaacaaacagcatccctagcaaagaaggttgtgcaatctcaggaaaaaaaaaaatctagcggcaatgaagactaaaagttttcctagtgctctgataccatattgaggaagaagaatatttcatcttatttctttaatgaatcagtacaagatatatatatacaagactaccctacactaacaaggaaaaaattatgattctcgaactgtgcaactcctaaaattaagggatcggattgcttagatttacagtaaagaaaaaagaggatcaccatatcagaatctagcctaaattaaatacaaaaaatatacagctcattctgactctctagctagagctcatttgactttccaacacagctacaactcattctgatttcccaataccacattgtaccttaaacaaggttcctcacctcccttataagagactcaaaatgccaaaaagactagagtgcaacctgacccaggaaatgaccaaaaacagttcctctctcacctcacaatcatgaaaacccccatctttatgtgctaggactacatcactcactgtatttcctcttcatttctttttgtagtctctccttttaaacttacggtcagatgacattttttcctatagacagaaatctaatttggttctttagagttacatcttaaattgagttttcactcctcagagacgcacttatcttattaaattttgctgctgctttgtacttgagacatgataagttgcagtatctggaggttccatccatggtttactaagttgccatttatttaggccttaaagtgttctttcttctctcaatctctgagtcttgctatttatgtagacctcaagatcctctgtgctctcaagttgtttattctcttgatgtgatgtgaaagctttatgtttgttattttgtatctttatatgtggagaaaatttgtatttctcattcatctcttaaaattatacaaccctacaattatatacaacgacaacaagaaagagtaagaaaagaattggaaactaccctattaaagatccttacaaattagggattatatagacaaatatacccaaatatatattacagttgtaatatacaactgtggaagatatacagctgtatatacaattgtaataatcttcacatatagttgtgtatatgactgtaacaagctgaaataattttcaacactccccctcaagttggtgaatatatattatccattcccaacttgataatgatttcttaaaactgggcattggctaattctttctttcattaagacatcaactaattgacttccattggacacatatggtatgcagattgaaagtcattgtctaacttttccttaataaaatgtctatctacttatacatatttggttttatcatgttgtaccgggttatgtgcaatgttgatgaccgacttattgtcacaataaagtctcatcaatgtctcccacttaaatcttcaggttctccaagataatcttgagctaaagcaactcataggttccttgggccattgcatgaaactcttttttttcaagatcatttctggtcactattatatcatccacgtaaacaagtaggacagttactatccctaaggctgggtatttaacaaagaaggtgtggtcaccatgactttgtttgtagccaacggttgtcatgacttcaattcccaagaaatactttagtcttccaaactccttaaggcaccgcttcaatgcttctatttctttaagatcatttccaatcactattatgtcatccacataaacaagtatgacagttaccatccctaaggccgagtgtttaacaaataaggtgtggtcaccttcactttgtttgtagccaacaattttcatgactttgacaaatcttccaaaccaaacctacggagattgttttagtccatacaaagatttcttcaatttacataccttttttcctttcaagtgcatattaaaactaggtggaagatccatataaatttcttctttgagctctccatgtgagagtgcatatttcacgtcaaattgttgtaattcccagtcaaattgggcagccaaagagagtaaaactctcatagtattcatcttgactaccggtgcaaaagtctcatggtaatttactccatatgtctaattatagcttttggctacgagcctagctttatatctctcaagagaaccatctgccttatactttacagtgaacacccacttgcaccctattggactcttctctcttggtaacacaaccacatcccaagtcccattcttttcaagcgcttccatctggccctcatggcttgtttccgctccttactaattagtgcctcaaacaaggtcttaggtatgactatcgtgtttaatctagtgagaaaatttctatgagatgatgacaatctttcgtaggacacaaaatgaaaaagtggatataaaaggtaccgagtacatgttcttgtgtcttttctaactgcaatgggcagatttagatcactagtatcaacaaaattaggagaaatcttaggaaaagatggatcatttaccacataggaagttgttggttctgactcttggacttgcataggtttagtgatggttgctttcttccttgagtaaactaaagttgcctcgtagtattggggacttgttttcttgaaggtggacttgtcggttcaagaatttgtgagtactcagacatagatgattgtgattgtgagggtttaggcaaagatgagggcaagtcaagtaagaacaaatcttcttcacccgtatcttccatgaatgatgtctccccttgaagataaggatgattgaagtagctttcatgttcaacaaaggatacattggaagagacataaaattgtcgagtgggtggatgataacatttgtaaccttttttagtagatgaataccttacaaaaatgcacttaattgcccttggatctagtttccctcttttatgagcatggacatggacaaaagaaacacaactaaaaacctttggaacaagactagtagacgttgtaaagtttgggaagcattttgaaaaaatttccattggacttttgaaccctaaaacttttagttgacaatcaatttataagatgagcaacggtaagtatcgcttcctcccaatatgatttaggagcacttttctaggacaaaaaacctcttataatagtaagaaaatgaccatttttttctttcaacaaccatattttgttggggagtactaatgcaagaggatttatagataatgccttcttttttaaaatgaggagataaaacttgattgaagtaatcctttgcattatcagacctaaacttcttgattcccactctaaattgagttttgaccattttataaaaattaggaaatacagtactcacatctaatttttgtttaacgagaaagacccaagttactcaagtgcaatcatttataaatgagacaaatcatttagagcttgaaatattaggaattgtggtaggacctcaaatatcactgtgaactaacgcaaatggaattgaaactcttttgttacttattggaaaaaaaaaacacgacaatgctttgcaagttcacaaacatcacaatgtaatttttctacattaattcctttgaaaaataaaggaaacataattttaagaacactaaacaacagatatctaaaacgatgatgatgaagccaaattttatcttttgttgtggatgagattttagaaaggaatgataaaggtacctggttctcagtcctattttgattaaatggtaactcaagataataaagtccatcatttttcctagcatgtccaatcatcttccttgtactttgttccttaaaaacacaatgagagggataaaaaatcatgtgacaattcaattctttggtaagtcgatgaatggaaacaatattggtggaaaacttaggtacatgtatttattcaagtgaacttccccttgactagccatagtggtcaaagagccatcagtagtggctattttcttattactaggacatgggttataggtactaaacttttgtgaggaatgaataatatgatctatagctcctgagtcgatgacccaagagcctaggaaagacatatccgagacactaaaagtaagaaaagaggaatacttatctgactaagggagcaacactaggactctcaatgggtcctaggagattctttagtttctcaatctcttccttattaagctcagtatattccttgccaccagaattcaccctctcttgtaaagggttttcattgatctgagggttggttaagtgtgcttgagttctctgttatctacctttgaaaccttgttgtccacccttgaagcccctatctttactcaatacaaccctacaattatatacaacagcaaaaagaatatacacaaatatcctattaaagaattggaaactattctattcaagatctttacaaattagggattatatacacaaatatacccaaatatatattacagctctaatatacagttgtggaagatatactgctgtgtatacagttgtcttcacatacagctgtgtatacagctgtaacaagctgtaataatcttcaacattatactccaatgcttgcagtataaatctcatttttgtggtattcttattttaatggctatgaggaatttgagattgcaagatacaagaacttgaatgggagtgtgtgcgcaattttatccagttctagggcattgagaactttttgctttaaaaaactatgttatataattgtcatcactgcaacagaaaactgagttttatatgcaattttaattatttatttagtgaatcttagtgaccaagattatttaatttgatggttggctgcatttgggagattttgttgagaatttaagtagttaataagtgaaagggcagatcttcaaaacttctgtgtttggagtttatacaacccaaaaaatgtcctttcccttttctaatgtatttatttatttgataaattgagatttatctaatactaaaaaatccactcttttgccaggcagaaacaactgtgatcgccca

SEQ ID NO: 13514 - DNA, 8159 bp, Vitis vinifera
  Intron number 18 from transcript GSVIVT01024678001 (locus GSVIVG01024678001) derived from phytozome v7.0 (chr-ID chr 6; pos 7843970 to 7852128)
aagaggctcacttgttataaagcggtaatgggaaattgctaggggtgtgaaaaggtgcggtttcattggttttgaaaggaaaaattagccgacccgacatggccagtttatgcttaaataaaaatagaactgacctttaagtgatgggaaaaccgaaccaaaccaaatttgtttaaagctggtttggttcattttaatgtagttcttaagttgaagttgatgtaggtcttaaatctaattgatttttaaaaccaacttgaattttaagttcaaaatacatttaaaatttcttttccaaaatataatgaatgcatttaaaaaaatttttgattacctaatgacaatgaataataaagtttacaaaatatacatagtaataaatgtaaaaaaaaattgacatcgaacaattgtaaagacgtaagtcttagaatgtcaatttggttaaacttttattagttaggagactaggaaattaaaaactgaaccgaccttaatagttgttgaaaactgacccaatttgattggttttggttcgattggattgattctatcgattttcacttacaccccctagcaattgattttaatgttataacttcaggctactgcaatattttttcacagttatcatccatagaacacctttagtggatcacacacacaccaaaagaaaaaaaaatgaaccaaagaaagaaaagaaaagaaaagaattcttcctctttgttggcaattaatagcaagtagacaaattcttcctctttgttttatttcattgattatataggatcatagtagttttgtatgctcttggtgtattggagaggtgcccctctattcttgattgacatagtttgtatgtttctttagcttcttaaggtgactgcttttcatactgggttcattcacctctatcaattgagtgtcaataatttgtattgtcaatttttttagtttaacatgacatcataatgcctaaaatctaggcaggttacataaagttaaaattaaaaggggttcaaagtattttattgtcatattaatgggtcattgtctggcctactaggtagttcattagtagcttaacctactagctaagttattgtagaaaaacttggattattccattcctatccttggatctatagggtgcatgcaagactatcctaggggctatgctatctagatctacatagcataagcaatatacatataaaaacttagatctagagaatgagtgctatacttgtgatctgaatgttcccaaatcgatttagttggtgaagagtcggtgcagatctcgaagatcagtagatctttcacttgatagcactctttttcgtagatcctagcacgcgaggaggtgaaatcctctttaatggggatggaggctaggagtcctctctttggaagactaaatagtaagagtagtgtgaagccttaacccttaaggggtttatatagacttccctatgggctgaagtgattggagcccatcttagacttgggtcacttaatctagcctattgtgtcttaattaattaattaacccaatttaaaaagaccattcataagcttttgtacaatcttgtgtatttattaaaatactcatgcataaatatgaatagagaacccaaatatcccttaataaatgtgtcacctaggaatatgagcttaagtggtgaccactagaattgatgggaaaatactggctcctttagaatctaattctaaagttgactcaacatcccaccatagagagttaactacacttcagtatcatatgatattaaaataagacattggaactcaagttcatgacccattatccattgtatgtaaactccctatgaactggtgtccataatctaacgagatgaatgatatcaatctcgcaaggttacctttgacatcctcgagtctcaaatccttttattttgttatcaactaacatactttaattctccaaaagcatatgtcaaattctaattgaggaattactatggccgtagatttcttaattacatgtccttaagatcacccaatgggacacattatctaaaacctatgagatattagagtgtttatcttgagaatacttgttgccgctagcctgaatcaacaataactgaatccatagaaaatatacgatcacctcaaggtctcacctgttggttaaagactttagcattagtttagtatcctctcaaggttgagaatccatacaacatagtagtttggtgaagtcataattatcatgactcaacataagtcttatctgatgtgtaatcacacacactaatgcacttaatatgggaaacccatcttgataaccaagacaagtcatacctccaattagaagttagttcactacaacctcaaatggattgcctaagttcatgaaccagttgtgaatgactcatttacttgcaaggaacctagggcttggattttctgtgtaactcctaatgcacttaagtcatattgttggaaaactgaaactgatatggaaagaaataactttgtaaagctgtaaattatttattagttgtcaatctttgtatttttaggaaaataattgttaggagttattctttccttttaatcaatgatttagtttcctaatttgaaggatttgtatatgctgtaaactctataaaagaataatctcaatgaaagaaaattattcccgtgaaaccctattcttcaacttggtatcagagctagcaatttgcttgccgaaatcctccttcttcctctttttcaatccctgttctctgaaactatgttggatatttcaaacgagtccactattgttcctcaaccttctctgaacaatcccatcatcattgattcttcaaaaatcagtcctaccaccttggaatctcactctatccaaatcaccacgatttgcttgaatggtgataactttctgagatggtctcaatcaattcggatatacatcagaggacgtggaaagatgggctacctgacgggtgaaaaaaaggctcctacagtggatgatctgaactatgcaatatgggatgctaagaattccatggtgatgacatggcttgtgaattctatggaagaagacattagctgtaattacatgtgctatccaacaacacaagagctttgggagaatgtaaatcaaatgtattctgatttagggaatcaatcacagatctttgaattaaccctcaaacttggtgagatacgataaggggaggacaacgtcacaaagtacttcaactccttgaagcggatctgacaagaccttaacctcttcaacacctatgagtggaaatctgccgaggatagacttcatcataagaagaacatggaagacaatcgaatcttcaagttcttggctggccttaatgtcgagtttgatgaggtaagggggagaatcattggaagacaacccctgccttcaattggtgaagttttttcagaagttagaagagaagagagtcggaggaatgtgatgctgggcaagaagggacctggagttgctattgaaggttcagccttggttaccacgggtggaggctataataaagttgttgcgtttcagtgcaaatcagatgaaagaccacgggtttggtgtgatttttgcaacaaacctcgccatactcgtgagaattgttggaaaatccatgggaaacctgcaaattggaaaggaaaaacaggtgacaaaccaggctgagccattattcctactgctaatgaggctgagaccagccctttcaccacttagcaaatggagcatcttcttgcactgctgaaatccaacttgacatctggtacttttagtgtttctttggcacacataggtaatgaattatatgctttatcttgtcattttaaatctactccatggataatcgattctagagcatccgaccacatgaccaattcctcaaacatgtttgaatcctattcaccgtgtcttggaaataaaaaggtttggatagctgatggtaatttctcacctattgcaggaaaaggtctaataaaaatctctaagggaatagatcttaaatctgttctccatgttcctaaacttacttgtaatctcttgtctgttagcaaattatctagagattctaattgttgtgttatcttctatgaatcccattgtattttttaggaccagagctcagggaagacgattggcaatgctaggatgatcaatggtctctattatttcaaggataatttacctagtaataaaattgctcaaggactaagtagtattagttctctttctgttcgtgatcaaataatggtttggcattgcagattaggccatcctagtttctcttatttaaaacatttattttcagtgttatttcaaaaggttgatcctttatcatttcaatgtgaaagttgtttattggcaaagagccaacgaaaaacttacattccaaaaccctactatgcatcaaaaccattttatctttttcatagtgatgtttgaggaccttcaaaagtaaccacaatttcaggaaaaaaatggtttgtgacctttatagatgaccatacacgtctttgttgggtatatttaatgagggaaaaatctgaagtcgaaaggatttttaaagaattttatagaatgattgaaaaccaatttcaaacaaaaatcagtattttgagatctgataatgggactgagtattttaataaagttttggaaaccttttcaaacgagaaaagaattttacatcaatcttcatgttctgatacccttgaacagaatggaataaccgaacgtaaaaataaacacttattagaagtagcacgggctatgatgttttacatgaatattccaaaatacttatggggggatgccatactaactgcttcatatctaatcaataggatgcctacaaaaattttgcagtataccactcctttggagtgcttgaaaaaggtatttccagaatctcgaattaattctgaattacccttgaaaatatttggttgcattgcatatgtacacattccaaaaaggtcaagatctaagttagacccaagagcagaaaaaatgtgttttgtaggatatactcctaataaaaaggattacaaatgttttaatcccctttcaaaacgtttttacacaactatggatgtttcttttatggaaaatgtcccatatttcaccaaaaatttacttcagggggagaaattagtggaaccaaatttttgggaaattgttgaacctttgcctagtgtaattcttgatatctctcttgaaaaagaaaataaggaaactagcctattgaatccgaatctgaaattggtctgtcaaaagaagaaatactatgaatgaaaaaaaatagaaacaatcttgagcctgtggttcattcaaggaaaaaagtccctggaagaagtaaagaccagccgatcatcccaacacatggtcaaccgaaagccttgagcaatggctctctaaatgtctcaggtaaccctccttttattcctactcatatacatgcttcttcttcttctgttattgatctaagtttaccatcacactttggtccaagtccagaaatatctgcacccaaacccggtttaggattaaccccaattgttcctgcacaggaccttgaccttgatctccctattgctcttagaaagggaacccgagcctgcactaaacatcccattgccaaatatatctcctatagtaacctttctgacaactatagagcattcactacaaatatttcaaaacttgtggtacctagaaatattcaagaagcactagatgaaccgagttggaaattggcagtgtttgaggaaatgaatgccttaaaaaagaatgacacttgggaggttgtcaatttagcaagggaaaaaaaagttgtaaggtgcaaatgggtgtttacaataaagagtaaaacagatggaagtgttgagagatacaaagctagacttgtggcaaagggttttacttaaacctatgggatagactaccaagagactttcgcccccgtagttaaaataaactcgattagagttttgttgtcccttgcagtaaattccaattggcccttacatcaattggatgttaaaaatgtctttcttaatggaaacctagaggaggaagtgttcatgagtcctccaccaggttttgaagaaagttttggagttgggaaagtgtgcaaattgaagaagtccttatacggacttaagcagtcgcctagagcttggtttgagcgctttggcaaagtaataaagcattatggatatactcaaagtcaagctgatcacacaatgttctacaaacattcaaatgaaggtaaagtagccatcttaattgtgtatgttgacgaaattgtgttaactggggatgattgcaatgaactagagaagctgaaggggaaacttgttgaggaatttgagattaagaacatgggggcattaaaatactttcttgggatggagtttgctaggtccaaagaaggtatctttgtaaatcaacggaagtatgttcttgatcttcttgatgagacagatatgttaggatgtaagcctgttgaaacacttatagagccgaacgtaaaactgcagcctacaaaagccaagaatgtgaaggaccgggatcgttatcagagacttgttgggagattaatttacctatcccatacacgccctgacatagcattctcagtgagtatggttagtcagtttatgcatgcgcctggaccagagcattttgaagctgtttacaggattctaaggtatctaaaggggacaccaggtagaggtcttctgttcaagtcacgaggacacctacaaattgaaacctacactgatgcagactgggctggaagcatagtggatcgacggtccacctctgggtactgttcatttgtaggtggcaacttggttacttggcgaagtaaaaaacagaacgtggttgctagaagtagtgttgaggctgagtttagagctgtgactcatggtatttgtgagattatgtggataagaagattactggaagagttaaagatgacaggttcatctcctatgaagttgtattgtgacaacaaggcaacaatttcagtagctcacaatccggttctccatgactgcaccaaacatgtggaagtggacaaacatttcattaaagagaagatagataacggattggtctgtatgacctatatccctactgaggaacaagtggctgatgtcttcaccaaaggactacacaagaggcaattcgattttctagttggcaagctggctatgaaagatatctttaagccagctagagggggagtgttggaaaaccgaaactgatatgaaaagaaataactctgtaaagctgtaaattatttattagttgtcaatctttgtatttttaggaaagtaattgttagaagttattctttccttttaatcagtgatttagtttcctaatttgaaggatttgtatatgctgtaaactctataaaagaataatctcaatgaaagaaaattattcccgtgaaaccctattcttcaactcatatacaatgctagagatgttaaacctaaatgctttaatagtgtaatgcatgaatatgatagataaaagggaaactagaattatattataaataataaattccttttttgttaaatcatgtcatgcttttaaagtctctatcctaacaatcaccttgctaagtaggtaattattttgaaaatagtttatgaactacctggttgcttggtagttgtattatccattccaaactagcatggaatgcaacgctttgtggtctatccttaatgttggtttggaattgaacttggcattgttatatttgattaacttcttagtgattcatctgaagtatagattgataattttcttttccttttttgaattgagtagtagcatatgatttgtatttataataggaattagggccatagagaccagggaagagaatttccacttcataaacaagatttagttacactctggcttgcctgatgatctgctgcatcatgtgcattgcatatagcattgcaatcatgacagaagttaatatatgctatttgtgtgattgttacccttgaaaatgatccatatacttcccatgcatttaattgttcttactttccatgttcatattccagccctttgacagcaa

SEQ ID NO: 13515 - DNA, 4953 bp, Vitis vinifera
  Intron number 2 from transcript GSVIVT01033508001 (locus G SVIVG01033508001) derived from phytozome v7.0 (chr-ID chr8 ; pos 20183149 to 20188101)
caccaagtttttcaggttcagatcttcaccgatctaacataaatattttgaaatgcatctattttttgctaatatgtataacttataataagaatttattttataattaaaggctgtgtaatgaacttgtcattcatagttgttatacaggttcatactccctttggctctaatgaagataacaaccgctgttgaacagaatagtgctatttatttacaaaaatacagaaagataaccttttccaggctataattggtgcaatggagcattttggcactgacaatttcttcttttaactgttctatgctcctccttcttatgattcaaataagcgtcttcattttcttcccactaattcactacctaagataaaatctaatgataattttttttcccttctagtagattgatgcaggtattagacttgtccttatattgttaagctaaaatataggtaactacctaataacatatctccatctacgaggtaaaacttttgtagaattgcattttaatgaattttgttacttcaataagttggatcattgtctcgctctaatgacagaggatgttagattcaaagtggtaaggataaaagctagcataggtatgtttgttactttggtcagcacagcaatagtctttttccttcctactttcacaaaggcatctttgacaattttcttagtttggaattggaatgtgagtctgtatgtgcatattgtttagttcctatttttggggttgggatttgttggggtttccctgtcatgcttggcacttggcatgcgttgtgcaccgatattttttttacttttttcctttcagtagcaagcgagagtaaaacagagtatatggaagctgcataaggttgattatcaaacataaatggtggattgaatatgagattgcatagaaatcggagcaggattgtcaaattggagaaatatttcaagaatgtttgcggttattgaacatgcatcaagttaaagggtaaatttgaaacaaaaagttgactgttatgtgaaggctaagaacatgtcaataaaatgagttgagccaaaacaaggatgccacaatagattagtgacaaaacatagaataagaaataaatgcatgcaataccatttgcatgcaagattagggagcattggttagatttgaacttctgcaatggatgcctacaaataatgagtcggaaggagctcattcaagatgaggtgcatagactttgaaagcaagaccaacagataaaagatatgacagttctgagcttcagaggacatgacttaaatgagctgaacaatggatggtgattcttctagccaaatctaaataattagatttaaggcttttgaacctgaatggaaaataaccctcctaaaccacttagctttggtgcctctgaaactagtaaaatttggtttataagaatagaagtcagcagccttgtccctctttgccagacacttttaattaatatataaattgtaatttttattaaaaaaaaaaaaaagaaggaaaaggcactggctgtcagtctaattcccacttgcatgaagaattatcaattagttacaggtggtgggaaatggagaaatacatccttcacatatttgcttctagtttgcatacaatgtgaatggcatgagtaggggtcttcttttttggattcaacaagtattaaccattttaagaaccatgctatgttagtgctttagaaactagattaaaatttttcaaggaaaatttttgatgtattaatattaaatctttttccaagaagggcttgaaggatccatttttccaaagattaaatgagcatctattggtgccattaacatgattgtcaccatgtgttatcccactaatgaccattgctaccattgccattgttagcgttgccatttccttttattaggtaaataagcaaatatattaaaagcggaaggaaaaggtgcaccaggtatacatggagtatacaaggagtgtcaaaatgcaggagaaaggaaaaaaacaaacaaacaaacaaacaatgcacaatccaaaacaaagacaaccctatggatcatagaaatagagagggctcccaaacgacttaacccagtccacattttgctatctgatgagggccaacaaaccacctagaaaaagagcaacaacaacctgtttcaccaaaatctcactcccccaagccactacctgacacacttatcagtggtcaggacactcagaaaccagatcccacctgcacttcctgctcctctcattttcacttgaatgattgtagttaatgaagcattccaactttcaaagctctctttcaaagcaagaagcagaggaaggcctcctctgaatactcgagcctaccactctatgacaccctttatgacttccagctttctcaaagccttccattggcaaacccaggcactcactaaaggagacaacatctcagggaagtccaaaaccaaacctccattggaaaatagacgcaaaagcccacaaccattgcccctactttttattgaaacccctcattttgctccctcaatggagcaacgcgattagccatcgccaacaatgcaacccatctttgaacatagaagaagaagaacaaggcgaaggggaagttctaccccccaacatgaaagcagaagaaaaatccttacccttaaaaccatctgctgggcatctgcagatggcgatcttacctcaaggctttatgctattgttaagatgtaaggatctgggagaagcttttggatgaccttaccttcaaaaaccatctgcttcaaacaaaagggcgtctgcagatggtgatcttacctcaaggctttgtgctattgttaagatgcaaggatctgggagaagcttctggatgaccttattaccttcactagcaagaagcatggcttcttaagtacacttttgggtccactagcacacgggtcctcaacaagaaaaccatagcccaagtctaggagggtaaccctcggatcaaagatgaccggcccaaagaacaaccccccaacaagggaggttgggccatagcaacagaagaaaggcaaggcctaagaaacttagggccccccacttcccacctcccgaccccatcaccaccacaaatgtcaccatcttctccatggaatcttcaaataaatgggtttctatcattttgtttgatacatatacagattctttgtttcaaaatcttctaagcaatttcaaatactttatctacgataatctaagttaaatttggtttgagattgagtaggtacttgctatgtgatgcttactggagttcttaatgtgatttttgttctagcattagtgtaattcttgaaggaaaaaaatagatgtactatttacagttttttcaaataccgtatctacggtaatctaagttaattttggtttgagattgagtaggtacttgctatgtaatgcttactggagttcttgtattagtgtaattcttgagggaaaaaaaaaaatagatgtactatttacagttttttctcaagtaataaaatgaagaattttgttaggagaaatggagaaaacaaggttgaacagtgtgtccttttcaaagcattacacaaccaaagatacaaggtcaaacctcctggccaattgttggacagtggtttaaacttccatcagaaatgcctttttgttcttcaaatataattgctccttgtttgcaaggaagtgagcatcaatattggtggacctctacctacctattttcaatttgtgatgtattgagaaatgcataacttccctaatatggtggatgatccaccatggccctgaattattagaagtacccatcttataatggaggaaggaccctcctgaccatcagtctatcctaaccaattcatgtagtagcttccttattgtaataattattcttcagaagagaagttctgcggataatttgattttcactctctttgaatcttattttatcatacacaaaaatcaaattaaaatgctgataagacataatttactttgtgttcctgtttgccacatttcatttacgttaacaagcattaagtataaggcatccttgcatttttcttaaagtcttgaaagaggtcctagagtttatgctgagttcctttttcttttcatttattttttgactgaatgaaatgaaatggagctaagttaaactccatgacaggatgttcctgctcactcgcaccatgaaattgagacagttgatttactactttgtaatttgatgaatgaaagttatcaaaatatgattgatgaatgaaagttaaccagagaaggatgagaaatccatcaaaacgtgttgacattgctatcttaatccttttgatgtacatattacaatccaataaagttgaataatgttgagaggaaatgcccttgaaaacaatagtagtagaggcctaaaaagatgaatagaaatagactaggagggggtgtttgtttttttggctttttgctaaaagcaatttgttttcaaaatttagattgtttgtttttctactttgtcatgacttgttataaactttttgctgaatagaaaaagccaaaatatttggttttttctaaatagaaataataagatattggtttttctttattttttattacttaatagaaataaaatactacaaaaacaaacaacctaatacttaacactattaagcattaaagttctatttagaattaagtaaaaaaacaaacaccatctaggtctatatcatttttttttaacaatcctttattctttctgatgatgatgctgtaagatctatttttgtttcttttggttgagttgttaactggggtattggtatctcttggtgcatgggattgccacatttggtcttagtctgattgggtgcattattttttgtaatgcagcacctctggctgtccttttggggagagctgccact

SEQ ID NO: 13516 - DNA, 14548 bp, Vitis vinifera
  Intron number 3 from transcript GSVIVT01020088001 (locus G SVIVG01020088001) derived from phytozome v7.0 (chr-ID chr1 ; pos 10434519 to 10449066 reverse strand)
aagttgaagggtcaattgcacagtaccagcaaaaggtaaaacttattttgtttgttaatttggatgattttgatatgcgtttgattttttctatatgaaatttctgttagatctttcagttacctgtgcatattcaataggtggcattccatgattgttgttttggtgtttgtaccaaatctgtgtgttaaagatatgaatttatgggcatctagttatttactcatttgatggatttgtcacttcctatgtgtggtgtttgctggcctctgttttttagacattgagcaatccttatgtagattttagatcaattgtttatgctgtatttttttttttttttttttgtttctcattgtttggattttcccatggctattttgttttctgaaaagcttgtttgccaatcagatgattggtgtctctcttaaacatttaggatcggtttggaataaagagtatgaggggaagtacgaggcaaggaaaattaatgaggaaaaatggaaggaagatataaaaattggtttaaactcaatgaagttcttacatgcttcagatttatttctctttgttccccttttatataaagcatgaagaatctacaaatgtataagtctcaaaataatgttaattacattagattttccttttcttggcaagttccacggtaaaccaaacaagagattttggattcccgcctttttgtttctttatatgatattttaagtgatccacatggagtgttaaggtttttatggattatactcatgataaatggattgaaataagaggttcttgttctcattttttttttctttagtgagagaatggtttaatcttattttaggctgccccttatccttggcaacagagaggtacttgattgggagattattgaaatgatgtattgccattttactggattggaatggtgaaaaatgattacttttatgagcctcaaatagaggttaatgggaagtaataactaaacaatttgcttatttctaagctaagtttgcaaaagacgaggtttcctcgagaaatgttctattttcattagaattaatcgatggattgctttgttgtgaatcgaaatttgtgcatcatttgttttacttctaggctttatcttgctgcctaggaaaaagaaaatcaaggaagggacaaagggaaatccatcaattttttgtttttctattgtaatataatgttgaaaagaaattaatgaataaacccaaataatgacttgattagtgtcttaaaaggctattggcgcttatgccttgaggtatacatcaaggtgagactatgcaaattagccttgaggttatattcttagaatggggtaatagagacttaagacttgccttattaaggcttacaaccttgaggttataaccttgaggctatgaaggtttcaatctcaaatatgttcaaagggttttaattggtttagggcctttatatatatatatatatatatatgtatatatagaagtttaagcctcaacattcaatggttgtgatgggttgtgcttttgtagggttttggtatagatttacaagctttatcttatgtttaaggctagggttaaactttttacaaaataagtgcttagctagctacaaattgaaatagaaatggaaagaagtgattgagtagaagaaacaaaggaattattggtcactatagtgattgagtgaccaataaagaggagaagaatgggtggaccaataatatatgatcatcatcttattattgatatataaagaaaaggtatcactgcatttagtggatgaataaagaggagaagaatgggtggacattaacattgatggagaggatgataaaagtaattggacatgactatcattccttggagggttttactaatgatggtgatggcatggattgaaaaatcggtttttatcggtgatatttcgccgatatattagatatcggatgacctcgaaaggatattgagcatcgattatcgaacgggaggaatgttggaaaaatcgccaaaatatcggcttggaactgataaattggcgaaaaaatcgagcgtgaaacgacgtacagagcagtggaggaagtctgttaaaatatcggagatatatcagatatattgacgaatatatcaaatatatcaccgatatatctgggaaatatgggagatttttttgaaagcttttttttttaaaaaaatatttgtccttttttatttttttattattcatttttaatttattttttattttaaatcttcattatcattttattttaactactttttatatttatctcattaatgctattttaaaaaattactatcatttcattttttttatgcgtttaattttatttaattttaaatgtttttattttaaaatattaaaaatataattttactcaaaaattgctacaatataaaaaaattaatgaagtcctaatattctataaattaaaattaattcaataagataaattagtaataattttaattatttaaataaattaatgttaatagaaaaattgtcacttgtaataaatttttagaaatcaaatctcaaataaatattttatataaatcaatttaattttttatttaaaatttaataaaatgtgttttaataaaagtattttaatttttaaaataaatgaataatatatattaaaggaatttatcctaattttttataaaaatttgataaatattatatgtacgattaaagataatatttatcaaatttttataaaaaattaacattacttacttattttatcatttttttttagatttttcaagtatttttgtgaattttgaataattttcgtctcatcgatatttttgttaaaatatccaccgatatttctcctatattttcgatatattcataaaatccaagtaccaatatatccgtatttaccgatattttaatccttgggtgatggtagtattgaagattatttgataaatccatgagaggggagtttaattttagaagactaaagaggaacggaattataaattttagatagtaacatgcaattaatttgattattatgaattgtataaccatcttattttctaatttttatgtgattttattagtatttttctgatttttgagattttatttattatttatttatttagtttaatttgaggcttatgctttgctctgcctcaaggcttccatttcaccttatttggtaaaagcaccttttaaaaattgaacttgatatttttttttaaaataggtaaattaagagtatataaaaagtgtttggaaaatggcacaacaaagtgctcaagtagtatacaaatgactccatatggcaagcaaaaaagaagagaaaacaacaaatatcaattaccctaacaaaaaccagccctctaaaccctccctcgaaaactggactacccccagtagaccctcttgacactaaaactcccaaaaccaagaaatatcccaatcctagaccaaatacaatctccccttgagcaaatttgcaataaaaaaccctcaaccaattcaagagcaaagttcaagcaacctcacactaagaaagcgcagaggagacctattgtttttgctaagagagcgtcatttactcttgaaacctaccccgctaaggcatcaccttcaagtgagcctttccactatctcctcatccactgccatgaagccaccataggcatccccatgcctcttaaaaaactttgttccccatagatgcacttgtagccttaacactcttacccaaacttcgctatcacaaaccacttctttggaacaaccaacatctagccttcactagtctaattgcaaacttcttcccttatatagaatgttcctcatatgccattccctattggcttcaaaaacattatcaaactcaaataatattgggaaattcacatcaaaccaacaatttccttcatgggattccatcacttagcaaaaccctagaaccctaaccaccttggcttcaagcttccaatgtaacataaggatattataatatactctagaactagactaggaaccccaaagcccaaaacagactcctatgggaggcaatagtggggaattttctgtaatggacgaaagccttgttaaccaaaaattgatatgttcgactttgtggagtagtaggctctaagtaaggcgtggttgggtttttggccagttgacatccttgtatacaacatgttctaggccttttatggtgtcgtttaacacaatcaatatttaccaatcaaagaaaaaaaaagaagcaagaaaggagcttcaatgtttaaggttgtttcataggagatgttatttcaccttgctgttgagttgtgctctaactccacctttgtttttcgtaagcactctattttgttctctctctctctctctctcttattgccctttccaccttacttttattgtcaaagcaccctctttatttcattcactatgaggaaattttcttttgctttctcctttgctactttttttttccccaataagtctttgaaaattgtgaaagaggttgtttcattctagattaacttagatctcctagatgaccctcatatcaacaaaaggtttgcaaaagtcatatttttgaaaggtgcaaggctcaaaattctcctatagcttaagcgtaaagcgcacctgagcaaaatgaaactgacttaggatgtatatcaattttataaaatataattcaaaatctaatccaattagtaaataatttaaaattccaaaaaatgtaaaagaagcattcaaccataaggtaatgaaattatataaattttaatatatagttagaaattttaagaattaaagtgtttaaaaggaacggtaaagtggatgagacgtgcctctccaacaaggcgcatgccttggcaagtgaggtccaataactcgggggtggttgtgccttgggcttaggcacactttcagtgtgccttttaaaaccaggacaaatgttttgaatttaccaggttattactagagcatatgtaacagttacttggagctccttaagccttcattcttggaattaaaagatattatttcaccttgcttttgagatgcctctctctcccccctcctcatcccctctactgccttgcttttatcatgaagcagcctccattttatttgctctgaaaaaaatcttcttctacttcatttttacccattaaatttttgaaaattatgaaagaggtggttttgcaacttccataagaaaattttcttccattctaggttaactttggacattttagagtatttctatgactctattgttgacaaggtttgcaaaggttctaaatttactagttaattttagggcatttgtaacaattaattaaagcttaagccttcaccttgcaacttggtagatagtatttcaccttgcttttgagatttccaaacctttgcttctattgtaagcacccgcccttttgttctctctctccctccctccccacccttcccctaaccttcctccctccatgcccccctcttcctcccctttcccacctttcttttatggttaggcaccctccattttgtttgtatgaataaaatcttcctctttctttcccaataaataattgcaaattatggcagaagttgttttgcaatttccataagaaaatagtctttcattctaaattaactttggaccttctagtgactctttctattactctttacattgataagggttttacaaaggtcctgaatttataagtaattattagagcatctgtatttgtttttttgataagcaattataaagaaagctctagaaataggtgctgcaaggtacacacggtgtttgcaaagaacgccaaatcaggtaaacaaaaaagaaaagggaacacaaaaaaccaccttcctctcctttaagctcggccaatgtacaaagcctactattcatgtagcatgatcatctatatacaatctagcctaattcatacaattatacatgaaggaagatttaatcacttgttgtgactgctctacaccttcaaaataccttgtgtttctttcctttcataacatcccaaataggcacaaaggagcagcctccaagctttctttctcttctttcccacaaaagaactatgtcaacttaaaagattgtctttgatggagtagtgcattacccatgccacttaaagcttctcaagccttcattcgttttaccttgcttttatgtctctctctccctctctttctctctttccacttccccccaccttgcttttattgttaagcaccccacatccctaattttgttcgctttggaaaatattctttgcccttctcctctttttttatttttttattttttttataatagatttttggaaattgcgaaagaggttgttttgcaatttcgaccagaaaatagtctttcttctagattaattttggccttcagtgactctatgtggcctaatattgacgatggttttgcaaaggttctgaatttacgaggtaagttttagggcatctgaaacaataatgtgaagcaccacaagccttcattattgtaacttgggaattgttatttcatattgctttcaagatatctctcttcccccactaatcatcctccattttgttctctatctctttgcccctcctccccatgtttttattttcttaatcacacttcgtaggctcaatctgaaaatataaacttgtcctttctcatttttcaacttttcttttcctaatatatatattttttaaattgcaagagaggttgttttgcaatttttacaggaaaataatctttcattgtagattcacctttggacctcctagtggttctttctaatatcctgaccttgacaagggttttcaaaggttctgaattgattaggtgatttttagagcatctgtaacaatcatttgaagcaccttaagcctttattatgcaacttgtagcattcttattatgcaacttgtagcattcctttatgcttgctatttatatgccaattgacataaagagtaaccacattttgtggagttgatttgatttgatttgaaagcattggtggctaatggtacaacctcctcttagtagagatctcaaaggaggttattttgtatactgctatctctggcccattgttgagaagattgaccacaccaaattcatatgaggatttcttccaagtccaatacatgttgaagataaactgtaagtcattgtctgacagttcagattgatagagtgcaggacatagttcagattgatagagtacaggatattctctgatgatattaaggtgaaactgattattgctcaaaaaaacagacataattcattctcattggaggaatgggctctgaaaaagaaatcgctttgtaattaagactcctttatggtatttaatctgggaaaagtggcttggtggaggagcttaaggtatcaaatgctgacagttggtttatgttgaaagttcagattgggagaataaatggaatccttgagggttatttaaggcactttaatgaaaatcagaacttttggagctgttggatgttgtttagtgctgctattctggaactttagtccctttgagtttgttcatggggcagatatctgtccttttaagcactatatagtttgtgaacctgtttttttaaagtttttgaaggctagaaaggtcattgttgcgatcagaggagttgccttgtatttcttaaaaattcttaatcttgttatgtggccaaacctttgtttgattaatggaaagaaaaaaaattgaagattaccttaggcctaccttagatgggaaggggttgaggcggtgatagtggggcttcttggatcaatttcaactaatagtttttcaaaaaggaaaaaaaaagttaaagatcataataatatatgaataaacatgtgaatatttttgttttaaagtttagtatgctttccaacatttctaaacaaaaagagcttcagttaactcttttgcaataatatgtctagaggcttatgttggagatgttaagttgaaggacatgcttttatttatttactgagtaggaaaattagagatatttagagtggccccaataaaaaaaggaacccaaaccatgtgcacgcagaccatacaaggtacaacctgacccctccttaaacttctggtgaaatctagttggatacatttccaacctttgcacagggattttagaacgatgtatttcattgctaattttgcttatttttagcctttaaaaaacctctgattacaatcttttcgaatgcatcaagacaaatcaagggttgccattctctacatgcgctttcaaccgttaccaacaaagttgatgttattttatgcaatcctttgcatatcaaaaaaggaggaaagaaaaaaaatgaaaaaaacaaaaatgcaaaaacgcaatatgttcctcaccaaggaagtacctaaaatatgagtaatgaagacctcaaaaccagccataatggagaacatgtttctccttctcctccttttgcttagatggatatcacctgttaacaagagtttgttccatgtcataagtttatgtagttgttatctttccccaaactacctcccaagcaaagaagtcattagaaggagcccatgagttctcttcttcctcagctgggagcaagaacatggctgcatacgacaagttgcatgccctaatgtacacaaatagtttctttctttttttttttttggttttgttttgataaataagaaaacatattagagtgctaaaagaacttgcgcatgggagtacacaggatgtatacaataggagtcaagcggcaaaacaataacgagggaaaactgaaaattactttccctcaatagaaatccatctaatctacaaaatcaattaaagacatagctttcatctatgtacaccttaagatctagatagagattattgaggaaagtgcttttcagtgtttggtttgacaactcctcatttttaaatgattttaggtttcttcccttccaaatagtccagaaaaggtgagggagagcggttctccatgcattcctttgctttcttcccacaaaggagacatgtcatcctaagagtttccataaccgacgtataaataacccatgaatactgaattatgagaacaatggatgcctctctacaaagtgtgcacttgtttaataatgacaaaccttttctttgaagctggtctaaagtcaataccttgtctcccaagcaaaaaagctcaccttagatagaatccaggggtttaaaattatcccaagcggaaaaggaatgacatagtttggctccaaaataggctttcaaagataaactccccttgctatcgtacttccataccacattatcctcctccctattcattgactttacttgaagtttagaaaaaacaactctccatggtatctgactcccaatcatttaaattccttgcaaaatgaaaattccaatgtcctcctttcccttgctcccatacatttgccacctacgcctctttcttagctaaggcaaacaagggtgaaaggcaatgcataaaggctcttcaccatactatctatccttccaaaattccactcttcttctatacacaaatagttgattagatgtcgtaacatttcaaagtgatattacatgggggagaccaaccacatatgataatgttaaagagttcataagaagagaagttaaaactcctttaataccacataagggaagggatgtaatggaaaggacatgagggagagagttgagtttaagcaaactgtttgaactcttcatcattgggtggattggatggaaatgatgatgacttgctgccatgttttaaaaggttattaaggcttatgcctcgaggctcaccacccatatactctataactatttgaagtcttcatcattgtctcaaggcaagaccctacaaattagccttgagggtataaccttagttagggtaattgaggcttaatccccaccctattgaggcttatagctttgatgctatagcctcaagattgttgaggcttaagcctcaaatatctaaaggattttcagcctttatgggcttttaacaaatattttataaaaggcttaagtctcaatatttaatgagttttaatgggttctatcatgtatgcttttgtggatttttgatatagatttcatgaattttgtattgagtccctacttggttaaaccttttacaaaataagggtttacttcacttttaatttactttttaaatgaaagaaaaaaagagcgattgagaagaataaggaaattgttgactattctagtggttgatctaatatataatctaattattgatagataagaaaagataccactacgattggtggacggagaaggaggatgagcggatattaataccaatggggagggtaatatagcaataggatatgattgtattccttggaggatcctagtgatagtaatagtaatgttgaaaattatttagtaaaaccatgggagagagctaaattttatgagagaaaaagaaactaaattagaactattaacaatgaaaataattaattttatcattatgaagtttattttctttttattactcaattttattgtgagtttatgagtattttttaaatttttgattatttatttgttaaagttgagcttactcctcattctacctcgaggcttacaccttgtcttatttaggcaaaacacctcaagactgtcgtctgttaaagcatttacttgttgattatgagctttggtttatgtctttcttttcttctctttttttctttctattctttttttctttctttcttttttaaaaaaaattatttataggtaaatagtgttcatagaaagcagataaaaagggtgaaccttggtatacgactagattcttgagattaggatgatatttgctttcttttggttttaagatcaatagcttagaaaaatgcactaatttcacatgtctcaatggactgaaatagtcaaagaggcacagttctccattaaaccatcttaccggttaacaaagaatccttttagataggaaccaagatataccagaagcagagagaatacaatggttcagagtattctagccacctttcctatcaattgaaacctctccatgagaaaccaaaatgaggtggtcttggagttagtttttaagccccactccagatgtgaagcaaaatgtctccctgatggcttgttgaagcccctcccatatgcttagaattttgccctattctgcagccctgaatttctcctccaccattctccttcagatcctatccaatttatgtgtcaacctctatagctgctttcctaacaatgcttaactcaaaaatgagcaaattgttgttctctctctctctctctctctctgagccaaccttagaagtttgagcatgggttctaaggagagtggtggcaaacaagagagactggagtggtgcaaattacttgatcttaggtggatagaagatcacttgatcatatatgctcttttttcccctcacatccgccatcaacattcttaagaacctatctctgtgtgaaattccaaaaccagtaccctaacaatgcttagtataccccctgtatacttgtggctttttggcccttttttaatatattttgttgtttagctatcaaaaaaaaaaaaacaatgcttagttaagatgaattttttttttgattgtacacgcacaatgagctacttcctcagatgctctctctctctctttgaggaaggatctgagtccacttgacagttgtataattacaagtacatgttgatattattgattgtttctgaatcatgtgtacatatatgtatgtatgtgatgaggttgtgatcttagtaataggacaatcaagtgttcagtggatggaagtgatttggtcatagttttaaaaggtgtatttagggcgcaaaaatgtcctatagcttaggcgtaaggcgcagcacaaggcacgtgcctgagtgaagtaaaatgcgacttaagatgcatatcaattttataaaatatgattcaaaatctaacacaatcaataaaaaatttaagattcgaaacattaaaaagaagtattcaataaaaaagtaatgaaatcatataaatttcaatatataattagaaatatcaagaataaaaatgcttaaaaaggaagagtaaagttgacaaggtgtgccttttcaataaggtgcatgtcttggcaaacaaggctctataactagggagtggttgcaccttgagcctaggtgcacttaaagcacaccttttgaaactatggatttggtggaaagggttgagatttgatcaaatctgatggtgtggtggtggctatgatggtttattgagattggtgcttcttttgcaaaggcaacagctggaagtgataatggctttgatgatagcatgtgaagttaggaaaatggtgggttgaagtaggtgttagtggtgttaggtatgaagatgacaaaggaagtggtgatgtttttattgggaagggcttgctcccttgacatctattttgtgtcactgtactctcctatttttttctcagtttctcaccaaaagtctaatccttaaacaaaatgataaccttctcgcatatgaaaccctagcaacaatgatggctagttctgtggtgaagataatggttgagatgaaggttgatgatgatgtcctgtgatgtgacaatttttgtgatttgaatatcaattggatttagtggggtagtgttgaggattatattttgaagggtaaggtggttgtggcttgggctataatggaagtggatttatatggtggttattgtcaatatggtgtggtggatggtggctcttgagagttgctctgaaagaggtggatttaggttggctctcatggtttaagttggtgttcaataaagacacattcctttacattgaaaacttgtgtagtgaagcacggtggtcttagtcatcagatccgatgggaggctagtgctatttcataaacagcattttaggtccctataatagtaaataatctcttagagatttaagtgtggctccttcaacacttgccaaactctcctttgaaagcttacttttcttgcatgccaaatgcaaccttgaaggtccatcactgtggcttcttggtggttgagggttctatttgtcattatatagggagcttgtgaagaaaaagttgggaaaagtctcaaactctattatgtctagagactcttcttctctaacgaggattgatacaagatttaagttgatggtcttgatggtggtccaagaggtgggtttttgtttttttttgtttttctaataaattataattgttatcaatactaaaattattatcattagacggattcaggtggtggttattacttaagttagtggtccaataaaggctatatatatatatatcattttcttaacattgtaaatttttatgctttagcagggtagtatagcatctggtagtataattaaatcagatgagaggctagtgttattctggagacactatggttggttcctgtgataataagaaaccatgggaagtagttctttcagcattttgtttggtttccttgcatgccaatgttggctttaagggttcatcaatctagctgtgcttggttgaaggttccattctcattatatggggagcttttggagaaaaagttgcaaactttcttgtactcaattatgcatgcaaattaggctcattttctctgatgggcattgacatccaaaatttaggtaagagcctctcaatatctcctatttgttgggaaagttgatgaggcattgatctgtggaagttggaaaagcattctggtgtgccttctgtgcttggaaaaagtgaaacaagataaattttgaaggacttaatttttggtactgaagctgaaggagattatttttgacaattatgtatgcatgttgactctaaggaagatagataatctttgaccgactccatttattgtttgaactgtacatagtagtataatggtacatgggcctagggtggtttgatgaggtgctcctttgttctttcttttggcctcagagctccttgtatgctttctttgtttgggacccatcttggttagacacttcttttttattgaatctcctttttgcctatagaaacaaaaatcccttctgttttatgaccttttgtcacttctccttttctagattttaggtgtatttcctatgtattcctgtgtacttggattgcaccaatttatttttaaatggttttacatattcaaatgttttcttctgcagatagcagtttattaggaaaggaccagaagatttagaaaccagaccatagtacactttacccaatccattatttattattatgttattattagatttatttaattaatttatttgtctattatttttggtgtccttgctattttggcgaggggttttctgctgattgcttaatcctacatgtacttcagg

SEQ ID NO: 13517 - DNA, 6277 bp, Vitis vinifera
  Intron number 1 from transcript GSVIVT01016062001 (locus G SVIVG01016062001) derived from phytozome v7.0 (chr-ID chr9 ; pos 18217893 to 18224169 reverse strand)
tgatctttttgttgggaattttctcggccgagactgtaattttcttttccgaattgggtatttcgttggttggaaattgggtttgtggctttcttccaaaaaatgaaaatacttatccattggctgagtcgagttcataactattgggaatttgaagcaccgtgaaatgtgtcactgagggttgaattttcctcggttttcccagaaagcaaacggtcatctcttggttgcttgaaaaatgggattttattttgtttgggagatgacatagtaaaaagtgtcgatcaactagtgggttacttcctagggaatttttgagggagagcctgatttttaccccctttggaattggggtttgtttttttgggaaatgtagctttgccaggtttgattacggaaatgacgatggagtttggggaacattttcgtgttggaaactgtagtcaatgaagatgatagttttatatgatttttcaaattttaaaatgtaaaagaacaatattttgaaagagaaaaaagttctcatattctgctgttaacatgctctgaattttctttttgatcatctttgttactaaactattggcctagttgaggtggtaaggaactgatagtgtgaaatgtaggacatgattgaaagtgatcttaagaccaattttccgttttcgtttaaaatagtttttggaggatttgttctgttattttttgcaaagtgtcatgaacaacaattaaaaatactaagaatgttctggaaagttttgcattgtatataagtgtataataactgaagaaaatattcttcttttttctgtgtcaaaactgaatacaaagtgacctatatatatacaagtgggattcctaatctaagccatataatatgcacaatcactatctctaaggaaacaataactaattaggagagattctctcatccataaaaatagaaagtatcctaacacaaggagagattctctcatccataaaaatagaaagtatcctaacacaatccctctaatcttggcacttaattacaaatcataatcccatatttccacactccccctcaagttgggtagtagatgtctagcattcccaacttgcttttcatgttttcgtaggtggcctttggaagtgcctttgttagaatgtctgctgtttgacaactttaaggaatatacataagtctgattgttcccccttcaagtttctccttgatgaagtgacggtctatctccacgtgcttggttctgtcgtgttgaactggattctttgcaatacttatggtagccttgttatcacacaaaactgtcatagtggagtttgatataattccaagttccttgagtattctttggagccacattccttcacatatcccatgagccattgccctgaattctgcctctgcactacttctcgccactacggactgcttcttgcttctctaagtcaccaagtttccccacacataggaacaatacccagtagttgacctttgatctgtcaaggatcctgcccaatcaacatctgtgaatacctcaacttccctacttgaggttttcttgaagtagagtcctctacccgggctctttttaaggtactgtaaaattttgtatacggctttcatgtgtctttcagtgggattgttcatgtagcggcttaccatgctcacagcgaaaccaatatcgggccttgtgtgagttaagtagatcaactttcctactaacctctggtacctgtctttgtcagttggatgactgtcattatctttatcaatcttaccaataggatccataggcgtgttcactggcttacaacctagcattccagtctcctgaagtagatcaaggacatacttcctttgcgtgaccacaattccctccttagttctgccaacttccatgccaagaaagtatttgcgttgtccaagatctttgatttcaaattctcttgctagcagtttcttgagatttcctatcccttcttcatcgtctccggtaattataatatcatcaatatagacaatgaacaaagtcatttcaccttccttagagtgcttcataaatagtgtgtgatctgcttgacattggatgaacccatgttttttcacaactctagtcagttgatcaaaccaggccctaggtgactgttttagaccgtatagggactttctcagtttacacacttttcctgaattttctggagtttccatactaggtggaatcttcatgtagacttcctcttctagttctccgttgagaaatgcatttttgacatcaagttggtgcagattccagtccaaatttactgcaactgacaataacactctgatggagttgagctttgctactggtgcaaatgtctcttcataatcaatgccataggattgagtaaatcctttagctactagtcgagccttgaacctgtttatacttccatctggattgtgcttcacgacaaatatccacttgcatccaataggcctcttaccctctggtaattctgagatttcccatgtcccatttttctccaattcttgtatttcttcctgaacaacagtcttccattcaggttgttgaagtgctttttggatgttggatgggatacgatcatcttcaagagaagtgatgaacgcttggaaattttgtgaaagttttccataggacacatgattactgattggatgctgagtgcaggatcttacacctttccttaaagcaatgggttgatcaagatcatcaaggtcattactggaatttagattataaattgtgttacctggttgtgagtttgggttgcttggatcttggtccaattcttggttctactcaggtggagtgctgtcctcgggctccttttgaggaggtttcttgggcttttcctttaaattttttctagaataaactattacctctttactgcattgtgtagttgactcaggtgtgacagaagggacatccaaggaattgttttcggggacagaaagagtagtatctatttgaggaggcagtgatgaactcaaaggagaagtagtgctgatttcggtttcccagaattggaattcatctgtggaccagttctccccctgaattgcagttttggggtagaaggattgattttcgaagaaagtgacatccatggaagtgtagaatttcttggttgttggagagtagcacttgtatcctttttggtttggtgagtacccgagaaagatgcatttagtggctgtcggatcaagtttactacgttgggacttatggatgtgaacgaaagcagtacaaccaaagactttgattgggatagacgagattattcgagcggatggatatgtagcgaggaggatttgacacggggttttaaattgaagaatcctagaaggcattcggttgatcaagtaggttgctgtaagtacagcttcacctcataattgtttaggcatgtttgaagctatcatgagggatcgtgcaacctccatcaaatgtctatttttcctttctgcaactccattttgctgtggagtatcaatgcacgagctttgatgtacgatgccattctccagaagatatgacccaagaatgttgtgatagtattctcgagcattatctctccgaaggacttgaatttttgcttgaaactgcgtctgaaccatgttgttgaagttttcaaatatttccctcacttctgatttcttcttcataaggaatacccaagtcactcgagtgtggtcatcaacaaaggtgacaaaccatctagaacctgtaatgttgttgattctagaggccccccaaatatcactgtgaatcaaggaaaaaggatgagatggtttgtatggttgaatggaataggagttgcgagcatgtttggacaattgacatatttcgcattgaaaatttttggaatttttattgaataattatggatatagtttttcaagataggaaaaatttgggtgacctaattggtagtgccataacataacaacactatccatcttggtactagggttggaaactacacaagcagtcttcattggtagcctttgaatttcctcagctctcagaaggtaaagtccagcacgcacctcagcattgccaatcctcttcccagagttcaaggcctgaaattcacacatgtgaggaaggaatttagtaacacaattaagatcctgtgttagtctacttatagacaataggttgcaatccaatttcggaacatagagcacggagtgaagagtaatatccttggaaataataactgaacctgtgccgaataccctagaaagggttccatcggcaattcgaacagaggaattgttatggcaaggagtatattcatgaaaaaccatgagattcccagtcatgtgatctgaagctcctgagtccactatccatgtagtgtgattttcctgtttaacatttagggcatgggaaaaaatacctttctgggctacagatgcagtaccaatagttgttccagttgattgaagagtctgttggaacattttctgtagtgcctccaattgctctttgctaaacggtccaggatttaagctggtgccagatgtgtcttcttcggttgtagctgtgtaaccccggccttctctgttttgctgtggccgagaaggtttccaatcagcaggtttactgtgtagatgccaacaagtctttttcgtgtgtccaggttttctacaatggtcgcaccatggacgattcttcttcatttggtagttgttgttgttggattgggttcctcgtgcaactagggctgagttctcaagatttttggaggaattttgggttcccaacatcactttttgtctgctttcctctctgcgaatttcagaaaaaacttccctaacactaggtaatggcttaatacttagaactcttccacgtacctcatctaaattcttattaaggccaagtaaaaatttgtagatgcgttccttttcaatgaccttcttgtataggagtccatcttcaggacacttccaaaccaattcttcataaatatcgagttgttgccaataccgtgtaaggatattaaaatattcggtaacagttgaatctccttgtcgaagatcctggagaataatcttgatttcgaaaatcgccgaggtattatcgatgttggagtaggtctctctagctgcatcccatatctcctttgctgtgccataatacatgaagttttctcctatgtcattggtcatagagttaattaaccaagacatcaccatactattttccaacttccaggttcggtatcctggatcatcttccttcggctgaacaatggctcccgtaagatattcttccttacctttctcgcagatgaagatccgaacagactgagcccattgaataaaattctgcccattgagtttatgacctgttatgggaagaatgatgccgtctgtggtgctggcactgtcggagtgaactgcttcaggtctggacgtcacctccgagtttgatccttctgttctgctctccgtggaaaaagatgattttttttttatacgtggttcagatctgaatgctctgataccatgaagaaaatattcttcttttttctatgtcaaaattgaatacaaagtaacctatatatatacaagtgggattcctaatctaagccatataatatgcacaatcactatctctaaggaaacaataactaattaggagagattctctcatccataaaaatagaaagtatcctaacacaaggagagattctctcatccataaaaatagaaagtatcctaacacaatccctctaatcttggcacttaattacaaatcataatcccatatttccacaataacaattgagaattgtttttagaaactattctcaaaaactatttaactgttttttaaaacattgccaagcaggccttcagggttgaattttccttgctcttctctgcaaccaactggggttttcaatttcgatacatgattttcactctttggatttgcttagaaaatgtaatttggctttttattggttatggggccacaaagggtataaaacaaagacctccaaatattgggttagttaactttcaattattgggaacctgaaacagtgtcaagtgcatgatgtttggttttccttggttttctcagcaaccaaatagggtgtctgaatctctgataaccatggtttctcactttgaatttgctgaatttgcttagcttctttgaggatttaaattcttttttccttgtttgcagcggatattgtgtttgattaccgacaaaaagtgact

SEQ ID NO: 13518 - DNA, 13872 bp, Vitis vinifera
  Intron number 3 from transcript GSVIVT01005919001 (locus G SVIVG01005919001) derived from phytozome v7.0 (chr-ID chr7 _random; pos 794686 to 808557)
ctactgggaagatcatcgtcgagccttaagcatgattatatcaactctaatatgcctaatgaaaaaggtgtgatgtagcatgcgagggttaggtaataattatttgcattagaacaaggtatttgatgatgtttgtttctgcctcacgcttagcagactggttattgtaaatgtgtgcatcttttattcatatttgtaagttgtataagcttttgtcatgggtttcatttttcctttctttttctttcccttgttttatactgtgggatgctgcttttgctaataaggttcttccatggatatattttcgagaataactttaggaatgagaaagaaaatgaatattttgttttcattctgtttttcttaaataggaatgagtatggtgattttgatttttgtgtttctacttgtttaggaatgtaaatttggaataattatttatttttcatttcaatataaggtaaaaataaaaatgagaacggaaaaagaaataaattgaaaataatactcaatatatagtttacaataatttttaatttttaatttttatttacaacattttttgagactttttttttcctaatagtaaaagttgtgtggactcatatttttcatctgcgttctcatttgaatgaggagacttattttttgttaatttttgaaatattgattatttttttaataaaaaaacttggagttgccacttatttttattttatttttaaaaaaaagaacctgtaagactgcttattttggaaaagatacgtctacaaaaaccaagtttgaattcggggatcagattacttatcgggaaggtgcgttagtgagccgtaacactcctttaagtttgtatatctatgatctctactagacgaattaaggaaattgtgacaattaattaattaatcatgaatattaagattaaaggaataaaacaatatacacaaagatgatgataaaatttaatcacaagaatgtacaaaataaatgacaagagtattatgcaaaatgatttattgaaataataataaaaaaagatatttaaaaaaaataattttcaagaaatttcaaaggattttattaaagaaatttgaattaatgatttcaatttgtttattttaaaaaaaaagtcaatttatttcaacaaacgacttgattcaattttaattgcattcaattttcaagaaagttatttacacttattttatcaaaagaatttaatacaaaatttcaaatgggtgataaaaatgatttttacttgcttttactaaaaaataatgaatttttacaactttattttaaaaaaagtatttcgatttattttcatttacgaaaagtgatttatacaaattatttaaaaaatataactttatttgcaaaagaatttttaattaaaaaaaaaagacttttatagctttatttacaaaaatgttaaaattcaatccaattttattaagaaaatgatttctacaactttaatttgaaaaaaaaataactctcatcctattttcattaaaaaaaattatttaaatactttatttttaaaaattacttgtaatcccattttaattaaggaaattatttttatttaaaaaaaatatttttttggacaattttattaaaaattaatttttgggacaactttatttacaaaattttttttggacaattattattaaaaacaaatattttttaaaaattttatttaaaacaattttctaaattttcttataaacacatttctgaatttttattaagaaaacttacttttattaaaaagaatattttctaaactattattttattaaaacatgtttaccaaatttttcgtcttattcaaacaaaatttatggtttgttcgatttcgaattctgtacataatgagtaaatatatacaaacaatatttacaaaaactaataaaaataaaaccaaatactagtgagaaataaaacgtgtacccaaacaagcttacaacaagcttaatgttttcttattgctttttgagtctcactttcttccatgaaattccatgtttcacgtgtcataaatccatattcagccaatataattgcaaaaaacaaaaatagtctaaatgtaaatataaaaaaaatgtacaaaatccaaaacaaatattcaagctcaaattcaagcttcaaattagtacaataaatttcaccaataaaaatggacctaaattgattaataaaaccccatagaaatgtcccatatgccatatacctagtccaaaatctccaaattaattaccaaaatacaagcacatttaattaagcccaaatatgtcaaaacaaaataaatccaattaggcctaaatttaatatgttataatccaagcctaatttaatacacaaatccaaatccaaaatccaattatcactacatccaaataaaacataaattaacaaacccatattagagacccgaatcaaaatacaaggtttaaaatatacccaacctatccaaacttaacccaaatcttacaaacaacatcccaataaagtaaatgcaaacccaaaaatagtagaaattagcccaaacaaacaatctcaataatcaataataaattattgtaaaaattaactagaaataataaaataaaaataaaaaaagaaataaacttacctaaattggaagaaaatggtgaaatgtgagatgggtggaggggagattgctagagtggcgtcgccggttggtggtggacaacttaaaaaaggaaaaataaaataaaataaaaaaatggggggaaaaggaaagggggccggtggtcttgggaatggggtggtatgggaagaagagaaaaatggagagtgggtagagtaggtgaagtaaaaaagaaaagaaaaaaagaagaattaaaataataaaaaataaaataaaataaaataaaataataaaaaataaaatacaaaataaaattgttagcccaatggttctcataatcgtgttttaatgataacaaaccatggttaagttactaattggtttgaattataaagaatttcaggtgttaatttggaaattcatcaaatgacccaatagatgcacgatcaagataattgaaagacctttaattataggaaacatatgtaagatgaatgcataggtgcacttaggatttttatatcttttcatgtatctttaaaaactcggtttatgcattaaagtaacatttccatctaaatccgagttctgtcaaatgaactttaggcaaaacatttcaaaattgatatattaatttacctaaagactttgcctaagtgttagaaacaaaaagaccagaaaaagatgggttttcgggcagaaaatggtgaaccgatcgaggttggccaaccggctagggtttcagtcgaccgattacttcttcccgatcgagaaatgtaaaaaaccttatatctcttccattagcctttcattctcgatcaagggatatgccttctcggtcgaggttcggttgagggtaatagtcacctaccaagcattaaatgttccaatggctagtgaatcggtcgacccctagctcgaccagttgagactgttttttggcattttggctcccaaggttagaaacctataaattgagagctccacttcatttatgaagaaaataacacctgcatttatttgtttacctacttgttcttgccttaaaagctcattcttttcttggtgcattaaatctccatttgcatattctttagtgcacctttatgattcatcctaacattgagttgtatttgagccattgttgagttaggttgacagatttaaacttattatttgagtgttaaaaccttcaagtgagtagagacttaaagagattgtgtaagagcccatcgaagccgaaatccaagagtaaaagtgattagaagcttggttgaagcttcaagtatagtggaatcctcactcggttaggagcttgaggagagtggatgcaggcaagaaagtgtcgaaccactataaaatctaagtttgctttctctaaccttatctctttatatttgtgcttcttgtgcttaaatttattgtgtttgaaaaagaattttttaaactccaattcatcatcccctcttgggtgttttctttattaagattaacctttactttctcaaaaataaaatagtaaaaattaagatttaaacgatataaatgggccaaaaaaaaaatgtaatcaagtttgaaatctaaggataaaattaggctcaaaatcaatataaaaataaaattgggacaaattttggggtttaaaaatatgctcttcttcggtagagtttacaaataaagtaagtgtatatgcaaacaaaatgaagtgggctttactaaagaacaagaaagaccaccaaatttgtccctttatgacatagactctttcaaactaaaataagaataaaaagactctaaaaccctacaaaaagagcaagaatgaaaactcctaaggtacctctaaagttacattatggatctagactcccttagaaaagtctccaaaagtgactcaaaaatcgatgtcgaagtcgagtagcagttgaatcaccaaggaacatagaaatgaaaaatatatagaaggaaaactacatgtgcaatatacaagagcatgtagtgaggggcaccaatgatacaatcaaaacatatgctataagttcaaaaaactatatcacacacaatgggtgaggaaagactctggaaagctatgactttgaaagcctgaaatgcgactctgaatgccaagattgagatgaatgactctaaacacctaaactatctgaatgcctaactgtgagcaatgactttaaatgccaaattgagaaaggtggctctgaacgcctaagctgataaatatggctttgaacggcctaatatgaggaagtggctctaaacccctaagctaatgaagtggctctgaacgcttaagtgagaaagtggctctgaatacttaaactaaaaaatgtggctttgaacacctaaactgagcaaggtggctttgagtgctgtggaattctaacttaaagttagtaaggaattctagggtttgttaaggccatttttggtattttgttattagttcctaatttaatgcatttccttgtttagtggagattttgttatctaattagttacgattgagtcccggtccttatggtggttgattgcaccattctcttgtatatatataccatgttgtattctatagaaagtaagagaattaataaaaaaaaattcacttctcataaatcttcatggtatcagagcctttcctctaaaaccctaatttcccacatcaccaaatttttcatggctactgagagacaaatctcaacctttgaagtgacctccaatccagaaacgatgccaatgatgaacaaccatggaggagcccagaacccatctctgctcatcacaggtcacaaactcaacgggcataattttctctagtggtcttagtcagtgatgatgtatgtatgtggaaagggcaaggatgaatatctcactagtgaagtagctatccctgagaagaccgatcccaaattcagggtgtggaagaccaagaatcacatagtgatgttttggttgattaattcgatgaataccgacatatgagagaattttctcctctatggaactactaaagaaatatgggatgcagcaagggagacatactcaaattctgaaaacacttcagaaatatttgagattgaagccactatacacaactttcgacagggagatatctctgttacccaatacttcaacattctttctcatcattggcagtacctagacatgtttgaagttcacacctggaagtgccctaaagacactgcattgtatcggaaaattgtggagcaaaagcaaacattcaagtttctccttggcctcaacaagaatttggacgaggttagggagagagtgatggggaccaaacctcttccaagtattagagaggcattctcagaagttcgccgcgaggaaaataggaaaaatgttatgatgggatctcagaattctgccctatcaattgaaggatctgcccttatagcacgaggacctccatcaaacaccaacaatgaaaatcgccagaaaaatgggagaccttggtgtgaccactaccgaaaactgggacattccagagaaaattgctagaagattcatggcaaaccagctgattgaaagccatccaaaccattcaatgatagagaaagtggtgcccataatgttgctgtcttagaagacaagccaacctcaaccaaggccagtcctttcaccaaagtgtagcttgagatgcttcaacaactcatgagtcaaaactccctatctcaatccagtaacttagcatctggtataggcatgttggcacaaaaaggtaatttttcaaatgcctttgcattaaataaacaacacttgaatccgtggattattgactttggagcatcagatcacatgatgggagatgaaaccatatttcatgagtacaatccctgtaaaaagaaatatatcgtttggattgctgatggatctctatccaaagttgctggaacaggcttaatcaaggttacaaatgacttgaatctaaactcttttctccatgtccctaatttggactgtaatttactcttaattagaaaattaactcgtgatcttgattgtgaagctaaattttttctcaaacttgtgtaaatttcaggaactagattcggggaggatgattggcaatgctgagatatgctctggactctatcttctcaagggcgatactcctctaagaagacaaactcaaaatgcaagttgtgtgtcgcttaaaagtcagtcaattttagattcttgtgtcaataaagataatgaggtcatgttatggcattatcgtttgggtcatccaaattttatatatcttgaaaaattgttcccatctttattcatcaataaaactccaaaatttttcaattgtaaaatttgccagcttgcaaaacatactcgcagtagttaccctagtctttcatatacaccatctcacccatttgccatgattcatagtgatatgtggggtccctcaaggaaaaacaatataacaggagcacggtggtttgtctcgtttgttgatgatcacactagattgacctgggtattcccgatgaaagaaaaatatgaagttggacaaatttttcaaaatttcaattccatgatccaaactcaattccagaccaaaatccaagttctaaaaactgataatgccaaagagtactgcaagtctgttctgagtagttacctcatgagtcaaggaatagtccacctaagttcttgtgttgacacttcttaacaaaatgggattgcagaaagaaaaaatcgacatttgttagaggtagctaggtccctcatgttttccactcacgttcctaaacatttttggggggagacaatacttacaaccatgtatctcatcaatagaatgccatccagaattcttacatttaaaatcccttgtcaatcccttctccagatctttccacatacaaaaatcatctcttcattagatccaaaaatattcgggtgttcagattttgtccatatacattagcaacaccgtagcaaattagaccataaatccatcaaatgtatctttatagggtactcttcacaccaaaagggttataagtgctattcttccatcaccaaaagggtatacaactctatagatgtgacattttttgaacatcaagcttactaccacaaaaccgacatgcaatgggagaacatgaaagcatttcagttttgggagacacttgatcttggggacaccctaccattacctcctcctacttcttagccaattgtcagtcaacaaccagaagtcattaatcaaattccagttcaaatttcaatgtctgcagaacctgaacctgagagtcatcctcctactacctcacctcaaactccagtccataattactctaaatcaccacaaactgcaaataatgagtttagtgcctacattaggagaaaaaggcccaagagaacaatagagcagccaactcctctcacatatgaccaagaatctcaaccaagtccaagtactactcaaattcactcaggtaagggaactactgatcttgagaagctagtaccatttgtagatgattcaaatattccgactgctttgagcaagggtgttagaacttacacaaaccatcctatttgcagatttatttcatatgatggattgtcttcctttgaccaagattttgtttcaattcttgatagcgtgtaggttcctaattctattcaagaggctatcaagaatccaaagtggagaaagacagtcatcaaagaaatcagagctttggagaagaatgaaacatgggtaatttatgaccttcctcatggaaagaaaccagttgggtgtaagtggatttttaccattaagcataaggctgatggaagtattgagagattgaaagctcgccttgttgccaaaggctttactcagtcttatggaatagactatcgagaaacatttgttcaagtgggcaaactcaacactattcgagttctttttttctcttacaatgaaccaatattggccattacatcaactggatgtcaaaaatgcttctctgaatggtaacttggaggaaaaagtgtatatggagataccaccagggttggaaacttctttcaacaacaatagggtgtgcaagcttaagaaatctttgtatggactcaaacaatcacctcgagcatggtttgacaagtttgcaaagtcagttagaaagcaaggatatactcaatgtcaagcagatcataccctatttgtgaaattctcttcagaaaagaaaatagcagtcctcatagtgtatgttgatgatatcatcttaacaggtgattatgaagaggaactattgggaatgaagaagcaattggccaaagaatttgaaatcaaagacctcgactatcttagatactttcttggtatggaggtggcaagatctaagaaaggcatatttgtttcccaacataaatacgttctagacttactaaaagagacaagtatgcttggatgtaaacctgcagacactccaatggactcaaccaataaaataagaactgagaagaataatgcactagttgatagggggagataccagagacttgtaagacgtctcatctacctttcacacacttgacctgacactagattctctgttagtgttgtgagtcaatttatgaacaacccaacagaagaacacatggaagctgtgaatagaattttgaggtatctgaagatgaccccaggaaaaggattgttgtacaaaaagaatgatactagagatgttgaagttttatcagatgcaaactgggcaggtgatgtgttagataggcgatcaacatctggatattgtttctatgtatggggaaatctcgtgacttggaaaagcaagaaacagtttgtagtctcaagaagtagtgcagaagctgaatttagatctctggctcttggtatttgcgaatgaatctggatacagagattgctgaatgagttgggaatatctactgagaagcttattaagatgttatatgacaaccaagctgccataagcattgcaaagaatcttgtacatcatgataggacgaaacacatcgagatagatcggcatttcattttagaaaagattgagaaggcaattgtacaattggtctatactcttacaagatcccaaacgacagacatactcactaaagctctttcaagaactaactttgaagaactgaatcacaagttgtgcatgtacaatatctatgccccagcttgagggggagtgtggaattctagcttaaagttagtgaggaattctagggtttgttaaggccatttttggtattttgttattagttcctaatttaatgtctttccttgtttagtggagattttgttctctaattagttaagattgagtctcggtccttatggtggctgattgcaccattctcttgtatatatataccatgttgtattctatagaaagtaagagaattaataaaaaaaaaattcacttctcataaatcttcaaatgcctatgagaggaaatggctttaaaggcctatggctcttaacgcctatgaaagtgatgactttgaatgccaatgtgagagtgatggtggctctgaatgcctatgaagaaaaatggctctgaaggcctatggctttgaatgcatatgaaagtgatgactctaaacgtcaatgactttaaacacctatgagagaaatgactctgaatgcctatgaacatggtggctttaaacgcttatgggaagaatggccttaaacacctatggctctgaatgcctatgaaggaaatgaatttgaacgcttatgaaaatggtggctttgaatgtctatgaagggaataactttgaatgcctatgaaaatagtggctttgaatacctatggaaagaatggctctaaatgcctatatgagagtgatggtggctctgaactcctctaaaggaaagtggtggctctaaatgcctaaactatgaaaggtggctctaaatgcctaaaaatacgactttgaacgtctaaattgataaaggtggctctgaatgcctaataaaatgaagtggctttgaacgcctaattgattaaggtggttatgaatgcctaagctgataaaggtggctctgaattcctaaactgtggaaggtgactctaaacgcctaaattaaagaaggtggctctgaacgctaagctaatgaaggtggctatgaatgcctaaactatggaaagtggctttgaacgcctaaattgtgggagatgactctgaacgcctaactgaggaaagtcactctaaaggcctaatacgaggaggtggctatgaatgcttaactaaagaaggtggatttgaacgcctaaactaaggaaggtggctctaaacacttatgggtgaaaatgactttaaatgcctattgaagaaaatggtggctttaaatgcctatagggggaatgactctaagcacctatgtgggaatggctctgaacgcctatgaaagtgatggctctgaacacctataaaggtgatggctctgaacgcctatgaaggaaagtggtggctttgaacacctaaattatgaaaagtggccatgaacgcctaaaattactactctgaatgcctaaactgacaaatgtggctctgaacgcctaatataaggaagtggctctgaacacctaagttgatgaaggtcgctctgaatgcctaatatgaggaagtggctttgaacgccaaagttgatgaaggtggctctgaatgcctaatctgaggaagtggctttgaaggccaaagctgatgaaggtggctctgaacgcctaaacagaagaaagatggctctgaatgcctaatatgaggaaacaactctgagcgcctaactaagaaaggtggctttgaatgtctaagtgaggaaggtggcactaaacgcctacctgaagaaggtggctctgaacacctaactaaagaaggtgactctgaacgcttaatttaaaataaatgactttgaacccctaaactcaaagagatggatctgaacacctaaaattgtggctttgaatgcctaaattgaaatagatgactttgaatgcctaaaattgtggctttgaacgcttaaactaaaagaaatggatttgaatgcctaaaactacggttttgaacacctaaaattgcaactttgaacgcttaaattgaaataaatggctctaaatgcctaagttggaagagatgactctgaatgcctaaaattgtggctctgaacgcctaaactaaaagaaatggctctgaacacctaaaatcgtggctctgaacacctgaactaaaataaatggctctaaacgcctaaaattggggctttgaacgcatatgaggaaaagtggtggctctgaatgcctaaattgaaagaaatggctctgaatgcctaaaattgtgactttaaattcctatgaggcaaattggtggctctaaacgcctaaaggactcaagagaaaaagtgactgagataatgaactcaatgaaaagggggtatgccccagtaaaatctttgaaagggggaatgccccaagtgatagctcgtaaggatcgataaataggtcgaataaccatgaaatcaacaagagatgatgaacccaaaaagggggtatgccctagtgtaatgacttgcaagtatcggaaaataggtcgagcagctatgaagtcaactgaagatttgatggacttaaagagtggatatgccttagtgtaagataatgaccaacataagacatagaatgtcaccatacatggcactctaggatatgcttaatgacaatgcaataaaaaaatatatagccttaatcaacaaatgcttaaacaagaccatatgtcatcaaaactatgctgacaaagcaaaactaaaataactgaacaaaaaaatgttgaccaagactccaagtctaaaatttaagcaaagcgagacacaacatgtcaactatcaacgtgaaaatatcatcacaaaatacatcaacaatctaacaggccttgccatcatggaatatgttgaacctaatgtctaaaggcatgtgaaaactcgaccagaaagcttaagactagtttatatcatttttcgatcaagagaatgggataaagtcctgtaaaatgatgaaatgggtaggctaaaaaaaaaatatgtgtaaggctctaacaagatggaggcaagtataatggtgtaaaaggtaaaattctaggtgtgtaacaaaggtaagtgaatatccaaatcaaaccaggtatgttgagaagactaaacccaatgtgtcaatagctctttaatccatcaaaaataacaatcataaacaaaaggtcaagtcttaatgtcaaaatcagcaaggtgtctatgccccaatatgaatacatcctcttcaaatgggtaagccctcagtgcaagataatctttggaaaatatgtgtttggcataaaatgtcatctcacaaaatctatcaccgatgaatgatctatgccctagtgtaagcatttccaaatcaagcatcaaagagtacaatccatcacacatcatcaagttaaagtatatctctactctttgaagtctattggtaacgtgaagagagtatttgaccttctctagagaaaacgcatgtcccaatgtagaccctcaattttgtcctcttagtacatgtgacactgggtgccttcctatacttcttgattcatggtcattccttggcttttcgagctaagattaggtctcattcggaattttttatttatttttattttttttataggataggtcccacttgaatgcttttataagcctaattcactgaagttagtttttgagtttgatttttgggttttgagtataagtgagctttggcctgattttggattttcaactacaagaaatgagtttttgatatttagatgtacaagatgaattttcaatcttctatttctctcccatttggttgtaaatatttgtgcttgtttcatttactttctttttatctcatttattattattattattattattattattattattttgacatgagatttgcactctgatttcttttgcatgtgcatgattaatgattgattttaaatatacgtgtgattgattaactaatttttttatcgcataatttgatgtttagtgttttttagtttgccttattcttactttcatacttattttattttgcatgggatttgactagtatatattaaagattgaggattggcatgtactttccagaaaatgtccttggcaagcatgtggtcattctcagaaaattttgtcaaaacatgcaagaagtaca

SEQ ID NO: 13519 - DNA, 6087 bp, Vitis vinifera
  Intron number 10 from transcript GSVIVT01026545001 (locus GSVIVG01026545001) derived from phytozome v7.0 (chr-ID chr 4; pos 22018211 to 22024297)
gctgggttgaagtcttcgttggtatgtataatgggttactttatttccattccataaaggtgtttttagtcctaagatccttctctacaaagaatagtgacttctggtgacttgtcctgatgtcagttcggggtttgtttctcacagtgtgttgcctttgtggaatgctcatgaacttcaaactattgatcaggattcatgcaggggggggatgtgatgaagttttagacttgttgctaacctgaaccaggcttcgtgcttggaatcaaaatttgacctttagctttgagcaatataaaagtagattacagttcttaagaaaatagcaacttctaaacttttatttgttttttgatagatattttgtctagaaacttgggcttatgttagtcagttcttttatgtttgctactaatttactaattttatgataagatatatctcaactagtaagtgaggatgtgggaggttccaagttcaattcccaaaaggggcaaaaaatattacctgtaataaattgtacttatcctgatccttccttatatattaaatggtttgattgtttacctaattcctatttgtttctttagtgtagagaagattgaatttgtgtttcatttggtatttctactacaccaaatctcaatatcctgattcccaagtcaattccattgattccttattatactcataattttatgggaagattttttttgttttgcttgggtttcatttttcttcctgataggtttcattttagttcatagttgccaggtaacttaattttgggtaggagaatccacctctatgggtaggaaaatgaagttgtaaatttgctagcagctggtaatagagtagatttgttggtttactcaaggaagaagcagcagaaattaaaaagatcccatctctctcttgcgtaacaagtcatcaatcttagaattaggtaattttgattgtcttcccttttttttctttctttctaatccaatgtgatatagatttgaatattcgtagtgccattagaaaaagagtgagaacttgcactaaatatcctctcaaatttcttatctttccatagacttagttccaattgcaaagcttttactactaatttgtcccatgattgccacaatatgtattagatgctctaaaagatcctaaatggaaagaggcaattttttttttaaagaaatgagaacttgacataagatgatactcgagaaattgtggatttgcctaaagggaaaaaataggatgtaaatgggtggttttcaccattaagtataaggttgatggttcaatagagagacataagatgagattagtagccaaggggtatacacaaacctatgaaattgactatcaagaaacatttacatctattgcaatttacaaaaattaattcctctagggttctcttatctttgacaacaaattttcataggccattgcaacaattttatgttaaaaaatgatttttgcatgacaccttggaagaggaggtttatatagatttaccacttggttttgaagacaactcaaatgataggaaggttcataagttgagaaaatctttgtatggatgaaacaacttcttagagcacgatttgatgggttcactaggtctacccttaaatttggatattgccaaaggcaaggggattgaattttgttcattaaaccctcttcacactagaaaatcattcacttatggtttgtgtggatgaaatacttgtgataggcgatgatgtggaagaaatgaagaatctaaagaatcttttggcaaaggaatttgaaattaaagacttcagagccttacaatatttttttgggatggaagtggcaaggtccactaaaggactatttgtttcacaaagaaaatatgatttggatttgctcaatgaaaccaaaatgatgagttttaaacccaacagatattcctattggcccaaatcatatattaggagctagcatagagggagtgccaatggaaaagaagagataccaaatattggttgggaaattaatctacctttcttacataagacctgatatagcttttgctttgagcttggtacaactcatgcattaactcttagagtgtcacatggagtttctttaaaggatcctaagtacattaagtctacacttggaaagggtttattatcctcaaaagaacaatcatttgcaggttgaagcttgcaaggatgcaaattgggcagtgttcatcatagaccataggtcaacttgttctcccacatttataggaggaaatttattcacttggagaagcaaaaagcaacctgtaatggcaagatcaagtgtagaaacagatttttgttaaatggctcaaggaatatgtgaattatttttactcaagattcttctcatggagttaaggatggaactcattaaacttatgaggataaattgtgaataataaggtaacaatcaatattgtacataatttggtacaacatgacaagaccaagcatgttgaagctgactgacattttattaatgataaaacaagagcaaatgattgcacaccatttattccaagaaagaagcaattgattgatatcttcacaaggtacttcaagttatacattcaagtttatagtatgcaaactaaaaatggaaaatatcttcaaactaggttaaggggcagtatatgattatccctaaattagtggctgatttgtttgtatgtatactgatttctttccttggattttgtctctccattcatgtatagcaatagttgaataatttgtataggaaggcttagataagacaacattcttaggaagatattaactttgatagtctactttattttttccttgtttataattgagtgtatataatacctaatgtaattgctgaaaatgataagaaagagtattccaatttttactctcttgaactataacttcattcaaagtatgcagaaattatgaaatgaattctctttttttcaacactcttcttttaaacattttcactataaattttgattcgatctcatatcatttccttcctcctggttttcagtctgttccctggttcctattcttgacatgtttctacaattttgatacattgttcatgttctttttgtcacatttaatataattgtttggcactattctatgaaaatattttgcttcttgtttattagagataaaagatatgattgggaaaaggaaattaataagagcttaaacatttaacgaaaatgtggaaacttgtaagaaaattaacttaataacagaggtggagaaacttgcaaaggaattagcttttgttccagagtagctttttatggaactcttagaaaaatgcagaatggaaagttttgaatacaaaataatgagggagaatttctagattctgggtgtttgtttctgttcaagtgatgcgattcattcaatagagtggtctttggctgtatgtgtggggtcccaaatataatcttagtgcagtaagcctgtcagtttatagggtttggatgtctagatcctatcggctagacacaatgatgtgccccagttatattcttagtgcattaggcatgtcagcagttgggcttggagttcataccacctgcatgtggagggacacagacaatagtagcagcagacaaaagtttgtgatagcagatacataaatggggagtagtggtgggagagactaactcaaaaccaggacctctagctttgatactatgttgagttactaactttcctaaaagcttaaattgttaagatttgagctaacactgtgtatcaagctaacaatttcttataggctctatctgataagatatcgttaagcatcaatcgacccaaaagtttcaactattggaatggactaagaatgaatatcaagctaatttgggccaaagttgtaaacttgtaacaccttgcctaataggtagtctttttggagcttgcatgtgctacttactaaataggggaaataaacaattttgaagttcaaactcatgatttcctataaactaaggctttggtatcacattaagctatcaattgaccaaaaaacttgagttaggtaataaaccaatgatgaacatcaagccaaattgctccgaacaaatacaaaatttgaaagatgtcaacttgagaatctgaaattttgccttaaaaaggggaaagataaacttcaacatacaaattgagattcatatgataaagtaaatactttcctacacagaatgacaaagtttattatgttggatagaactacatttgcatttgatttatacagacgcatagttaaaaattgacgatacacgatatgatacattttttaatggaaattgatatgtattgcaatcaatatcttatttcaaagtgcatcttacaatattacaatacaacgataaatccatctttaactattttctataatttaaaaaaaaaaaagaatttattgtatttgttgtttaaaatatattaaaagattaaaaattattcataaaaaggagaaattggtaagataatcttcttgccaaatgctatattagaagtcaagtaagtttatttttacaataaatattagagaatatttttttgaatggtttgaatgatgatgattaatgaataagaatttttacttaggatattagattattttttaacttctttttttagtggaaaatgaatgatgacgaacttgaaaagctagaactttgaagtcatatttggaactaaaaatcataactaaaaattgaagaagtttattttgtggattatgtcatattttgataatttgaacttgtcaaaactttaacattcaatgtttatgatatgatatagtttaactttttagatccttctatcttccataaatttggttgtatattactttacacttcatactttcaatagatatatacatatatacatattttttctcttcatttttttattatataaaaaacttacgatatacaatacgatacaagatattgaaaaataaaaaaaaatgatatatgatacgttttatgagtaaacaactgtttatagatggttattggatagacaacttcagtccattccaccttgtcctcttattgctttgaaccaaactgacctgttgatcagaccacaaatcagtggcgctagttgattttcatgatattggtgtagagttgtattgagttagacccttctagaatacaactctcaaaatagtgaccggatataggaccgagtctataccaagatggaagcaataattgaaattttcagtggtttacactagacatcaaacgttgtcatcgttgattgggaagagaatttgtggggttattggtcagttgcattgaagtcagacctaaagtgttctgacataaaatgaaggtggcagtcatttggagagatgggtgcttggtagagaatggttgaatatcccaagtggaaagaattgtatgtagtgtttgtaggttttaccttaagatgattttgtagaactcttgtggaattttttgggaatcagtttctttaggtttgagaattctcattcctgttgtgatttaaggaagaatgacatcttccaatttggttgctgccacaaagtgttgagtaaatggagcagaacagttgtttggaatacaatcccagctaataaaaagtctcttagtgtgcaaaaagcaccattttaaagctctctacaaactggtgaatggtaatgagtcaaatgaatttgtggtgctgtatcacattttcttgttcagtgaaatgtgaatgtattggaagatactaatctctaaggaaactttactaagtgaatatcatggaattgaactagatatatataattctgggattgctaatctgctgacaccaataagcatatttaaaatgtcttaaagttcacaggtttctggttataagtgttaagaaattagtgccgcttctgtcaagtaggagcacatggatttctttgaggcattataattgctctactccattgtttccaattttactctttgccattataattttctgtattattgataacaagtattcaacttttacttattaccttaacagg

SEQ ID NO: 13520 - DNA, 17815 bp, Vitis vinifera
  Intron number 2 from transcript GSVIVT01001714001 (locus G SVIVG01001714001) derived from phytozome v7.0 (chr-ID chr1 0_random; pos 365343 to 383157)
ggagggaaagaggcgaggtaatgagctttacatgatatttcaaggaataatgaaattgtagcttaattttaccaagaaaaaggtggttaatttggtatattatagattgtgttgctctttgcagttgttttaactgatgctacataagctttattttcttttgaagtagtacttggagattttatgcaaatgatactatgtaagaattgtttcccatcattggattcatttgattagggtttatgaagatcaactcatgttaaatgtcacaactttcttcctgaattttaatgaattaatttcttattcactatgaaaatgtgtatttgtttgtgtttttatgttgtttgcgtttttctggttgattatttatgcctttagaatgagtaattgaaaatgttttacaaacttacaccagatttatcattgataccatttgttcccaaaccaaaataatttcttttgaaattcaaaataactaaaagctagcatagtggttaggtcatctccacagggaattacaatagaaaaacaaattcctaatgacaatcaaactattttagattgagattactctgcaaaataataatatgcaagaatttgatacatgaaaacagattaatcagtttcttcaactgagcattgaatcaaacataattttcaaaaatctaatagatctaataaattgatatttgaaaagattaattcacatgcaatttgacatttccaatccacttaggataggatttcttgtttgttagctaaaattatcttttagaaactaagattttcaagcatttatacttgaagacattcttattccaattcctaaaattggacataccaaatataatgaaagacaatagattaatgcagtgtagagcatctactgtattctcaattctcaaacattagatatgtgagttaacaatggaaaatcaaaaggattcaagtttaagataatgaaaatagagatctaaaagaatggagtgaagaatattatagagaatgcatcattcaactcttcattgtcgaaggtgaaagctcctttgaatattaacagttgattggctatccatgacaagattctccatggtctggatcttgtttgacaactaagagaatgaaagagagtcactcaatagagaaaattacaattgaaactctaaaactctgtctagtctccaaactaatgactaatctctcatctctctaatatctaatctcatgcctctttccaaaatgactatatagtaggctatttatagacaaagattcatgtaccaagcccaatgattacctaccacgtgtacaactaaacgctaagagaatttaagaatataaacttttgtttggttacttattatttcaattcttgtataatttgataccagaacataaattcgataccaaatttgatatgacaaattaactttgctgagcttcctagtattgaaatagtcatttcaatgcatcttgatacaactcaatatgagatttctaatgttgccttgttcaaattcacttcgcatatcaaaagtgatcatcaaatcttccagtagcctcacagttgaattcgatactagtcgatgctaatcgatgcaacacttcatgcaatgtttctttcacggtgggcaatgggagaagggttaagttttagaaagacaaattatgtggtgatgagcctttatgtgtttctttccccttcttatttgtcctatctagctccaaagaggcatgggtagtgaacttgtcgatgcactctaatgagaggggtgtttggattcctaacatctctaggcctctaaatggcagggagattgggattgtggagtgctttttgccaaggcttcaagataaggtgattgttgtgggaggggaggacaaggtgtgttggttagaggcaaagaatggatccttctctgttaatacctttactctatccttgaggcaggaagtgtagagttgttcacaacgagtgttgtgtggaatgtgtgtgttcctcctaaggtaagcttttttgctttgtgggcaacttgggggaaagttttgactttaaaccaactataaaggaggggttggtcattacctaatagatgtttcctttgttattttcatgaggagtcaattgatcatatccttttgcattgtgaaaaggggagggtgttgtgggggcttttgttctccttatttggggtgtattgggtgattcattctatagttagagagactcttttaagtagacaacatcattgcgatgggaaatgatgaaaatgagagacagactttgagacaatgcttgaccaaggagtttgagatttaaagagttagaattcctaggagtcgaagttgcaccttctaagtagggaatttttatttctcagtagaaatatgtaacaaaccttttcaaagaaacaggaaagttggcgtgtaaaccaacaaacacaccaatagatcctaatcataagcttgaagaggcaaatgaagatgttatggtagataaagagatgtatcaatgtctggtaggaagactcatatatctctctcacacaagatcggatatagcatatgttgtgagtgtgattagccaattcatgcacaattcaaaagaggttcatctgcaagctgctaaccaagtgttgcgatatcttaaggtgtctttaggaaagaacatcctatttaaatgaaactcaagactagcacttgaagcatacacaaatgcagtttatgctagatttatggttgacagaagatcaaccactaggtattgcacctttcttggtgggaatttggtaacatggagaagtaaggaatagagtttggtggcgaggtccagtgcaaaagtagaattttgtgcagtggcccaaggagtttgtgaactactatggttgaagattatttttggaagatttgaagattaaatgggatgactcaatgagactttattgtgacaataaatctgcaatcagtatgacgcataatttaatgcaatatgattgaatgaagcacataaagattaacaaatattttcttaaggagaaactagataatgggttgatttgtatttcttgtgtatctattgacctccaaattgcaaatatacttaccaaaggtttaagtaatacaacgtttcaagcaagtgtatccatgttgcgaatggaaaacatctactcatcaacttaaggggagtatggaagaatgtaattgagaaaaattatagctgtatatttttgtaattaatgagaggattaggacaatcttgtaatcaaggggagttgatagaattaggttaggaaagttcctattttttgtgctaggaatatttgtataaatatgtgggtatatacaaagtgcaatcaagtaagaaatttattctcttagcttcgaattcttcttcagattctaaaaataccattgaggtatcaaaatctcgccagttcattaattcaaaacaagcttgctatattaaaatccatatcaaaattcacttttgctttgttgctaggttttgaaataacacaatggtatcgaattgttgactttccaaggcaaaacaatatcatgattcatggaaaacatgaagaatcctaggaaggaataataaaaattactgagatttcttttgaatgtaggcaattcaagaatcttaggctttgtttacaaagtgttttcaaaaacaattttgaaaaaatagtttgtgagacaatttttgaaaattattctatgatattttgtagaacaaaagtgtttttgggaacttgaaatttttttaacacattttttatgtgtttaaatattttttaaaaataacttttatatgtagtgtttttttataattgttctccatatttgtataattattttttaaaacaactctcggaataacaaatgaaaataactaaatgatgttatcttaaagcatctcattttttgtttttaagaacaaaaaactattttttttgttttccggctgtcaaacgtgtctttttatttttttgttctggagaataaaaaactattttaaaaaatagttaccaaaaaagaccttattcttctacataacaatttacaagaagagtgtgggaagcaacttgccataagcttgttgatgatgcataatgaaaaatctttcgaagtttagaacttgttttgtatgaaattgaacaagtttaagagaaattgagatcctgtcttgtcgtggtcaagagtggatgaagaaagatagagtggaaggcattgcttggaatttcaattgattgtggaaaaccactaaaactcaaggtcaagtttttttttcaagttaggagaaattgatgaggatgaacattagtattagttggaatttaaattatgattaatatttattggagtaaaatttatagtagctaattaggttataggagaattaaaattagaatcataataggttattagaatcttagtagaaatttagatttcttagtgaaacttgtaaataaggctaattaatgtaaaccaatgtattgattgatgattaataatattatgttttcttgcatactttgcaatttgtgatggtgagactccattgattttcttttaagtgaaactcttagaaggccctaatatgattctaaggttctatcccttctccttattttctttctctatattttattttattttgttttgttttgttgtcagaaacttatcccttgttcctctttttaaaccttaaaagataaaagccttagctcacttgtttgattgtaagcaaccgtcctagggttgtgctacattggtctaagagatagaactagagaagaatatatactccgatttgaaaggcaatgtgagatcatttgacgcataattgggatgtcgtcttgccagcctattcaaaaaagtgaaattttgctaagatttatgagtcaaagactgtgattcacaaagacaaaacaaacagatctcactattaacaacttactataataccttgaaagttgtggcaagagttggatcttcattaacacttgactatagtagatgcaacaatgctggttaggatgttgaaatgagattgtgtatgactttcttgctagtcttaagcctgaatcagatagggtaagaaatggagtacttggaaaagaaccttttccatgctttagtgaagtttcttcttatgtgcgtagtcaagaaagtaagagaagtgttatgttagcaccagcctttgtgccaaaaatctttcttttcgcatgttcaaccaaacccaatctctgggttaaaaaatcagctatcggcgccctttattagcttgttttgtgtagtgctcccttctcctctcaatgttgagtcttgtttcctcatgtatctgcttaacaaattcagcatttttctttccatctaagttagcatgttcagacaaaggtaatggcattaaatccaatggagttaaaggattaaaaccataaacaatttcaaatggtgaaaacttagtggcataatgaatagtacgattataagcaaactcaatgtttggtaaacactcttcccaagtttttatgttccttttaataatagccctcaacaaagtagacaaagtcctattcactacttcggtttgaccattaatttgtgggtgacaagtagtagaaaataacaacttaaatcttaacttacaccacaaagtcttccaaagtaactcaagaatttaacatctttatccgaaactattgtcctagacataccatgtaatcttacaatttctctaaagaacaaatcaacaacaagtgaagcatcatcggttttgtgacatggaatgaaatgtgccatcttagaaaatctatccacaaccacaaaaattgaatccctaccacgtttagacctaggcaaacctaacacaaagtccatcaaaatatcaatccaaggatcactaggaataggcagtgacgtgtataaaccatggggctacactcgggattttgcttgcctacatgtgacacatctaccacaaattctctcaacatctcttttcatgtgtggccaatagaagtatttttgcagaacggttaaggtcttagcaactccaaagtgtctcattaactctccaccatgggattcccttactaacaattcacacaaagagcaattccacacacaatttattttcctgaaacaagaaaccctcgtgcctaaagaacttactcactacgttttcctcataggctcgaaactcctcacacaaatcgtggtctaaaggatacaattctttaatatgctcaaaaccaagtaatttttcatcaagagtagaaactaaaatgtacattcgagaaagtacctcggcaacaatgttttccttgccttgcttgtatcggatgacatatggaaatatcccaatgaattccacccatagtgcatgtctcctattcaatttgtattggccttttaaatgcttcaaggactcatgatcagtgtaaatcacgaactccttaagccaaagataatgttgccatgtttccaatgcttgaaccaacgcatacaattttttatcatacacagggtggtttaagactgccctgcttaacttctcgctgaaatatgcaattggtcttccttcttgcataagaactacacctatacctgtacccgaagcatcacattcaatttcaaacgttttagtaaaatcaggcaaaacaagtaaatgagcatgagttaatttttccttgatcaattggaacgccttctcttgttcatctccccatttgaatccaacattcttcttgatgacttcggtaagcggtgaggtgatgctgctaaagtctttcacgtatctcctataaaaactagcgagtccatgaaaactacaaacatgacctacactcgtgggacttggccagtcttgaattgcgcggatcttctcttcatcaacttgtattccttgtgcactcacaaaaaaaccaagaaacacaagcttatcggtgcaaaaggtgcacttcttcaagttaacaaagaacttcttttttctaagtacatccataattgaatttaagtgcacaacatgatcatccaagtttttgctataaatgagaatatcatcaaaataaacaacaacaaatctgcttatgaaagcacacaagacatggttcattaatcgcattaaagtattcggtgcattagttaatccaaatgacataactaaccactcatataaaccatatttcgttttaaaagcaattttccattcatcaccttctttcattcttatttggtgatacccactctttagatcaatcttagaaaatacacaagcaccatgtaattcatctaacatatcatctaagcaaggaataggatgacggtactttaccgttatgttgttgactgctcgacaattaacacacattctccatgtcccatccttcctaggaaccaaaatcacgagcacaacgcacagactcatactttcccttacgtaccccttttccatcaattcactaacctgcctttgtagctcctttgtctcctcgggattgcttcgataggctggtcggtttcgaatggaagcatcgggcacaaaattgatttgatgttcaattcctcaaataggaggtaaaccatgtggaacctcctcgagaaagacatcatcaaactcctacaaaagagaaacaactaaactaggcaaagacgcgttaagtttgttagtgtttaaatacgcctctttgtacaaaagtacaatcattgactgatttaaaaacatcactctttttatttcacttgcttttgcatagaaatttgtttttctctctgcttttctctcaatggccgaatttgtcctcttgttttctttctcatttttctcggcctcgtttttattttctttctgattttcacttgttttctttttctcactcactttttttagatcactctctttttgtaacctcacttgatcttcatagacctcctttggtgacaaagggactagagtgattgtcatttgattaagcacaaatgagtatttgttggtgaaaccattctgcctaacatgccgatcaaattgccatggtcagcctagtaacaagtgtctagcttgcatcggaactacatcacacaaaactttgtcttcatgtttcccaatgcggaaggatactaacacttgtttagtaaccctcacctcaccactattattaagccattgcaacttgtaaggttggggatgtttaattgttgatagctctaatttctccaccattgtagtgctagcaatgctagtacaactacctccatcaataattacactacataccttgttttgcacgtggcatttagtataaaggatgtttttcattgtattgtcatcttttttgtcctgcatacttagagctctccttgcaacaaacaattcaccttggacagtgtattcctcatcatccacgtactccaatggtggcatagattcggtgtcatcttcgtcatcggattcaatctcaccattatctcgtaatatcataactcttttatttggatattagcttgctatgtaacccctgccttggcatttggaacacttaatatcacgattccgaatggttgaagaattagatttaccttgatttccatggctggtcacttcttgtttttgcttgattttgggcttggcagtagcttgcttctcctctttcttcacaaaattcggtctccatgatgatcccgagtttgggtttttccgtgtactactgcccctcctcttgagttggttctcaattttgatagccaggtgcaccatatcttctaactccatataatgttgcaattccaccaaattagcaatttccctgttcaaaccaactaagaatctagccatagtagcctctcgttcctcctctgcattcgctcgaatcatagcaatttccatctccttataataatcctccacactttgattaccttgtgtaagactttgcaatttttgacacaactctcggtagtaatgacttggaacaaacagactcatcacgattttcatctcttcccacgtatatattttctaacaagtttttattttataaaaaaacccattttcttaaagtgtctattttctatttgattcaattatttggagggtattacagttctttaaaagaattaagagtcataataagttatcatataagttaggttccttttttttgtagtttgttaagtattttgggttttctaaagattataagtaaggttatttgatctaaccaagaggataataaataatgatgaatgatattaattttcttgacatactttgcgaggttctatgatgacactctattgtttcttttcttgacgagacttttaaaatgctatagtgggactaagattttcctctctctctctctctctctctcttgctcgcttgcttgctcaatgttttttttctctttcttccttgcttttgtctatgattttcttgtttcaataatcttaatccctcattccccttcttcaatcctaaagtagtgactgtggacccgcatttttcacgtgcgcctccactcaatcggcgagactcgctttttattatttatttgtgaaaaattgatttttttgaaaaaaagttggagtcgccacttattttatttttatttttaaagggaaaataaaacaagaaataaaaccctaaaaaatgactccataatttttggaaaagcgtgtctttgaaaaacccgagtctaagtccggggatcaggttacttattgggaaggtacctctaggaggtagcacccctctaagccctaaagaggtctctaccgactaagttgagggaagtggggcaattaattgattaattgagagtacctagatagactaaggtgattttagagagtggcatgccaaacacaatcaaattgcaataaaggagagtgagagtgcgtacctgaacggcttcccaagtgctatcataaaacataagagattagtttggagatacatcacacaacatttgttttgttcaagcaaatcaggcatatatcaagacattcaagaatcacgtcaaatatggatatggtcatcaatgacatacaagtccatagaattctaaaaaaatagatgagaagagagcgtacctggatagcaagctaaacgcctttatggaaaacagggttagctaaataatagattcaaaataatctcatatataccacaaagaggaagcacaatatcaaacaaaaagtgttgaagaaaacatcatggatgtcgggcccccaccaaagccctgattgattttgcatgagttgattccataaattccatgacttggaatcatgaagtttattcatgcttattgaaaatcaagaaaatcatggaaatagttaaaaatcaaagaaaatagtgaaagtgcatacccgaagtaaaatggtagcaaattgcgtgttaaaatccggattttgtacctagaagcttctaaagaagtttaaagaaaactggagttattttgacatagaatggttttgaaatctggatttaagatgtataaaatcacaaaaagaagaaaaagaaacaatagaaggagtatgatgtgtggtgaggtggccaagctggattagtgtctaagctacttttgagactgaattacttgggttgcctgaggatgtttctgtagattgctgaaatggaattctgcgctcttacatcagtggtcgctgtctgcaaactcaattcactcaaaacaactgtggagaaagaaatttcactgccatctcttcctaaagttcctgtccactggcatcacaacccaaaccagattggtgcactccagctgatgtcttccaatatttcttctaattcaggttcagagaatgacaagaagtcatttggattcaccacattggagaaagtagaaccattatcatcatcctaaagatggcagaaaagaggaaacgctggtagaaaagcaatttctacttatcatctgatctggaaatgtgtatgagcaatttcccttatattaacatcagggttctgtttctgtcgtcaacctgctaaacattaactgaatgcttacgtctttattgatcttcagatgttcagtttcccgaataactccccattctttaggcatatcaaattgcccagaatcagaaactatctctcagtcaataggattcagcaacttcttcgcgtatgtgaaggcaaatgggcagtaagctagagattttctgatgggtcttgcatttctggacttttgaaagtggctgccaagaatacaccaagctcctctatcctcttgttcctcctgaaggtttcttctctcttctctgccgcaacaagcgtttcaatattgaaaacagaaacaaaccctgtattatgtgaaggttgtctaagcatgctagttgatggcgatgctttgggaaggacgaagtaaaccagttggggaaggcacagctgcagaaacaccagtagcagtctgtgacgatgccattcgtaaggatcgagacaactaactattgactgccaagtgcatcacttgttgaaacgtttgaagcatgaccaatgggaggtagaattggtctcccataattaatcaaggatgcagattttttatgcctgtcaccaagaaacccttgatgtctttgtcgtgctggtagtggagataaggtctgttgtctaggctgtatggtcctagatccttccaccgttaacatccttctttgctcccaaagcttgatcaataacagagagttcatcttcgcattccttcatgtttgtcaaggccaactactcgttcgcaattatatctgaatttcatctttgcaagagcttccaggtacggtctggttaagtatccaatgagtgagcccttggtctgaatgagagaataaacctattactggttcgaatttcttcttaatcttctcttgaaacatatttagtcattcactattctggacatttaatcaaggtggcagaaattgatctttttagtatgtctccaatgccttccaagatctccattattagcgattttgtcacctcctctgatgcttcgagtttgagtattatcaaaactactactgcaacccggagtataaaaattttaattccatcctctaaactactaggcgttgtgtttaagcaagtcaaacaggttaacttcgaggcttcttctggaattttccccaatcagttgacaaccttgggcatagaatacctgcagtgttctcgcttccaaagacgagaagagtggcttttattaagtttttatatcatataagtcctccatattctttgcataccaaaaataacaaacgccaatttcagaagtagccaagacatgtaagcccgacttatccgcatccccattgtcaatgcacctgctatctaagaagacaacagggtgctccattcagaaatagctaagaacacagctggctgactgttttatttcgataccatcaattctccaaactacaatacatttctcaccaataacggatgatacgatgtactccccatcatcagtagagatcatacgacgaacaacttcaggatgacctgaaaactttcgtatcttcttgtgatcagaagaattggagacctttgattgagccgctgtcaaaacaaacatagatgatattgcctttgtagaagctctaaatttccccaataggttttctgtacagcagatacatcaagtgctaaaacatcatcactgcctgttttcttttttttagttacccaagcaattcagtaattaatgcccatctgcagcctatggaagagaacttgacacaaaagaataactggaaccaaagctccttcatagacagaagtgataaaggttgaatgaacatgccattgttagatgtttcaaggtcctctgacaagacaaaaacaatctgcaaagctcataatgatcatggcaacataatgcgcaacgacactttattaaccttcaaaccacaaacctttcaaagttgagaatacaacttgtataaaggaagaatgatctagaatttaaatatccttttggcatccagtacgatagattaagcgagctttgacaagttgtaaattccatgctctataaaagacaaggctttcttttctttgttaaattctgtaggcagcctatgaagtcagttctgtcactgatacataaccattagttacatacttggcgcctgaaacagccactgatcagttatcaaaggcacttacaatctcttgccaatggagtgataaattgaggtcaaaatctctgtatgctgcatccttaaataatggtgataatgacttctccagattacagcaaaaccttgatgcaatgtatttttcatcaacattcgaaacagacattggaattttctgtaggctggcagaattattggcaatttcgacatcagaaattgcagcaagactaaatcttgacttgcacctcttccttcatctcatggaaacaaactgagaggtttggacattaggatctgcactttttccatagaactggagcaccttttcagaagtcccttctttggtcccagcaaaagactttagagcttcaacaagaaaagtcagtaactctttggccagatgcaatcgtcttgccgtggtctttttgcatttgaaaacatgtcctggagtaaagcttctctggtcaaatcaggtctttgtccaaagagctcttgtacagggtattcgagaattcaactgcttcaagtctctttagtatataacaatcagccaaggcttaacaaaaaaaaaaaacaaagttgcatctcctaatgttcctttccccaaggttaagatctccagattccttaaagaagacgttgctgttctgacctaatgtggcattctcacacctattgcaatcaccttctccgttctcagttgagagcttcaatgctacagcatctaaacaggtgagcaacctcctcccctgagccagtgtttttgagtccctcgaatcatgaaaaatagaaactgacctagcaaaatcaagtaaaccaataaaacccaagctttgtctaaggccaaggctaactaaagtctccaaagtttcaggatctgagaacttgtcagaggggaagaaaacttctctgtgaagcatgtcttgcaattcgggaactcgaggatcatatagcctggatggttgttgccatgacccattggcagccaaaacaaagggtgtgatggaaagtgtaagtttaattgaggtatcttcttcaatcaaaagtttcacatcatgtaaaatggctgaaagtgctccctgctgtgaaagaaattctggcgtgcaagtgactacataatctttgtagaattctgcccttgaaggttccttaacctctaaataccttctcggaatgattctttctttttctgaatccgtgcgtacaaagtcatcattcaaaagatcttcagacacaccatttggtttaagcaatttagtgggtttactcaaacgtgggaaggtgtttgatgacatcaatatgtgtgtcatccatctgaccttcggagaaccactttgactgaagaataaaactcctgagttcatgaagctccccttctgatgcatcacagaaaagtttctgaacattctccggattatgagcaagtgccagtaaggcattcaaaatgccagttgctgttggcagctgcacataatttttcaactgtggatgctctataggtaggtcattcctcaaaaataggcatcctactttcaataacaaagaacatatgttctcattccacccatcatcttttatcacatttgaattttcaaccagcttcaagagataattattcccaaccggtaaaataggccacttcgaaaattctgagagatcatcacaacatgacttcaaataagtccatagcagtcttaaccattctaaacttggttggccttggtgaccagggttccaaattacctgtttggcatgctgccactctgctgggagtaatcttaggaaaagtttttcaagcaaatagcatgtcagaaaagaaatatttaagtcttctgtttgggcaatatcacatagcttcatatgaattccttccggaattccagagtctacaagttgatgtggaattgaatccttaagaagaccatactcatctccacgtgcaatataaatcctttcacccactcccatcttgtcaaatgctgtaaataaaccattggcaaggggtaccaaaaggtaaaccatacaaactatcaggtcgaactggcattttcaagtcaagtaagcaatattcaagtgtcaatatcattgcattcctgtccctaaatccacgtttccgccgaatcaacagagttctcagcaactgaggtgtcaggaaacgcaatgatggacaaaactccataaacctctcgacaatattgactcctacctagatgtcttagtggtcttcttcataactgaaggtcttctaccaatttttttaggattgatgaggctgcatatctcaaatcactctgacaggaccacttcaagcggggttcacaagcaatgggatattctctccatagaacttcagcatgccatctggttacttgttccgtttccacacactcctcgcatgattggcccagattcataaaataagctccagttatggaatgtcagcgggacccaaagctgaagaaattcagaccacatattcgccacttttctagtaatccgcgtctcaatcaatgtaaggcattccgggctttgatatcaaagtttcagcaggcattatcattcggtggagcacatgcgattatgcagccaaaatccctcatgaagaacagagggatgcaaccgagaaaacagagtataaagaacgaaaacaaaacaaagatataaaattgaggaactcatgaaagccttatttcaaatttcattcaacaggctcggatcggtgggaggatgatcaggaacagattcgaggcaaactagcaaatagccaatatcaacaaacaattttgtggccctcttcgtccacaccaaagaacagtatatcaaacattaaaacgaacatacagaagaaaaatcagatatgggtaagaattccaaaagtaacgagaaaaatacctggatgatctcggttgcacttgttcctttcctgctcctttgtgctttctcctcaaaaatcctcagaatttctcccaatcctccaatgcgtctgccagtcccccttttcttttccttttctcacctatatatatcacccctcaagacctaaatttgtttccaaaaaggagaattctcctatttcctttcttcttctcttctctttttttttaaatcttccaatcaaaaggcaatcttcccaacttcaaattcccctccaaaaccttctaagaagagtcccaccttccttaaactccaatggtaagtttccttgcaaaaacatgaaattttagaagttaaataattgcatgaatagataaataagtaaataaattagaaaatggtaaaaataataaataaataaataaataagttaaggaaaaataatataaagaggaaaataaaataaaataaacaaattaacaaaaatgggccctacgagccatgcaaacacgcaagtcatataagtcacactaaaaatgtccaaatgggccaagtgtgcctaaacggcctatgatgagactaagtgggcctagggtggtgcctaatgggtcaagtgtatctaaaagctatcttaaaaaaacaagaaaagcctaagtctaggttagggctgccaagggtcacaataaaggatcaaataatccctcaatcaaaatctccaaggtgactcagaaaaaggtaagttgtacgagtagtaatgggccaccaaggaactattgtggagcattgaaaacgaattttaaagacatgtgctaaagggacaaaattgagggtctacagtgacgccctagctcacccattttttattgttaacagtcaccttagggttgtcctacattatattccttgggtagtcaaggatggatgagcattggagaactcattcgggatcatagagtgagattattcaaactttttgtcgagaaacaagtttgggtttggttagtgaagaggaaaatacttgctttgcttgaggatcataaagtcgtatgagaatttaacgtcagaaatttactggtggagagggattctattacaatttggtcttggatgactaacaattgtagaggatcttggagataagaccatttgatacaaagggttgtggaattgggttagagttaggttgtttttatggaagctaaaattatctaaccaggaaaccatttggctgactaatagaggagccaattttttggttttgtactttcatattttatcttctaagggtagaaggctaatggctttctactctgaggatttttgctccatacctccacatactcttgtagtttttctttttcctttaaaggatttctcattcttctctctttagtacgaattcttacatatatgtaaatataatacaagtttaatttcttattggaaaaaagatttttgcttttgtttttatgctgtttttttcccatatgatcagaaatcactgggataattgtgaaacttaaatcatagtttttccttgctgagaccacttactatttttgtctttttccttttaagttttatcaaaattgatgggattatgttccatctttgaacattgttaagcacttaatgactattttcaatttagtgtttgtgcaatgatggtgtgcatgtgtaacttatttaccggttgaaatggtgagttttcatttgagttcttaatttctgttttgtctcatgcttcctgtggcaaaatcttgtctattccagg

SEQ ID NO: 13521 - DNA, 3885 bp, Vitis vinifera
  Intron number 3 from transcript GSVIVT01026056001 (locus G SVIVG01026056001) derived from phytozome v7.0 (chr-ID chr1 8; pos 25212184 to 25216068)
gataaggtcagtcatttcaactaaataattttcactgaatttccatatatttttgttcttgaatatgactaaggttgggaattttctgactcggtgggttttagcttatgaattgtgagcaaaataatgttttcaaatcttttccctatttcagtattgcaatgttgttgcttgttggttgaaaggaaaccaatcctatagacagttttgtacagaaatgtactgtgttatcatgttgcagaccccaaggtggttgaatggctttaatttgtattctgtagctattaggattttgtcattggcactggtcaaagcttagcagtaatgttggttgctgaatttgaaagatgataaaatgacattttgatggcacatgtggaccactcataattagcttgtagttgaatctttatgagcaggacccacaaaacaaaatatgacagatatttgatggaaatcaaaaattactgaggagctcatggagggtcctagcaaggtggccccatggtatccttaatttccttggctatttttcctttgcgttcacaacatggaacatgggaagataaaagtcaatgtgtaacagtgctacctctgcaagatttaaatgcattaggaatttcaaaagtctttgagatttgaactcctgtgagatttaaattctgacatcgcattaggttttgaaagttttaactacttctaaatgatggcagaaattaagtaaatgttgatcaaatattatgtggaatgtccaccattactttgtaattgatgagacaagaggctggagggctgcacatgcaatccaaataggggggccttgggtgtttttggggaccaaggacatagtctctgtagctggatattatccctatctttctgagctagcttgggcatattcttaaagattgttaatcaaccaaaactaaggcctcctaacaattaccagatctatgtggccatcagaagtatatgacatctcaaaaaattactaacagatgaagttgacaacaaaagtaattcataatcctttggagaattaggacacatggtaggagaataatggtctagttcttatagagaataacttgatgagtttgagactgttcaagcaacccataatgctagtaagtagatttgtcctgacctagatgagttaggaccagcaaagctacctctggactggatgcactaatcgtggcatgatctatgaatggatagtgtgctcatgtagacatttgtccaatgatagtgaagagaacagaaaatttaattttagggaagcttccttttcttctccaatttcatcatgtaaaacaataaattaactcataataaaaccaggactaatctttcttgagaaggaaaatgtgaaaaagtaggatctaacaattcaagttagcaattttcaaaaatgagaatttttggcaaattttttcagtagtcaaaaaggagttggttagtgcaaacaagcttaccaatgaaaggattgcttttaaatttccatagaaaattgtccaacaagatgaaaggagttgcttggagaatgcgaaggttttactctggtgagaattggcagcatacatgtttcaatgaacaattgtttttctacttttcctagttagcccttgggaatgccttttctttaggtttctcttatggtttattttgagagataagcccctgccctctctatgttctctttatcacagtaaaatatcctttgttagacaaaaggaaatggtttcaccatggacataagatttagggtggttctaattgaagtttcttagctgggttatgtgtatttggtaagaaacattgggccaacccgagtgccatctatgatatttaagcaaaatattgaataatttgggaaatcaaaatgaattgacttcaatattcgaggtcaatgaatgtaaaaataaataattgggtcatggattgcacattgttttcaatcaaggtttatgatgaacatgtcaattcagagaagaatattttctagttgagaaaaccaaaacttttaagtccctagacaatagtgctttgaagtgtgtcaaattgaagcaggacagattacactagattatttggatcaacagaaaactttgatgcatgattattctctcactttccaatcatttttgtattttcttaattatttggaactttaaaataaagagtagtacttgagcttttgtaggttaacatattatatgtttttagagaattactactttattgatgttttatatagaacccataaatggtcaatatggaaaattggagcatgctaattgattaaattaagagatttgattttcttgccttagatttttccttgctttgttgaatcaagaattttattcccaaggttgaagatggacaatgctcttttcccttcctttcatgctgccactatgaaaattggtgtctaaacaagggtttaccctattcagtggctagtttttatggcaatgtaatgatggttatggtagacttttcaatgcaaaactgaattatttgtgcagaatatgtgatcaacaaatgtatggttggaggaagcccttcactatggagggtctctaaaagcagcatgcctaagattgttgatagagcttgagatcttcgtcttaaagattatgcatctcttcacagtcaaataaactatgtatatgcatatttgaaggttaaggatatcgagctaggttttgactctcaagtatctgatatggatgctaatttactgaatagaaaagttcattgatcattgtatcacagattgcaagttgtatggtatgaagtcctagatcactttatggataatttatactcaaggaaggtgaatcctgtggactaattaggtgagactattactcacaatttcaagatcaaggcaatgattcaccattgatgtccaataacaacatgccatatcattatgattttatcggcatttataggactcaatccattgtttttaggcatctgttggttcttagtgatcatttgaagatgaatagagttgcatgactaaacaaagatgaatttgttaggtaatcaaaccagttgaaatgttataaatctcctagttgtttggaatgggagaacttatattgaggtaaactcagtgacaggtttggttcagaggactaatggaagaccagtgagttatgtatggcattggaaaatttcttcctgttttattttatttttcattttttgaaaggtctcttttattctctacttccaggatttagcagtttttgaagtagaatttatttttataggtgaatgtatttggtatgatggactttttggaagtcgctacttattaaggattttataatgcctatcagtgggactcgttcagaaatcaatttatccagtggtgataaatcttccatatgttctatgtagattcaaggttcacaattataaggttgaagatggtattcttcgttgtccttcttttcatgtgaccactacatcacccccttaagagattgtcttcacagggtttgttcatgtttcagcatgcagaagcatatggcattttatttctttggtgtaaataaaaatttgtttagtttctccaacagcttgtgggctactcctgttgtattgaatgaaaagttgaattttattttgtgatagtttagtcctctggcctttttaattcattaacgatttttaattatcacataaattgatattctggatgaaattttttcaaatgatataatttgttgggatttaatttctttggattcacttgtttcgcattacatttttgttaatttataaatatgcctcgtaaactttcataaaattgacatggcaattgcaccattttacatacagcaaacaaacactgcagat

SEQ ID NO: 13522 - DNA, 2141 bp, Vitis vinifera
  Intron number 3 from transcript GSVIVT01028094001 (locus G SVIVG01028094001) derived from phytozome v7.0 (chr-ID chr7 ; pos 3751112 to 3753252)
aacattcaagacatatttagctcgtaagtggtggtccctcctatttgtgcttattgaaaccttaattatgatgaatagttattctttggcagtgaaaaggcaaacttagggccttgtttggttattggaaggaatgagggaaggaaaaggaagaagcttgaggatggtttcctttctaaaagaatgaaaccaaggattagggaattcctaggtggtcttcaaattaataagatgggattatatttggttctaatagtctgtatttccttcaacagtttcctgcaaagcattacaaatatccgtttaaccaggttatttgtcttgtcaaagtaattttgggaattcatcatctatcctcttgagaaagtatctaatgcctccataactgtcacatggttgactcacgatgtgccacattatcagttgaattcaaattataataaaactttaagattcccttttatgtgatgattctcaaacccaagcagcttccctttttctatctaaaatgacctgcaaattgtcattagcaacatctatttagtgagagtaatcttcctagttcatttgtttctctatccactgcatcaaattatttgaatgactcttaaaacctattattgtagataggaaaaaaaaaactaatacaactagttctcattgctcatttgaaatgtttaatttatgtttcttgaaattaaggtgcacattgttggagtttctccaaaaagggagaaaaagagctctcattgtaggcaatagttgtttgctacacctatctagtgagagtaatcttcctagttcatttgtttctctacccaccacatctaattattttgatgacttttaacacctattattggagaaaggaaaaaaaagaaccaatacaactagttctcattgaatatttgaaatgtttaatttatgtttcttgaaattaaggcacacattgtcggggattctccaaaaagggagaaagagataactcattgtaggagatttgttgtaggcaatagaggaaagagtgtagtggctttgaatattaatgagatttttactctttgttgtggaaacaaaattaagcatttttctataataaaataacttaaattttttttccttgtcttgataatcaacctgcctatcgtaagctgacacaacgtgaatggatgatggtaccatattatagaaatgatatcatgaaaagcactggacagtttctcctgttctataattgttattatcaaaaaagatttgggtagctatggttatggatgtaagaaagttaattgtattgcagaaacattatcttattcctagtcccagcatgggatttttccaaaccattgatgtggctattatatcagtaatgatagttattgtaactgggtgcctatacaacatgggcttaggtgtatatgtcggatgttgggaataggtatgtgtctaggcattggatcttttgaattaccagatttttatgccatggagactccacttagaaggtctcaatagtgggtactgatgcttggactaaaaaacaaaaatatttatataattaaggatcgagatggtttgtttaaatttatatctactttattctccgttgcatccatattactaagacaaagtatattattctaaagcagaagggaatgtgataaaaatttgtctttatgggtcattttttatttttttataggttttattggtcatcttttattttttggaagtttcaacattttataagacatttttactaaaacttgcatatttatgtctcttttaccatgtgtatgtgtgtatatatattttatttatttatctttttgcatttattttaatatctctattttgatctattatcactttactttttccctatattttcctatcaaaacctgctttatttttgcttttagccctttttctttgtggtgaaattgatgagtccagctctgcttttaggcacatatctatttgactgccataacattttagttggcagtctcactttcttatacagttgtgataacatgtttcaacttcttgtgaagtttagtttaataatcttggatgctgctaacaagctgaaggtttttctagtttctttggtggaggtccagccgaggaggaagaga

SEQ ID NO: 13523 - DNA, 6390 bp, Vitis vinifera
  Intron number 6 from transcript GSVIVT01018007001 (locus G SVIVG01018007001) derived from phytozome v7.0 (chr-ID chr5 ; pos 5429723 to 5436112)
ttttatataaaagctgtatgtttcttatcctgatatttattggcagtgatattctctcttgagtctatacctctgtagttaagagggtgaagtttcttatatttttaagctcctttgacctttgtagtcagttgttaccttaacttttttcaatgtttgagaatagtagtaatgtgtttttgactaataatctttcctttatttggatggatagttattactatttctgttttttatttgttgctatatttttccttgttaaagagtatcggaagtgggccttatcggaagaagcttcctagaaagacttggttgcgggagggtgatagaaatacattttttattttaacaaaatgactaatacacatagaataagaaactgtttagccaagattaaaggtaatgggctttggatctttcaggagaatgggataaatgaaattgtggctcaagcttctagcaatcttttatttgatctaggggattggagaccttgcgtcaatggtatgtcttttgaagccttagataagtaggaagctgaaggattgaagctgtcatttgaagaggaggaggtgtttagtgtttttttagatttgaatgaggacaaaactccaagtctagatggattctccatggctttctagtaatttagttgggactttgtgaaaggcaatgtaatgagttttcttaggaaattttatgaatagggtaggtttgaaaaaagtttgtatgctatgttttcaatattaattccaaaagaaaaggggtgcaaacaacttgaaagactttagaccaataagcttggttgatgatttgtatcagctactaggtaaggtgtaggcaaaagattgaaaaaggtgtgtgaaatgaggtctccaagttccaaaatgcttttgtagagagaagacaaattctagatgttgcacttctagctaatgaggctatcgatttgattctttgctgaagagtgatttgtaagattgatattgagaaggcgcatgcccacattaatgagggattcttgctagctatccttgaaaagatagggtttgttcttaaataaattgaatgcattaactggtccatatttacgacaacgttttttgtgctagttaatggcactattttcagcttcttgtttctttatccacatttctttgtgttagctatggagatgctcaattgtctcttggagagggctagggagggtggttatttatgtcacttcaaggcaagggggaggggtggcaggtgcacatctgttgtttgtcaacggtctccttgcttttcgtggatcttctcaattccagatggcttatttaagtttactggtcatgtggattgaaactattttgggtttggaaataaacttagacttagagaagtgcaaattggtctcagggtgctgctcacatggtttgaaattctctcaaggctaaaaattaaattagagaagagtgaactgatcatagggtttaatgcgaatgaattggcctttgagctaagttgcatgatgagagagcttatgtgggtctacccttgggtgctctctttagatgaatgctggaatgggataaggtggaagagtgattccatagaaggcttgatgtggaaaagacaatatattcgaaatgggggaggcttactctgatttgaagcaccttatttacattgtctatctactttatgcccttgtttaacattcctagaaaggtcaaattaaggcttgagaagatttaatacacttccttaggggacacatggctttggagaaaaagtcacatttgatgaaataacatattatttgcaaggataagagtaaggggtgcttaggcattagatgtctttcttcccttaatatggcactccttggaaattgaagttggagatatacttctaaaggagagacactttgcaaataggttatacaagggaagcatggagtagaagaatgattggccgttttgcaaggtgagagctaggtatgcagttgagttatggaaaactacgaggaagggatgagacattttttaacagtagagtatcctttgtggtaggtaataggaggaggatgaagttttggatggaggtgtggggacaagctcttatgtgcgtctttcccctctttatgtgcctatgccttgtcaaaataggcttaggtgacagatgtatgggatgagacaagtgtgagggatcattgaaatccttgcttctctagatacttgaatgaatgagagttggacaatgtagaggccttcttctcgagattgtaagaaaggtttgtgaatgggaaggatagggtggtatgggaggattcaaagaatggtgttcttttcgtcaaatctttttattttgtcctaaagttagagagtttaattcctttccctatgggcattatttagaattcatgggtcttgtctaaagtgatatttttgttgggaagttagttagggaaagatattgactttagatcaacttgggtggtcgttggtgaaaagatgtttcctatgtaaacatgaaaagaaatcaattgatcatacattcttcgtcaccgtgtgaaattaagggtgttaattaatcacattctcctttactgtgccaaatcaagggtgttatggtagcttctcttcaccttatttggcgttgtttgggttctaccttcctcaattagggatactcttataggttgccaaggttcttttatagaaagaaaacacaacaaaggtatgaagagttgttcctaatcgaaccctgaagtgcttattcctaggaaatcttttattattggttaggatgtacagaagaaggctagatgtctttaattgattttgtggattggttgggatcttattaaggagaggagtagtttttttctctcctcttttttggcatagcattgtggtaccgttatatatgtcctgtgtattttggtgtacagtttctttggcgctatccatgatttctagtccttgagtttgaaaactgtttgaggggaagtgagtacagtttctatgttagattgcacatatgtcccttgtgttgtttttaaaggaaaattttaatgccaattttgtatttggacaagatgttgaatcaaacccaatttaaatttggatggaaaattttttccccttcttgggaagtttggccagaaaaaaaaaattatttaagggaaaaattgaaaaactttccatctgaagtatatatataagttggctgaatatttggatagatgtcttgaatttaggcaaaataaatataaaaatttacgaagttgggttggctaaattgcctgtaaattcagtgacttggagatgattgtggttgggccaaactcataaaataaaaaataaaaaattggggttgggccaaaaatgaacatggaaccgtcaaactaaaaccatgaagacatgttgtggaaacttgaaattcacattaatgggcattttagctgttaaacaaaaaataatacttggttaaacatggaaagtacatcagagattgtgacagtagatctctctctctctctctctctctctctgatacacacacaatcctccaaatacttacgctgcacctgaatacacgtcatagtatttcaataaatcttttatccttaagagtgcactacttatcaaaaaagtgagttccaactttttagtcatggttttttattagactttttgattacccactgacttgttagctgctttgtcactaaacttgagtctttattaaaaatggatttggcttatttttgaaaagtgaaataaatgactagagataatgttatttctgatggatagatattggcaaagtgatggtaaaaaaattaaaggaacaatgaccaattagtgatctgtacccttagccgcctttatgttccttttgcatttatctgtgcagagataatgttatttcacattttccaaaccttttagggtggggctagctgttgagttagagttgccaccattgcttgagggctagtggaaagtggttctgtcatagttaactcctggttctcagaaaaagcaaggtctttgtaagtgggacaattggtcgtgcaaccttttttgtcctgcttcagagttgcattattcttctaggtggctccatcactaggtgaactaaacaattgataggctggttaagggatgtggttcttgttactgtgtttattggggagttgttacctccctgaatgtttacactggatttggagactttagtgttgtatattcactggttgaatggtcaattacttttacatgcacattgggtcgaatgagatgggtaggtttgcctaggtctgtgatgtgattggcacatgcctgtactatattagggttgtaaggtgaccagatgaccattatgttattatgttaaaggtgtattcctatcaaaaaaatgttattatgttaaaggtgtagttatacagaaggctgaacatttgataaatgctccttatgacaagtcacaagtacaattgaagagggcatatttactatgaggggaatgaaaaagaaaaatgggaaaattagagatgaatacatttgttggaaaatgctgtccaacaagcagaaatgtctagttagcccttagcacctcagacccagcccaatattatgggccttgttcaattttttttttgataaaccaagagaagaaatcatattagaacacgccaaaacagggggcgctccctaagtacaccggcagtatacaaagaaggcctcacccaaggcaacaaaggagaaaacaaaaacctagaaaagccaaagatgaccaacaagtcaaccacccaacatattcataaaagagagatagtccacgtccatgaattgttgagaccattcaaaaagagcccaaaggaagagattcttcagactcatatctgacttctcttcttcttgaaatattcttttattccgctctccccaaatacaccaaaacaaacaaataggcgccattttccaaactacactcctcttcttttctaggcccttaattttccattcaagaagcaaatttctcactgaattcgggaacacccgcaccaccccaaaagaagagagcaccacagtccaaagctcccttgtcttaccacaatgaattagaatatgatccgccgattcctcattctctttacaaagaatgcatctgttaaccatagactaacccctcctcattaacatatcaacagtagaaattttaccccacacggcttcccaagcaaaaaaacgagttcttaaaagggcacgcgaaccccatacctcctttgctggaaataaggggctgttctccacctttaaagaccgataataaggggcttgttcaattttgttttcaatcaaccaagatgagcttcagtctagttattgctattttgcatctctggcccagcccaataaggggcttgctcaagtttgcaattaaacagggtgagcttcctaggagcatatttttaattaacaaagcctggtactcaaggttcatctcaatttggtttggggtaatgtggtgtatgtgtacagcttggagatgataaatgaacaaacaacacaccaatgacatgatctcagcttcatagttcctcgttcaagcttttcctggatctagtgaagctaagttcaagttttaagtaattcattcacaaactgggtttattctgcactaggttttgttaggcttatgtgtagttgatcgtacctcatgtaggtgcagtggcatatccctttaaggaacttaactgatggagaatgctttaaaggaaaagtgataagtaatctgaaaaatagttaaatatggttgagaattgtgacaaattatagtagcagaagcagtaatcaccactggcaattgtcaaggtaggatctgaatgtttgatttgaataaaagagaagcttggttaggtccaagtgcactctagctgatgaccttaaaagtggccagttgagatggggtctagcccgagcttggctcctttgttccacttggtttaataatgcctaaggtggcaggtagtgtgtttagatggattgtttgtgtgcaactagcaagaagtgacagtttaattttgatgcaacaaaattgctttagaagttaaaaaagctccgtgagatgatgagttatttttaaggagtgatatgtgagatagggccatttattttgcaaagcattttggatgttttaattttctttccttgttatagcatatcattgatcagaaaacccacaatcaattttccttggtctttctgcaccctaattttatatttgatttcagtttcagaaggttgtgtgtagattgttttgagtgcccctttcatcctttttgaccatattttattcttttctgaacagaaataggaacagaacctagggaag

SEQ ID NO: 13524 - DNA, 8064 bp, Vitis vinifera
  Intron number 1 from transcript GSVIVT01035699001 (locus G SVIVG01035699001) derived from phytozome v7.0 (chr-ID chr4 ; pos 3427365 to 3435428)
gtggctttcatttgcattcctcccaactaaagtttgtaaagggagaagagatgcgcggtcattgctaactatttagacgtgacaaaaaatcttaaaaagagtgcaaagatgctttctcaaagtagtgcttatgtataaataaagagtattaaatatagatgaggttggtagaaacaatgccaagacgctttctcaatgtagtgtttcttttttattttatttatttattattattattattaaaagaatattaattatagatgagcgaggttgagagaaaaagagtgtaaagatgctttctccaagtgttggcttggtatgtttttttcatttttattttaaaaaaaataatatcaaccattaaaaaaataaggaaactcttatataaaaggtagaattttattttatttttcttttaaatttttatccttttaaatttcttatcaaaacttctattttcacttatcaaatgcatcatatgagtgtttattattttgatatatctagaaatgaaaaatctattcccatcacataagagcttttgtagtgataagaacaaacaaaaactacttcattgattttgaataagaacaaacaaaaattacttaattgactttttcttttgagtagaaaatataagaatttgaatatagagccaaccacatgaagcgaacagtaaagtcttgaatagaaattgatgttacaaagggattaagggtttttgagagaggacatggggttgggaaaactacttgattcacatggtagtctgagggagtttgaggtaaacaatagatttaactagacccttaatctctgtacttgtataaaatgttctttattttatcatctatagaaccaataatctttctaatcatcaatcaattaaaaaccaaaagtgattatggagctcaatcaaataaagatatagaaattaagattttaactaaaactagtcaaatgaaaagaaaatctctagaaaaattctcaaatcagtttgaggaatcacacaaacatgttaaattttaatcttaactttgtgggttaaagttaatccaagactaaatctaatccaaatgatagatttagatttggagatacttgaatttggcattttaggttcaaatctcaaagtcaatttattagattattccaattatttgtagtttctcgattgattcattgattatgcaccgattcatcttctaagattcattttaatcttatatgcaacaaatcaaatgaggtctccattattaattaataaatgatcaactattattggaactaaataagcaatgtctttcccttaattatctacatagaaagttcaatccaaaagaaattacaagttaaaataagctttgtttggaaagaaatatatcactgctttatgtaacctttggtaatatctttttcatcaattgtttctctaggtaaaactaatcaaacactcatattgaaggaatatattttttcttgcatatcatatttggttggcaagaaataagagaaagcaataaaaaataagaatttaagagataaattaaaataataattttttttctcacatatcacatatagcgctgaaagaattatttcctttgtctttttgttgtgatggaacccttgacaaacattgtcatatcatatctcaacactacaagcacgtcatgttttttttttgttttgttttgtttgcaagattttttcactctcctagtgttagtggaacttaattatttagtcatgcatgtcttatacagtaactcttaatatcttaatatacaaaggaaataattaagagctactatacaagatatgcatatcgaaaaatgttacaaaaaaaacaaaagaagaaaacatgattagcttatagtattgggaaatgatatgacaagtttgtaatttcttttggattgaagtccctcagactacatccagtgaagaccaagatcataagcgctggtttgatttgggggtttggtgatatatgtgcatagaagaaacatcaccaaattggagtaagtacccatcaacaaaaccctaaattttctcttcattttcccatgtttccaagcggtttttggctctttttcaccgttcggggcagattggtatctgtgattttctctctgtttcttatgaattatttgccttggttctttgtttggacaaataagtgtatgatttaatccgtatttttcatatcttgtgaatggttgttttaatttattgccttgtgtgtcctgagctcaactggtagacctcatggagcagttgggaaaatcttgtaattcactgtcaggaaacctaaacagactaaggtttaagattctgagttgttttctcttcttttcattcattgtttttggcaaataagggagttgggggtggtttggtctggcaattttgggggatttctgaaaaacccacagcatatttagcaatggatttctgcaaattcatatagaaggtataaagtggagtaattccaaatggagcagtgagggtctaaacctaatagattactcccaaggggaattgatgaattgtatgtaagaaagaaaataaatgatagatgacatcctattattgattaaacatagattgtgaattttcttataatgcccatgaaatgaatatgatcttggtgtaacaaatcaaatgaggtctccattattaattaatagatgaccaactatcattgaaactaaataagcaatgtctttcccttaattatctacatagagagttcaatccaaaagaaattacaagttaaaataagctttgtttggaaagaaatatatcattgctctatgcaacctctagtaatatctttttcataaattgtttctccaggtaaaactaatcaaacactcatattgaaggaatattttttctcgcatatcatatttggttggcaagaaataagagaaagcaatagaaaataagaatttaagacataaattaaaataataattttttttctcacatatcacatatagcactggaagaattatttccttttgtctttttgttgtgatggaacccttgacaaacatcgtcatatcatatcccaacactacaaggacatcatgtttttttttgttttgtttttttttgcaagattttttcactctcttagtgttagtggaacttaattatttagccatgcatgtcttatatactaactcttaatatcttaatatacaaaggaaataattaagagctactatacaagatattcatatctaaataattaagttccatcgacactaggagagtggaaaaatcttacaaataaaacatgacgtgcttatagtattgggaaatgatatgacaatgtatgtcatgggctccatcacagcaaaaagacaaaggaaataattcttccactactatataagatatgtatgtctaactaattacatcccatcatactaaatgagtgaaaaaacattgcaaacaaaacaaaagaagtaaattaacatgacatgcttgtagctaccaatgatatcaaactaatcctatttatgtggttcacacttatcttgagatttaaccattttgaggtacactgtgaagcttgaaaaattgcacacaacatacctatcttgagccttgatttatccaaaggcttatagcaggccttcttggtttttatcatatcgcgtacttcatcattgattagaacatgtaaaatcatatgaacttgtgccttaaaagcaaacaggactccatgagttgttcggccacatcttttgtccttgtgaactgattggagattttttttttttcttaattttaatcggtagctttaaccatatttataggatttcaatggtaatgaatacaatccaaatgaaattaaaagttaaaataagtgttttagaaagaaacatatcactgctccatgcaacctctggtgatatctttttcattgattctttttccagatcaaaatgattatccactcatggtgcaggaatatttctcctcacaaatcatatttggtcagcgagaaataagagaaagtgatagaaagtaagaatttaagagacaaaaactccaaaatgaaaaattaaattaaaaaatggctagacaagttgctaaagctgctactatgatgagctctaaggtggtttccaagtctccattagtctttaagtcacctcaagtgtaaaagtgtccgaagaaggtagttcaagaaaaatctcttataaaagttcagggaaaagagaaaggtaacgagaagcttgttgagaagaagacgtacgtggaaatgaaagatcagggtattgagttcacaccaagaaagttcattgtaaatcacttatgttgtgaagatattttagctttcaaattctagagtgatactcttttcaatagttgatgaacagaaaaaagacggaagaaataattcttgtgttgctatagaaaatcttacaaacaaaacaaaagaagaaaagtaaagatcacatgcttgtagcaggatctttgacaagggttccatcacagcaaaaagacaatccgctaaaactttatacatatataaaactttttatttatatatttatatataaagttaaagcagtgtaaggattaattattatatctgtggggcatgaatcattatgattgatctaagcaaataaattatttgggagattaatatttgaaaaatggcccatcttatgttagattcccattagttgtttttatttgtatattattttcttttgttcttaattaacaaacacctattgcattattaagtttatgtttatataaaaaattaaataaaaataaaactttattaaataaataaactttagttatcttatttttaattctattaatttaatcattaaaatataaaaattatcataataatcttcttgtttatttatattttaaaaatatttttgtatgataattattagagaaatataaacttaaagacggtacaaatgtaaaaactataagtcaaggattacaaagcataaattcattattaaaggaaaagtatataatttttttgatagatattatctctaagatttactttccagtacatattcacatgtgtactaccactaatgggaaagataaaagaatgaatcaaatttctaaatccaatggctttttcgatgatcccatttcccaatttgttttttttaagaaattgactttcatttccttgagggaaagaaagactttatgatcgactcaacgctaattgcttcgaaatagacatgtcaaagtgagatcggtcaaatatagggagtcaattgtagttttaaaattttgaagagtggagtgtcaaacaacgaggtggttttaggtgtacaaggaaaatgaagaggtttagaagattaatgaaattttttgaaataaacccttgcacccaattgctttaaaaaaaaaaagaggttgatgaattttgtaaaaaatcggggaaaaactaagtgaacctaaattgaaattcaacttaataagatttgcaaaagttctaaaaataggggttcccttggacttctttcttttcatgaaaagaacctcaattaagctaattaaatccagtgcttcaaacttgtgagctgtacctctctgtgaaatctttaaaccgtggaactaccactgatggttgaagggaaaatttgagctattcttaacataccaatctaacccacttacctaaggaaagaagacttaaaaagtacaaaagctttggattgatggttgttccttaccaaattcaattacataatcttattataagagacaaaagaaaattgttatcaaatttgaccagctgagttattagaatgtagtgttacatgacatcactctctttcattcctatgcaatttgaaaatttccattgttttcgccgggcttagaccatgtcactggaacggatatattaagagtgacaattgtgatccattattttttgttaaaaataaatataattttagtgtttttgtagaaattttaattatttactttctgatccattatttaaaatttaaaattaaattgaaattttatatataatcgaatttttacgtgtggatggtccgttccaacccattacttaatcactccaatagtactcatgtcacaattattcaaaggaaacagtgcccagaagaatagtgacaattgctactattattattttatttcagtgacaacaaaaaggagaatttcattgtttaattacctcaacaatgctcatgtcacaattatccaaagaatatagtcctgatcagaacaatactgacaagtattattattattttatttgaatgataataaaaatatgacgtggtcgatggtaaggcccattatattattgcggttaatataagcttgaaatgtgacttgcaaaacctacttacaagatatgggttagtcaataagacaaaattaatttgattgatctttttcaatcttatcctcccaagaagatcttgttatgaaataacaagaataggtaataaaaaataaaatagaataagaaaatacagatttatgtagaaaaccttagacgggaaaaaactacgagtagaagagaagaaaattcactatataaaaaattgatacaaaaaaaataaatttgaacggttatactagaagcataatcatcataaccctaaaaaattatatacataattgtgtgtgtatatatatatatatatatgatctgattcctctactaccaccataagcctagtaaaaaatctcataattttaacttcatcatatatattgcactgtaagctttttagatttgactaaatagaatttgggttattaagctctaatagattcaatgggaaaattttaagacaagtaaattagaggaaaataatgaaaaggtttaaatttgacaaatttggttaattttatacatacatttaaatttatttattttttctctttctcttaaaataaatgaacattaaaaatatattaattttgtaaatttttattttattttatttcattatgaaaataaccacaaatcatataaatttggtttctttttaaatttacttttctaatatgttttatgatttaaagaaagattaaataaaggtggcaagtggggtacgatttaaatttacctttgtctgattgccattagaagaaattgaatgctaacaaaaacctagtcatagaatattaacttttacgtcaggttggtaggagcatgtacgtacgtcataggtgacacccatttataaaagtaattaataaatggttcccatttttcactaacttataatctatctatatattaagaaatccctttcataggtatttcaaccagtaatagaacatgctttccaaacccatccatcttgttccaattttatttttttgtcttttataaaagatttatcaaattatcaattttttaaataaatactaatttaattgcggttatggtcaatttcctttcaacctcctccatgatggcctcattagtctagatcttttggaggtagtgtgcataggtcggatggaatcaactgtagatagtatatatctagttagtttggttctttctttggagagcatgagagtatatactccgtcaaaaaatgcatattgctgtttaagagcatttgacagaaataacttcaaaaaaaataccaagtggggagtacaatttgttcattatttaaacagaaatgtataaagaatactatcttctccgggatcaggattccaatcgatcacccaattccaatggaaagcatctaccaaatagataaaagactatgaacaacctctcacacagaatattgtcttaaatttcaattagataatgacgatacaacgacctctgacgcatgaaaatcttgcgtagtttaatggaattagctttgtctgtgtctatgccactagcattttgattaatgcttgtgggacatgagtgagagaagaaatccactataaataggaagccatgcacttccttccttcccattctgagttctaggtaagctagctttgtacgagttggattagtttcagagctttaat

SEQ ID NO: 13525 - DNA, 2031 bp, Vitis vinifera
  Intron number 8 from transcript GSVIVT01028444001 (locus G SVIVG01028444001) derived from phytozome v7.0 (chr-ID chr7 ; pos 7628133 to 7630163 reverse strand)
aagtgcaggtgtttacagattatcgcattctaagagaactgcatcttgtttggtgtatgttgcactgtatcaatgctcagatttttatttttttttcatgaaagcattgatgttattgggaaggaagaaaaactagtatgcaccataattaaatcttcattactttaaagaataacatacaaccctaatttataccgggactcttcaatagaatccacaaaatctaggaaaccagaatttaaactaaaaaaaaaaaaggataactacaaaatagatagctatttttattttcaaacttagataagacttctaatctgataagcataaaatttaaacaacaaagattaattcaaataacttatctaaaactaaaggaattcaaatgatatttgactctaacttccaataattgattattattatttcaatttctcatttaaaaaataaaaatgaaagaagttctatcatagagaaaagtaaagttttatacaaggaaggatgacaggtcctttccaagtagacaggattagagaaaaataagagtccaacaatcccaatacagaaatcccaaaaatgtcaataggggatataatctattgcaaagtacaagaggaacaatgcttctcttggtgaggacatatgcctctctagacctctaagagaactttaaagagataagacgttattttattatgcatgtagagcaaatggatttttataatatctctttaatagttcagttaattggaaagatatggaaataatttcttaaagatgatttatttcatttagggtaactggaattttcaagcttatgcaacatctcattgctagttattagttttatcccacctctcatttcaatagcgaaaaaggcatcctggatatatgtacaatgaagtgccagtgattatagactctcacattcttaacaaatgctgcttgttgtttgtctgttccatttgttttagaagttgcagattttatctctgtaaaagcattaatagatgtcatttcaggaataaataaataattaaagatacatgatactaccatttttatgtgcacagaatgaatgaatttttttattatatgtttaatggtccaattaattggaaagaaatgtcagtatttcttaaggttgattttttttttttttaatatctgtttaatagtattattacaaggtgctatgtttgctgttctatggtttatttggatggaaggaatggacgaaatattttatgatccatggcttaggtagaaagtcttgagatattcatgcttctatctaaacttggctgataaagatatccaaagctcctttagttcttattataagatattgaagtctgtttgttctttcaggtctttgtatgtcattagcttccccttggattgccctttttctcatggttttctttttgaaatcttgggaaagtaatttgatctgtgctcttattgataatcccatttgcatggaacgccttgcagactttaacaacgtcatcttttaatagtctcccaacagtcttgaaaaaaggccagagttaaaaccatcaggaccagggcttcatccctccatttgaaaatggcccctttaatttcctctactctgttgtgcataatccaaaactccaatagtagatgcccacattggatccttattgcaattccaaaccttgcctgtactgcttcatcttagttggtgctaattactataattgctttttatttcttagtcctgataggtaacttccttttttgccccctctttgaggggtatgcaaggaacctcccacatccccacccagcctttttcagtcaggcctcaagcgctagtagaatcagtttttcattttttttggttttcatggtataggttttttttttgttttccctttgtgttgatatttactattttgtggcttgactgttacttattagtgatttggttatgatacttcatgctttagaccataacatctgttagtgttgatttgcaggctgaagctgctgcccaatttttgc

SEQ ID NO: 13526 - DNA, 1953 bp, Vitis vinifera
  Intron number 2 from transcript GSVIVT01021139001 (locus G SVIVG01021139001) derived from phytozome v7.0 (chr-ID chr1 0; pos 1760626 to 1762578 reverse strand)
agcctgggttttttcaaaatccgaagcgtttgcaggtaaacgcgatcgttcttctaacgaatttttgttgtcgatgctgatttctatgttatttttagatatctaaatttcaaagattcttcttctttgatgatctgtcgttctccttatttctaaattgtaatttcaatttttttttttcggggttttttccccagaaaattttagctagtttcgattgtggaaagatgcatccaaagctaatttaggagctatgataaagttgccttcggttcaccttgatgttcttttttgtgctccgatggaaaatttttccgataggaaagaaaagtttcagatttaaagagatcctaaacccgtttttggttacaggctaaatgagaaatttggtgccggaaaatattccataaaaggaaaaatgacaaatgcatttatattttcatctatagcggggaaaagaattatcctattcatatatgctttcaaaccctacctagatagtttttgtagattttttttttttttttttcctgaagagcaaggactgttatttgcttaattaaagaatgttgagagttctgaatttgattcatatgccgaaaattggttgaatttgtttgtttgagcttttttttgttctgatcattggatctcgtataattttcttgtgtcaaatattagggtttttttttttctttatcattattggatgatgcatggcattgtttgatgaaaagctctgcaaatctagtgtagaacttttaacatcaattttattttattttttgatgaaaaatgagttattggcttcaagtccttcaatttacatatttgattcaagcagttgaatttcaaatccaaatccaaatccagatatacacctccaacacaacattcctcatgagtctaattaatctgggttttaatgtggatgtatctcaaggttttgtctagcactttggtttagtgagaataatttgagttcttcttgtttgatatcattaaattatttgaaagaccttgggcgaagaaaaaagtgttatcgaagaatgtccttttttttgtcaaatcatttatcatttgaagaacttccaaaacaataaattatttgaagaatttccaaacaattgagagaagactatcttccaaaacagctgtgaaagattgttcgtagttcagtaacagctttgaggggcaaataggtattcaaaagttattgaattatttaaatccaaattttcttggaattaaatccttaagataaaagcatgttccactccgcatgtttatattatagaatgaaacatgttatatgaattataaatattatttaaacacgaacattcttagtgttaaatctttgaaacaaaagcctatttcattccacatattgcaccgtagaataaaacttctaatatgaatcataaatattaggtagtgaatggattatgtgtgtgcttagcaatctacaacttggaatgagaataccatttttgaaactttgtactttcactaatatgtcaccaccaactacaaaccatcaccattaggattggaagcatgatttgtttcactatccaatgcatgcgaatgcaatttttaataatgtatttagcaatgtacttattcattttattttattttattttattttacatttgctttttatgtcaactaaaatccaatcatagaaactctattgttaggttatgtttttttttttttttaatgtggtattgttaggctgtgttgatatgctctcaggttatttgtttgattgctgagcacttcaatggtttcattgaactctagaatgttattgtggtggttatagaatttcctgataacattcagttagattttcctatattcagatgaatatttttcaagagacaatgtcctataaactaacttatttatgtgttgaaacttgaagaaaaggacttgagctat

SEQ ID NO: 13527 - DNA, 1726 bp, Vitis vinifera
  Intron number 3 from transcript GSVIVT01030967001 (locus G SVIVG01030967001) derived from phytozome v7.0 (chr-ID chr1 4; pos 19963572 to 19965297)
gtggacaagaaggtggttgactatcttcaatctcagttctagactgacaaccacaccgactagaatgactcatctattcacatcttgctattcataagattagatatcacttatatgtattcattgctgaaatgtgtgacaatcatttcttttcacatcctaataaaatgaaggtgtttttcatatacatacaatgtctgaatttccttaagtacgattacttcatagccgttgctgcaaaactggcaaagtgtgttaaattggtgctttttctttcgttctttttttttaatttatttttcagattgcggaaggtaagcttttgtggcacttgagaattttaatatggcacttgaagagttcagagacaaagttgagatcaaatctctctagtttggtaaatccatccaaagagttcatacataaactacatttttttaatattaatgcaaattgttggtccatcatacaatttaggatcacttatagcaggcatgcctgagtgcttctcatcaataaaattgctaaaagttcaaacactagcatatatatacatatacatgccgaactcatttaaattccccataatatgtactatatatccttccaacttttttttctatttcttaaatatatattccaacttctgctttcctatgtgaacaaggtgatgatgcatgttgaaactgaagaaacaatggagcatcaaagaggataggaatattctgtagatttgtattagtaggtaagcataaatttatatgcacaagttaatggagatatatatcgaaggattgaatagtatggaccagatcggtggagtgatattaattgggagagaatctggtccatgaccgtaggcataatgtggggtcaagtatcattaactgatattctcctttatatgcccctgtaggatggagcatcgaagatactccaaaacaccaatgacacaatgatattcgattgcatctgtgagaaaggagctatcataagggaggagatgttccatgatggacataggagtgacaacctctttagcaccaaccatatttattgacatccatttgacgaagggaccatacatggctaagtacaatggaaagaactactcgaatggtagctggtttaactaccaggttgaatgtgtcatgataatcaatgctaagtcgttggtgaaagtcttttgcaactagtcatgccttgtaacaagctacactcccatcaggatttcattttactcggaaagcctacttgtaaccaatgatattttgtgatggataaggtggaacaagctcccatgtctcatttaaagtaagagcattaagctcatcaatcattgttgcacgccaatttggatcacaaagggcaattgtgggatttaagggtttaaggggaccatgtaaaggatttttagttgtggtgtggaattgtttaggcttgaaaatattattctaaaagtgagtagtcatggggtgagtacaataagggatagaaggcaattgggttgggttaggtcaaaggaaaggaggattaggagtaggggtaatgtctccacaacccaaagtagagggcatacctgattgttagccatagaatggagagactacttcaatattggatgtggtggtactaagtggtagtgacatggacaaagaggatttaaaagggtgagaatgaggaactaagaggggtgtagcacttagagaggcaagggaaagagaat

SEQ ID NO: 13528 - DNA, 6625 bp, Vitis vinifera
  Intron number 3 from transcript GSVIVT01033453001 (locus G SVIVG01033453001) derived from phytozome v7.0 (chr-ID chr8 ; pos 20563187 to 20569811 reverse strand)
tcgacggcggcagtgggtgtcgtgccccaaattctaggcaatccaaaactctacttgtgacctgaggtcaaagattttgaccctaatgattattcctatccacgctatcaatctaccaaaacaccctgatttttttttcttcaataaagcatccgatcccaaattaatttattaaactaaaatctaccacaacatattattttatttttccaaaaccaaccatcacaccatctcttattcacaagtataatcaatccgtttgtcatttttccactacatgtgatagcccaaatagttacaataatctctaagtaaaaaaaaaatgtccaaaaatgttttacacactaacaaaacataatttaaattacaaaaatccatataactcaaattagtacatttcaaaaaggtaatataaatgaaaaacaagtaatattatggttcttttacttttttgggccttctgaaacacttcatgctcttcatgtaattcttaagaaactatatctacatctaagaattttagaaaataaaaaggtaagcatttccacgttcagtagagtgttttacactcaaataagttagaaattctaggtcaatacaacacaaccatatgccaaaatataatattacatttacattatacacactaaaagaaacgtcaaccatacaaatttaaaccaatcaaaattatcatttttcttattcaatcatatgtctaacatatcaataattttaaatttacaaaataaataagtcattttattcttgaataatatattcaaacatatacttgataaataatacaaatcattcttctaaatgtaaccataatgcaaatacttacatgcaatcacgcaatgcactgtcgttatcgggctttcactaaataatacgcatttgtacccaaatatacttctcatttggagctttcctagggtaaaacttttgggtctttcatcataaggatcttatctccttcttaatttgctctctatggggtcattccatttctcatttttattttcttttcacttttgccctcttcagagtcttttcattctcctttccatttcacacaaccattttttcaatttttctttttcttcacacaaccatgatgcatatgaagtgcaatcaaatcatatttttacatttaaaattttttaagacataattttatttactcccattatgtttcataattttcaacaatccacataataatttttcttcactttaatcaccacaaacattaaagaaaattcataattaatctgtatagcatcaaaacatagttttaaactttagctacataaattctatttattcttgacatgcttaataattttcaacaaccaatataacaatttttttcttcaattacattaccacacatatccaagaaaattctcactaatgcaaatatcagcaaaacataatttatgtcataatttatttatctccaataatatcaataattttaacacccaatagaatgattttgcacaattaaaccaacacaacatttaggaaaaaaatttcaataattcaaatattaacaaaaacccaaatttatatcatcattttatgtatttctaataatatcaataattttaataaccaatacaacaatttcccacaattaaattacaaaaaacattccaataaattcccaaaaaatcccaataaattctcaataatcccaatatcaatcaaatataatttctaccataattttatttattctcaataatcccaataatttttaataaccaaacacaatcatttttcataattaaattatgaaaaacatcccaataaattttcaatagtctcaatatcaatcaaacataatttttactgtaattttatttattctcaataatcctaataatttttaataactaaatacaatcattttctataattaaattatcaaaaacatcccaataaattctcaataatctcaataccaatcaaacataatttctaccataattttatttattctcagtaatcccaataatttttaataaccaaacacaatcattttctataatttaaattactcattatcacaaaaattccaaagaaaatgcctaaatcacccactaaatttatcatatcacaaatattacctatttaatttccaacaacaatatttataattttttttaaagaaaaatgcattcaataaaagttttaggattaagtctccttatcttagatttgaaaatctaaccgttgaatagaatatcctttaaaaattttacatgaaatatacgtcatttggtacatccactgtatcccaaagctgatgaccattttcccactctcagtcgactgtatttttcccatttctctttttttttttttttttctcctttttaactcccctacaacccagcccacttccttatacatatgcttattaaaacaaaacccaaaatgttacacatatcatcccttcctcaattattctttaattttcattccataattataaattatacacaacttatagttttccacctcaaaaaaaaaattaccgtattcataattaaatttactataaacctgcttttcaaaaaatataatttgactttagttacttgaaacatttttactttgaaattcacttaaaacataatataattaactattaataaaattcaattccataaaatattaaaaacataaaataattttttgacaaccaataagcaataagttgaaatttgtaataatccttaacccgttaattttaccaatatatatttaccaacaaaaatttaaacaatatactgaaacttaattccatgaattcacatttaattaatttatcactttgtatattttttctaaattctcatatcataatttaatcttaatttaatttcaattcaatttttttatttattttgtaattctataaagttcaattccaattataaaaattaaattaattttttttttaattatccattataacaattcgatataatataaatttttactaaacttttcttcctatggttctctaataattacccgataataattaaattaattcctataacatacttaatatttaaattttcaaaacctactttgatggttaaatttttttatccaaatctaaatttaatttttgaaattctcattccttacatatgacgtgacaaattttcaaactattgactttttactaacttttccaaaatctctcctaattaaatacgaacatatgaatcttcatcacttttttttactatttgacccataattttatgaaatactttatactttaagaatctaacgtgtccttaaaaacctaggtattacagtggggtttttctattacctcatgggtatactgaggcaaggactcacacccttaataacaaaacaggagatgctcttgtggagtataatgtctatgtctcctattattgatctctacaactccgttttagccttttctttgttttctttccaataatgccaatgatcagaggcttttatttatgttttttttttcgttttttactattggacatcatgtataggaaaatttcaattcatctatttatttttctaaattcaattactttctttctttttccacgtgttttactaatttaaacatgtcgaaattttgaagaaacaaaatatttataaaaaaaaaatcgatatttattttacatatatgaccaattataacatatgatctgtcaaccacaacgcacaagccataagatccgtcacaatgctgatgatattaaaaacacattacacatttaagataacaaatatgataggatgagataaaatatatatatcttaggaaatcttatcaggttggataggaaataaatacatatccaataaaatatgttatgttattttatatttatatttagtttgtaaaaaaaaatgaaatatatattatctatctgtgtttaaaataaaaattatattacaaggtttaactatctgcatgattaaaatatttaaagtttgtaaataattttttttacatcatgtcatttagtatataaacttagtatatatgtacatatataataataatgcatatattaatattaattattttattagtttttcatttttaactacaaatttaattttataataacaactttttattttgttaaacaagtaatatgaaaaataaaaattgataaaacaaaaaaaaattataatatatgaaatatgcatatcctacgagatataaaaaagattataataatatatttgatcatttatcatttcttacgtttgttgaacattaatatagaataaattaacaaatacaggaataaatatgggataagatataatatatatatatatatatatattttattatatcacatgttatatcctatcaaccaggtataactttaaaggataaaggaaaataaaatgtttggactccttcatatttaataagagtttatttatttatttatttaataatataattaaataatttttcatctcaatgtaaaagttcggataatattatttttctgattttatcttcaatatttgtaacagttgaaacaatttttttgacaagaaatttcaacttcttttattttttggttttcctattgtaaaagaaatgttttaaaaaattgttaactatataaaaattcctatataaaaaaatagaaacctttatataaaaacatggacttactttacatctttaaaaattatttaattttttaaaaaatttaataataaaattattttattagtttttaaaaactattgaaaaccctttaaatattgttttaaaaaaaaatctgaaactcaataataaattattttattattttctaaagcctattgggaaacctctaaatacctatactatatttagcttggggaaaattcgagggaaaatacatgataaataaattagagaaaaaaagtagaagaaaagagaaaattaatgaaaataaaaaataaatttaaagacaataaattatttttatttactactttaaactcattttaatttatcagtataaagattaaatagtttgaaaatttataagttttaattaattatatttatttttattttttatttttcataagacaattaaatatgaaaaaatattttttcttaacattttttttatttgtttaatactttttgggaaccaaacataaccttagaatctgattactcttggagaaaagatattgattaatcttatgtctttaaatattattttcaaaaagtttaaaatttcgagataataaagtttttttaatatcccaattttaatttttttgcaaaataaaggttattactatttttattttaaaataaaaattatagtgttctcttttgtttttaaaatcaaaaaatcatttttatataatatacaagaactcttaaatgtttacgttgaaaaaaaaaatattaattttaaaatttgagatattaaaaaaattcctaccacaaattttaaaatttctaaaataatttttaaagatataaaataaatctttactttttatacaatatatttggttttatatggaagtttctaataaaaaatagaaaataaatctaaacttaaaacatattttttattattttctttcctttaattagtgtaagatttagggatatttgattaaacttaatacttattacttaataacttaagttaaattataaataaatttatttataagtattaaaattatttaataaaattaacttaaaatttattttaaattatcaaattgacatatttatcattataaattataattaggataaatgggttgagtaaagataaaagagatgttaaaaataattaagacaaatgagagtacaaaggtaaaataaagatgtggttttaagaataggttaattacttttattcattatttaaatatcattaaattattttatcacatatatttaatttatttagtaacttaaattaaattattaaatcaataatttttttctttttaattaacttgagacctcaatttctcttagcaatcaatgtttcctcgttggactttgctttcctttgtactttccacatggcatcatctattctttcatatttgatccaacggtccataacagataatgttttcgccgttggaaggaaaggaaaagacaaaaagaaaaaggaaaggaaaagaatagaaaagaaacgtgagcgtcaccttcccccgaggagttacggccaccactggccagtggccaccccaagtttggggcgtgcttttagaggtaaaattgtaaaaatcagtcaaagaaaaattaattttggccttataaacaaggtataaatattaaccagtctgtgatttttttttttaggtcttttttcttgtccctctgttttttttttttttttgatcgttctctttgttaattttccaccatggacaaaaccttaatccctgtctttctaattttctccaccatcgtcttcttctctaccaccgtcgcaggaaaatctcacaagttctcagaaaaactatctcctgagaagctcggattcaagcatgagaagctaacccacctaaacttcttcttccacgacatcgt

SEQ ID NO: 13529 - DNA, 3239 bp, Vitis vinifera
  Intron number 28 from transcript GSVIVT01026355001 (locus GSVIVG01026355001) derived from phytozome v7.0 (chr-ID chr 4; pos 14860291 to 14863529)
tttccataccctatcaaaacaggcagaagctgccggtgagtaatatttaaaattcaatcttctgatgtactactgctattctgttaagcgtttgtccacagatagaagaaattttgtacttttcttgcatgaatgctggttttatgtccatgacatggttatgatggtataattttagctcagtaggggacaaagatgcaaaacaaacaaacaagcaaacactatccaaaaataaataaatgaataaatacagaaatggttttcgctcttatggtattgggatgaggttgagggaggttgcaggttcatttccttatagcaagggaaagaaatgctaaaaaaaaataaaaacaaacaaataaacaaacaagccaacaagcagacaatgtcagaaaaataaataaataattagaaaattttacaccatttatctttccttttttgtttttgggtctcttttatctctactttgaaagactttctctgcaatgctaaagttaatttttattcatgtgtaaagttggttataagaaacttagattctcatttcaaataagattaggattcaaaaggctaaggtgctgcaaggttcaatgctatgcttacataggaccatctatggggggaaattttgggaagaaagatgcaaagtttctgactgtggaaaagaatgattttatttattatatttctgacaaaatgatttagtatttatagtggacaatcctacaaaactgggaaactaaattataaaaagaaagttgattaatttatagaaatcctaaaacacttgtattttcacttagggagttaatgccttggtatcttcaattagattagtcaaaactgacaacacctaagtcacttcgttcctgtccattgaatggtgagacttcccctataggtgttggatttttcattagaataacaagactgtagaaccaaactatgacaattgtaagcctataccttttcatgtactctttaactcctctcaagcttaaagctgacactattaaaatgcaaaaactatcataataaagctttaaacaaatctttgaactcttttctttttatttctcttttggtaggcaaataaaagatagtatatctttatacaaagttcatgatgtttgtctcttttcttctttttttcttttttccttttttgggtaggggggtggggtgggtgttaggtgacccaattaaagtacacaggatgtatacgaaatcgacaaagaggaaagtatggaacagctagatcaacaggctctaaactatctatgaaattgacaaaggataggtctatatccatcatagatcctttaaactaaagaaataaggtatcaaggaactcttccttcccatccaaaattgacttcttcaaactatttaagaatctcctactcctctctttccatattgttggaaataaacttaaaggagccattttccaaactgccttacacatctttccttaaacttatcgtaccacctaataaaatgtctctagttgtcccaagaagagtcaaacacatctcaaaaagggagaaccaaagtccacagattaagagacaaactaatgaacaaggatgtgctttgcagtttcctctctttgttggcatgacatctactaaccatatttaagtcacatctcgtaagtggatcaattgttatgattttctctcacaccatttcccatgataagaagctaacttcagaatccaaatttccttggaaaaaatgggattgtattggcaattagagtgctgtagtaggtactgactaagaacatgcccttttgagatgccttcctgaccaatctatccttcataccaatgcaaatgagcatttcatttataagctgcaataaggacccaacaagctctagctccaaataaaatggcctcatctaaaaatagggttccaacaacaccaacttgtgatacatggacatgttaatttaagccaaaataccagtgccaacataatatgacataggtgcgggtgtgagatctatatcggatacaattctattgcattgaatacaactttataggtcatggctgctttatatctttctttaatttttttaattatatttatattgcattagatactactatttctctatttatcttgttcttaaatttgtttaaaaaattatatcaaataatagtataaaataaattctaataaaaactaaagaattttttaattaatttctaactcttgtaaatgaagtagtgttttatctttttcttatttttttaattataataggtaaaatttaaagataaacataataattaatatcataaaatatttgaaggtaaacgtaataattaatagcataaaatgtctaaaataaatagaaattttaatatcttaaaaaatctaggaataaattataataattataactaaaaggtcaaattattagcatgattagacattaaatatgattatattttatcaatatctagtatagtagaagattttattccacaatcaatataaattttaaaaaatcaaaggttattaataatgtggtataatattttcctaaagacttttctcaacatcctattaaaataaagacctaaataaataagttgttcatgtacaataaacattaacatcaaattaaaataatgcttaacatcttattaaaacgggaaaagatataatacatatattttctgactacaattaatgatatattatcatagataacttatattattgtgcttatgtttagtgttaattcatatttcattgatgttgtatccaagtacccacacccatagatgagatcctttttagtcgaatccttgtgccgtgtgattttgggatgcaaagaatctaacacctaaacatgtatccacacctgacacccatacccaaacccatgtaacatagaccccaacactaaattccatcagcccaataatctatcacccaagtctctctctagtagaaatcttcttgacccgagctttgtaattgtgtacataatgatcttgcagttattctatttttctttgatggtgatcttcttaactctagctttttaataggcaaataattttgccattcttttgcagatgtcaaaaaagattttgtgaatgaccatatagttactatgttttttataaatatgttgattgcatttattgtttatctttatgggaacaaagtgtcattattctatggcagatctgttgtgcaaggctaac

SEQ ID NO: 13530 - DNA, 9127 bp, Vitis vinifera
  Intron number 4 from transcript GSVIVT01036659001 (locus G SVIVG01036659001) derived from phytozome v7.0 (chr-ID chr1 3; pos 19931816 to 19940942 reverse strand)
ctggtcagccctgagctgcactagagctattgaagaggtggattgaagacaaacttcctcaaaaacccatgcatggctgaatcaaacgagccagaaaaatggcctgctcaaatgtgattatctctgttgtgttgaagcctatatcttgtttaatttatcttgctcacagttgaataatttgtccatgttgaacattgcatgctgcccttgaattctcagtatgcttgtaaatattcgcccacagccaacaactacaaactctggactttacaagtgatgatgcaacaaaaatttcctttgggaaataagaatgtatgctgcctgtgtatatcattcctctttcttgttatcttaatgtttgctgtacttgtgggcttactcctttgacttggatttgaagtttaataaaggtgtactactattattttcttcttgtttctttcttccttctctatattttactttttaacttgcaaaatacaggtcaatcctctgttttcgcatataaattactgatgaaacagtaatgtcataaatataatttatatattattaaaattaaaaataaatgttatatatatacataatttaaacttaaattttttatttaatattataatattaaataagtaaagatatttcatctttttatctttaatattgacatgttaaagcatcatgataatatataaatatattaatatttctaattttattaaatgacataagcatatttaaaaagatatattcaaagttaaaataaaattttattatttactttattcccaattttaggtgttatagattttaatgttctaatattccaatatattaaaaattagaataatacttgtaaatgcatacttgaattctttatataatgaataataatacttttaaaataagaatggttaaaatattttatttaaaatgaatttaaaactaaacaaagtttttttaaaaaaaaatatacatataaataagccaagcttttttattgtaggtacttatttattactcaattctaaacaaagtattttggatcaattttgaagcattttctaaaaatactctcaaatgaactctaagaggttgtttgagaaattgacttattgatctaataacttaatttaaatcattaagtcgattaaacatgtttagtaaaataatttaatattacagcttaaagttaataataacttttaaatattaagttaaaatagttaatttattcttaatgtcaaatctattttatctcattaaccctcatatagtgagtgtatattttacaactataactctacatcgatgattgatttttatggtaaatatattatgattatcttatatatttacaatactttaaatataaatatttaacaaacaaatttattttttaagattaataataaaaaatagttattaaaactaataagtgtaaataatagttaaaattcataattgtaagtatgtcaaatcgatgatttagtacttaaaataaaaatcaaataataagttttaagtaaataatttaattatgatttaactcaaaatcaactcaaatgattaagtaattaatattagattttaccaaacaccctctaagtcttaatttattagagctcgtttagcagtgattttagaaattacttctagcatttctaacatttgaaattttttattatttaagtgttaaaaagactaaaaacatttttaaaaatcaatatcaaacatactctttgtctcgtttgatttagaatttatttgtataatgaaaaaattaaaaatatgtctattgttatatgcaaataaaaaatagtagagataatttgttttgtattagtttttttggtatattattttcttacattgatttaagtgttttatgaattttaagttattttttttaaaaaaaatattagactcattaactacatattaaatttcgtttaactagcaaatgtaataggtattataaatgaatgtgtagttactaggagacaactaagattaaactagatgggtcttgtatgttatatcctccaattggagccaaagaatatggaagaagcttaggtgacgactcttggactattgaactccaagaagagttaaatcaattcactagaaatgatgtgtgatacttagtccctaggcctaaagataaacatgtcattatttctaatgcaaccagtagatagcagatgagaaaattttgaacctcctcaaaaacttggttgattcgtacaacaattcagaaactgctaagttatgacattgaccaggggttgagtttatgtgtatgggtcataatggtggaaaccaaaaattgtaaaaacatatgaagggaacgaagaatgtcaggatccataggaaaataaaaatagctccttcataattcaattttgaagttgacttaacattccactataaagagtcaattgcactcttgtatcctatgatattacaacaagatataagaacttgagctcatgacctactattcactctatgcatactctctatgaactcatgtctataatttaacaaggtgaatactatcaacctctcaagattatctttacaatcattgagtctcatattttcctattatgtaaccaattgacatattctagctctccaagagcatatgttaaatttcaattaaggaattactacgaccatagatttcctgatcacatgtccttaggatcatccaagaggacactttgtctcaaacttatgaaatatcatggtgtctatcttaagtatacttgttgtcacctacctcaatcaatagtgactgaatccataaggaatatatgaccatctaattagggtcttacccataggtcaaagccactatagactttaacacttagtatcctctcaaagttaagagcacatatgatatagtagtttagtgagatcatggctacttgataaccaatcttatgacttactataagtcttgtctaatatgtaaccatacacattagtgcattaactagggaaactcatctccataaccaagataagttatcccttcaattatgagatgtgcacgacaacctcaaatggattgtttaagttcataaattagttgtgaacaactcatctccttacaagaaatatataacttggatcttccgatcaactcctaatacacttaagtcatatataatgtaagagatgttggacctaaatgcagagaaagtataatgtatgaaaaggataaatagatttaggaaattggatcataatttaaataataaattcgtatattattgtaccatgtcattctcttaaagactctatcctaacaatgtcaaatcactataaatcgtttgcatttcttttgtttcatatctctttatttacttgtattttcatttattgtcatttgtatttattttagtaaacattgtttaaatttgactaattcaccccctcttacgtgtttacctagtttggattggcatagacttcacaataataaataaataaaatgtgttactaacttatttcatcatcaattttattttgtcgtcaaaatcatttaaaaatatataatagtgatttttagttttttcattaaccctttattgaaaaattagttcttgtaaatgaattaagtagattttatttataattctaatttttttatattaaataaatgaaaaaatattttattttaaaataagtacaaatttaacataattcaattaaaaatagagtgtgatttaatataattctcatgtatccattgaaatagttgtttattttaattttttacatgaaggaactaataataataaaaaaaaatgaattaaaagaagacaaattttagtataaaaccatttaataataaaaatatttattttataaaaaggataaatatggttagtcaaatctttattttataaaaaagaataaaaatctttattttaaaattcacttacaatatttaccttatgtagttattcaaatccttttaaacaaatttagcaccacttaatttggtttgttaagcttgctaggatagtcctcgtacatgtatcaagcatggtaatagagtttatagtaattcagctatgaattggcctttatttaaggcatcaaatgcaaccttttctcgactaatgacacttttaaatagtgtttagtaagttaatttaatgacttaaaatgatttaataacttaaattaagttattaaatagattaaacatgtttagtaaaataatttaatatcataacttaaatttaaaaatgactttaaagtattaaataaaaataattaactttttttttatcccaaatcttttttatcttatttgtccataatctattaagaatatatttaacaatcatgactttacatccatgtctcatttttcatagtaaatattttaaagttgtctgatatatttatttaagtatgaaagtttaataaacaaatttattaattaagattaatgaaaataaatattagttaaaattaataatgataaatgttaattacaactatgagagcaaatatttcaatttgataacttaaaataaattttaagataattttatcaaacaattttaatgcttaaagtaaaaaataaatcataaattttaaattagcaacttaaaaataattaaacttaaagtaaatttaattaattaaacactcacttaacttttcaattgattttcaacattacccaaagaaccgtctatggttactatttaagaactgcatttgggggggaaaaaaaagcaaggatttgactaacttgttagttatgacttatgacttaaacagaaaaagtggtacttcatatcatattttctagggaaagttgtgttcgtagccagctatttgaaagtaatatgacaatcaaactctaataagctggaatatgagatttgactgtcaaatggaaaaatattatctttctcatgcactctttactaactccatgttatgttcctaaattacccctccatgcctccatgttagttgtaaccttgtccctatatcagcagcacaccctccgtgttataggagagactgaaaattttaaaaacagaaaaatttgaatttgaaacctatgaaaaatcacctgacccgacaaatggttgttatttccctaatctgaaactttttttctctctaatttgggaacatttctctctctctcttagcttcatcacccatacaatcctgagacccatctaaaatttcccaaaaattgtctcatttgagagaaaaaaaaaccattaatccacaactccaacttgtgtgtttctctcttatccacataaaagtgcaacaaaatggagcattccatcctaagaatgtccagttaaaagacgacttcaagaggtgcatttgtgattgtgaatttactacagcagtgcgtacctgaacggaaagttggaatctaaaatattggcttcgtcaacaagatatctcttcctgtcattgagtcgcattttgccctaaccccaaattgaaatttgaaggtaaataatttttatttattgttctttagttcctttgtttaaaatagagcacagcaacgattttcgagtcgttggtagacttgaacttttgtattgggttgtggaaatcatattattcccaaataaccataagacctacaagtcgcattgaatctagatggaacttacaacatatccagttgcaagtcgcattgttattttggggactgtaccttaggtaccatcttaacggagcttaggtaataccttaattaaacttgagtattacctattcgaagccttggaacttcaattgtggacattacttacttcatttgtgacccttagagcatgtcattatgtgattatttagtgtggtgaaatggttcacctttcttattttggggactataccttaggcactaccttaatagcccttaggtaccaccttaatcaaccttatgtactaccttaaccgaccttaggtactaacttagataaagttaggtactacctatctaaagcctcaaaacttcattcgtgacccttagagcataccattatgtgattattttgtgtagtcaagtggttcacctttggtattttgaggactgtaccttaggtactaccttaatagcccttaggtaccaccttaatagcccttaggtattaccttaaccgaccttaggtactacattagttaaagttgggtactacctatctgaatcctcagacctttatttctgatccttagagcatcccattatgtgattatttactatgttcaattggttcatatttggtattttggggactgtaccttaggtattaccttaatagcccttagatgccaccttaatcaaccttaggtactaccttaaccgaccttaggtactaccttagttaaaattgggtacttgatcgctcggatttctatcgtttattggatcaaaacaaaatttataacataattcactattctatagcaatttgtacccaatcaaaaagtggttttagtacaaactattgtagtatagtggtttttaggtatcgtccacaaggatggattattcttggtaatcaaggcttgaatgagagaagaagaaatgattgagattaagtgaaaatgatttgacaattcatgattacaattcaaaatgacaatgattcccaattgagaggaaaatgaaatgtaaaatagaagaaaattaatagaaaatgaaattcttggagttatgattttttagaaaacaatctctatggtgaatagatgttaagatctaattttcatcaagttagattgaaaacctaaattttcattgaaaccgattttttatttagttttagatctagatataatttatcttcaaattaggtcatcgaatccaagatattaattcaaatcatatattcaattcatcttaaattatcttccaatgattcacacaatgcaactattcaatctcatcaaatctagcattaagaatttgattaatctacctagcttgcattgtagtaatcatctaagacaatttgaagagaaaaatcccaaaattttcaattaatcaatcaattggatcaaattacctttgcgattcaccatagatcaccatagattttgcctctaaatctctcctcctccgagaaaaacgagatttagccactcatgcttagagatttggtctcacaagacatgtttggctagtgagaaaatgagagaaaatgaaggaaaatagagaattttatagagagaaaatctagaaagttctacaattagaaaaatgtaaaaaagtcttcaaatgagtaaatcaagtttctatttataggtcaaggtcaagtggatacttggcatcatctaagaggtcttccggaggcttcttcaccaagaaatctggaaaaaatgcaatttcgcacgattgtgcgaagtggaaaattgatcagcaccattttcaccttcctggagcatttcgcatgactgtgtgaaattttcgcatggtcatgcgaaattagttttcactttttcccttttagttgtagccaaattcccctttgatccatttcgcacaattgtgcgaatttttcacatgttcatgcgaaattgaaaaacatagtttttcaactcttttttgtcatttcttccatttctttctcttgattccactttaaccacctccaaatcaattccaaatcctggtccaaaccaatttcattacttctttcattgtgcatttggatcatcatcaactttatttgttctcttcaatttgattcatctcttttgtcaccaatttatcaaaatcataccttgaaatgactccaaaacttcataaaaattgttagtaactcttgctagggcaaaaacatattaattgagtgttttaagcataattactacccaaaagatatgacactcatgagaattattatctaaaatgtgtggttttttattagtaatcaatactacctatccgaagcttcagaccttcatttgtgacccttagagcatgccattatgttattatttagcgtgttcaattggttcacttttggtattttggggattgtaccttaggtattaccttaatagcccataagtaccactttaatcaatcttaggtactaccttaactaatcttaagtactaccttagttaaagttgggtactacctatatgaagccttagaacttgaatcccacacattacttgttatattttgaattttgtggttaatcatcactattattatcctaaaatatatatggtatacatgtgtgaattatataccttttgtactatcttttgcaatagtcattacttgattgattatcaaaaagtaaccaacaacaattgtgtcatcagatgatgaacatgcaaacatagtatgtagtgtttgcaggtggcagacatggagtgtacgattcttgggtttaatgtcaaaagaatgtgctcctttataaagggaatgtttacaaagcatatacttctagagagaaagttgtccgagtttagctgttttatgcaccaagatggaatagaagtaatgaatgttcatcagctggcaaaccaaagtctgaacatgcatttgatgataagcattccttgcaaaatatttcatatacatatgtaatcagtttctttgttggcttctttatagcatgtgttttgcttattgtaatatctagtttaacataggttgtggaaatgtgttatgaatatcaatgtctagtaatatattttcgtagtgttcataggtactatgtgattattattatcaactttgttaaactaaaaatgatgactcaaacatttggcacataagacaatttgtttgttaaaactcacaacataagacaatttgagattttttaacacatcataagcttaggaataaattttagttgagatgtaaagttaaaaactgtatctagggaaattaaattttagcatatttcaaatttaaattaaagctaatatgtacaaattttttcaatataagtaaaaataaatttctaattatttaaattatgtttgtttttttatataaattatatttggataatgcaaaaataatgtaattaaaaaatattaaaacaaagaagaagggcaaagaaattttcctcatctataa

SEQ ID NO: 13531 - DNA, 4163 bp, Vitis vinifera
  Intron number 12 from transcript GSVIVT01015768001 (locus GSVIVG01015768001) derived from phytozome v7.0 (chr-ID chr 3; pos 17181862 to 17186024 reverse strand)
taaagagcataaaagtccttttgctaaaacacgttttaataataataataataataataatactaacaacgatcgaagtcccgtaaatttggattcatatgattcatcacctctcactatcaaaatttgccgccccataaaagatgtggctattaagagctggaggaaccatgacgattaggagccacagcttctaggccaatgcaaaagacaaaggaaaatgagattcacattggtgttggccagttaggttaaagttcaatgaatttaaaacaatgttttctctttaatttcgcctcaaaatttcacatttttcaggcttccttctagattggagcttctctagcttcatctcaaatattcttcattttatgtaagatgtcttagcatggtcacacctgttgagacgtcatttgtttatttggccctggtgccaccaaaaacccagatggtacaaggagggcaaaccaaaagtccttaaggcttggacccaagttcgaatcctgggaaggccactctgggcgtcacgcaggctcttcagcctaggcaccagggccaaataaacaaatgacgtcccaacaacacccttttggattgctaggtagaaaatttaaaattgtgtgtcaaataatgtatatattatgtatggtaggccctataaatatattaattttggtctaattctatgtttagctgtataatatgtgtcatgcaatttagaattcatcttgagaggaggaaggatgtcaaactttaagatatatatttttatattacaaattcataattgcatgaaaaaagaatattttatttatttaatataattagatgtaagcataaaaatttaatatttatattccataaatcatacaaaaattaaaatattttatattaaagttgtgctaaatggtagtttgagaattaaaaaataacctatgaataataatagtttaaagtagataataataatttcaatttacaactttattaatttttataatacaagttgatagagaacatattcttttgatttctatttttttgtggttttattttgcagtggataatttatagttatttaaaatgtaaatgttggatcgaccttaaaatggtaaggatttgacaattatttgataattgttttttagaatagttttctgttttgtagaataaaaaaataagaaaaacatatttgataaccaaaaactattgtttttgttttttgttttaacaataaaaaacaaagtgtttttaaataatattttttagttatttttatttatttttttaaaactgttttaaaaaataattatataaatatataaaataattaaaaataaataattagatataaaaaattatttttaaaacatatttaaaaatattaaaaataaattaaaaaaattttagattttcaaacaaacttttattctaaaaaaatcaaaaactatttttaaaaatagttttaaaaaataataaccaaacaggccgtaaatctcctttgggttctccttctcataatgaaagcttgcaaatttgtagagaaagaaaccagaaaaacatagcagaaatagggcacacataggcaacaagaattgcaacttgtttatgtttcaagattttttagatacaaaaatgagaagcttgctcaatacacttctttctttccatccaagccctccatctgtgaagattataaccatagatcagaaagatgtttttaactcatcaacaacagtacatttttaatcatccaagtgaaaagggatttggaaagaaaatggcaaaccccagcaatgaaataaaaacaaaagttacaagaagaaggtagtagtagaaagttcaaaaagatatggtaggcaattcctcccaaaaatcaacaatggcattccttcgagtgttgccatatttactgaagattttgtgaatgatcatttggttttagccctacctctgcattcgttgctcaccagaatgggtgtttagctaactactacaattaaaatcgaatttgaaaataactatggaggaactaggatttggaggatttttggtgagaaaaatgcaaaaattcaccatggtctttgcatgtggctttcatagagatttgatccgctcacatgttctctacacatgcatgacacatctttgattttctccctaaataatgtccttgtaatttttggattgaaaccagaaggatttaaagttcaatttgatatgtgcaaagaggggaatagagaattagaatcaaagtattgtgatgagaaggaactagcagttgctattaacaattatggagagtcaaattttaggaaatatttttgatctttttagtacttaaaagcttttactttttaaatgttaaaaaatgcttcttaaaattattaccaaatagatttcaaatctaattttgggagttgggtttttggatgtatattactactaatgttattgactcatcttttattaagagtatttggtttatttaagttaatctaaatgtggagatagtggatttagtcatgtcctaattttattttttatgttttagttatcttatttagaattaaggatgaaaatattgataatcacagatatatcggtacttgaattttacagatatattaggagatactttgaaacaaaatattgatagataaaaaattaataaaaactcatggaaacgtaagaaaaactcttaaaaatgaaattaaaagtataataaaaatttcaaagttgttttgttgaagaaattaatatatgtatgatatgatttgtgatattaaatttaattatatcatattgattgataaaaaaatgtgaattttatatatgtacactcattatgaagctaaattattgcaaatatactaattgtgtgatttaaatatattattatactaagttaatttacttacatctattgaaaatatattaattaattataaaaatatactaatttaaatttaatgttataataatttaaaaacatattacgttaatttattttcaataagctattatcatacttgaatatcaaaataaaataaaataattaatttaaaagtaaattattgcaattgtattaattatgtgatttaaatgtatttataatttttatttaaaaataattatatattttgacataaaataattttattaaaaaatatcaatagatattttgatataaaatattaataattttatttatgattttatatttatcttatatttaattagtatataagaataaattataagataattaatattaacttatttataataatttaatttttcattgatatatatttttgatatttcaactatttttttctatctatgatcgattttttatatgtatccctaatatatctttgattatccatatgttttcaatatttactaatattttcgtcaaccgatacatagttatggcatctatattttttttacatgtgcatccgactgtcctttattagaactcatcaatttagatcaatttttttgtttttttttttttttgaaaatttcaatttctagtccagtcttagtgcacgacaacaccgtttataatcctctcatttgaagtaataataataatgaaaagggccccactcaactgcttcaccagtcctaccgtgagatgatttatggccagtcattcccatccaggataattgaagctttgatacggattgatattgacaagcttttaatatgtaaaatcagattagattagccgtatcccatcacgactgaattcttggccacgttaaacacatatgggcagtgcacatgcgtgtgttgagcgtgcacattgtgaattgaacctaggaccacaaatttcttcttaaatcacatgctcatgaagtctataaatgaaagggtagtttcatgagactacccaggaaagatcacaagcgcttgctctagctatctctctttgtttaccatgccttctccagtgcaacctggtctaagtgatttagaagttgaatatgactcggcatatttgcaaagtcaaaataagcccataaccagggggccactagagatggaaactgtgccaaggccaagacctagagaagttttaggtggtgtagataaggagggtggtattttcttgacatgggaggatttgtccgtgactgcttcca

SEQ ID NO: 13532 - DNA, 881 bp, Vitis vinifera
  Intron number 23 from transcript GSVIVT01023974001 (locus GSVIVG01023974001) derived from phytozome v7.0 (chr-ID chr 3; pos 2013227 to 2014107)
cctgttgggcaattggagaattagcagttaaggtatgttctccaattttttcttcagcaaaatcattccacatgatgtgcctttctgatttattgatctgtcttaaaagttgactggattttaacataagatagaatgggttcccattgaagttcatataaaagaatatatttagtttttgctgatttatagatttgtgtgatgctgatttttctactttatttggagtcatcctcatagacattcaaccctgggtttcttcatcttgccaatgtaactgattgctgatgcctgattgttgcgaaagcacattctttgtactaggtgtagatgctgccttgtcctttattttaaaacagcagtggcatgtgctttgtgactggaagttatagtttttctcttcatatttcttgaagtggtttcctctagttaataaacccacatctttgagtgtagtgcatgtttcctataattctttttgtagttgaaagtttattaatgcgtcggaaaaggtgcactagtttgcaaattggtggtatatgaagtatatgattccatcaatcaccagccctgtgaaatgccctattaagtaggtcttattcaactttgcatgtgtaattctttgaagaaaaagtaaaggaagggtcaacttatctggctctgcacaactgccatcattgttcttgatccattttcaatatcttgttcagaattgtcatggattctaaatgtaagattgtcctattcttggtattttgtacttttctgtatcactatgaaaagagtgcatcatctaggttggtatcctgtagaatagatgaaaggacactgactgtttaaattctcaatttcaggttcatcaagaagtttctccaattgtg

SEQ ID NO: 13533 - DNA, 3437 bp, Vitis vinifera
  Intron number 8 from transcript GSVIVT01017416001 (locus G SVIVG01017416001) derived from phytozome v7.0 (chr-ID chr9 ; pos 8227331 to 8230767)
gtttccgatagtctttccaagttatcaacatatttgtataattagatacttttagttggatgatgtttgcataattaactactatttgtttccagaggatagaaagaaatgggatgtataattgctatgagttgaaacttacgtactttgctcaaatttcggcatcctttgcttttattttcaagtttcgttattttttatttattgtttatttcaagatttaaccatattatgttactcttataaaaacaaattcaaatttttaggaacttttagcattaaaataatttcataatcagattttaaaaaataaaaaagaaagaaaataataaataattggaaaaacaattcaagggagtattaaattatcatcttagaattgtttggtatagtatgggaattaaaaaataatctttcaatttgttagacatgtttatttatttattatggcaatgattgaaatatcaatcacaaagtaatgttttcttttcttttgtagggcactaacactttttctttgatagtaataattgataaatattttacacagttatttgtttttaaaaagggagggatgacaaatataatacgtgaaatatttctaaaactgtgatggtaaataagccatctaattagggtgtaatattatttattttaatttatttgcatcattttttgaactattttatcagattaagggagattaaaacatcatgagtttgttattttaatttatatttttaataataaagtatgaaatattaaaaaaaataatcatgaatttctttaattccttaggaaaccaatatataaaaaaattgaatatattattattttatgtcctaaatttctaaagttgttcatcatgtattatttttatattaaatttattatcattaattatttattatatattattatttatgtttaaaaatgttcataaataattaaaattaataaaaatataaaaaataaaatattaaaaaaattaaattaaaaagatttcatcaagctaacatgtttttttttataaaaaaaagcaaaaaaaaatggggatattataaaggaggggaaaaaggagctttgacccaaaatactacgttctaaaaacaaaattcataaagtaccaccctttctaaaataatgtccaatctaatgtctctgtgctacatagattgccacgtcataaaaccgtagttggtaactacggttttattttttaaaaatagtcaaaaccgtagtcaccaactacgactttaattttaattttatatataaatatatatttaacttatatttttttaaataaaatattatattattttgattttatattgattaaaaatatgtaagtggtgtaataaaaatatttaactttaattgatctcattatttaaagaatagtaatatataaaattaaataattgatgtctttaatttgatataaaaatatattttgataattttatgaaaatatttggcactacattcaatataaatataattagttataaatatactattttataccctcataatgaagaatattatattattttgtaactttgtgcaaaaattaaaggcaattatgcacttgttcaaaatataatatgacttcaagtgggtaaataattggaaaattacttaaatacaacaaaaataaattttttttttccatttttctcctttcgaaatgggatcaaaatggaatggaaagacttaaaatgttaaacttaaaatgtcaacctaaaagaatttgtttttccacttcttaaaatatagaattgtagaaagaaaatacctttgtttttccaatcaattcgctatttagtttaattgttttagtaaatagatgaaaatgcttttgaaatatttttgtaaattcattgataataagaaaaatgttttttattgggtactaatgggagttttgggcaaaaataatttctttaaaacagaaaattcataaaataattttattcataaaataattttattctcaaaataatttttaatgtgatgtgtgtcttattcatgtgggtattcacatcataaaactgtaattggtaatcatgatttttgattttttttttttaaatagtcaaaatagtagttagtgatcataactttaaatttaaacctaaagccaattttttaagttcaaattttaaatcatatgaatgttcaattttttaaaaattattttgattggaggtttagattgtaaattttttttaatatattatcttttctatatcaatatagtgttgttgtaactaattagttataaatataattagtttaaatttaaacctaaaaccaattagtttaaatgaataaaactaattaggaataggggaaaaggtaaaggaaagttaaagccgtagttggtgactacggctttgattgtttttaaaatagtcaaagtcgtagtcacaaattacggttttaaacttaaagttaaaaccatggttggtgactacgggttttgactatttttaaaaaatgaaatcgtagttaccaactatatgacgtttatggatttttttttttaaacgaagtattttgggtcatcgggaaaaagataaaggaaaaatcatgtggtatgataattgccacgtgtcaaagttgttttctttaaaaaataataatagtaatgatgagctcatttgtcttatcaaagtaaataaaaaaacaaaatgacaaaaaaaggtggcagttggccgaaggtgagagaggagggtttgagggtaagttaggaatattaattattttcactaagtagatattttgaaggttattttttccgaaacacatattctttgaaaataaaaaatcaaagttttaaaaaaatataattttttttaaatgacacatgattacatcattccccctagattatttgttcatttaaacttttgtttaaataaaattagttttaattattttctttttggaattatatttaacatttattaaaaaaaataaaaaaacatagatataatattgttaatgagttttctttttaatattttgtaaaataattaaatttaaaaatatttaaatttaattatgggctgcccatttcaaaataataagaatctcataatctaatttttccaaattccaggtaaatatgctaatctaaaaagaaaataataagaatctcataacctaatttttatgtgctgattgggtttttttcctttaatttaaaaaaaaaaaaaaggaaaaaaacaaaagtgtgcgatcctctttctcgagtcttcacattttgagacactgaacccaaatcaaaattaattttcacctccaatccaaaccctaactgctgcccccgttttcgttttcttcttctctttccgaaaacccaccggaatcggaagattcataattcttcagaattaattttcacctcgaagccaaaccccaactgc

SEQ ID NO: 13534 - DNA, 6244 bp, Vitis vinifera
  Intron number 3 from transcript GSVIVT01005082001 (locus G SVIVG01005082001) derived from phytozome v7.0 (chr-ID chr7 ; pos 14354971 to 14361214)
aggtatgcattattaaaacactcttaacatccaaacttcaacccttgttttgatcttgttttttcaatgccagctaaaatcttagtcattcccatatctggcgtatttattattgtggaagaatgtcattagaaaagataatagttgtatatttttgtaattaagaagaggattaagacaatcccgtaatcaaggggatttaatagaattaggtcaagaaagtttctattttttgtgctttggaatatttgtataaatatgtgggtatgtatagattgaaattaaggaagaaatttattctcttaccttcaaattcttcttcaaattctacatagtatcaaagtttaagcttgtaaatttgggaagagaaataatttttttttttggtcatcattgccgagttgaagtaatttccctcttgtctgagttgaatcgttgcatcaaacccagattgcgaacacaataaagcaatcatagtcatagtgtgtcacgctactattgcaaaagaaatcgcattatgaccttcatccccaccctcgcattgagatcacattgccactgagatcgtgttgccatcgtcttcaggccatcttcaggacaacttgcacaacctataaagatcgctaaaaagatcccttgtcgttgcaccgtcactaccatcctcacacctcgtcgttgccatcctcacacctcgtcattgccatcctcgcaccttgtcgttgccatcgtcacctccttgtctcaacctcattatcctctactgtgcccttttgtttcgcactactagagacgttttgctttttccaattgtgtcaaagctcttaacctctagggttattgttttttcgaagatcatgtcgtcactttcatatatctcctagtgactacaaccctcatcccaactatctttcattgagggcaagatcatgatgtcatcaagatcatgagctaacgtagctacaaccaactgtcgccacctcagatcgtcagctaaggttcccaaacctgtgcactattaagtctgggtatttaagacttcagttaaagactctcaacctatttcataagtttgtttttttaaaaaagaaaaaaaagtgtatgtcaatagtatccgaaaatactattgaatctgaaggaatgacaatgagttacaatggaaggcaacaaaatgatattgaacaattgtcttttgttcaaccaattgaaagatccctaaaactaggcagattcaatcgagaaaagattgaaaaacttaaaattttgttaagaaatctttagaaaccttcaggcacccactcactagcactttcaaataagtttcatattcccattggattaaaaatctcggatgaaaccttttccaacccataggttatagatttaggtgccataaattacatgactcattcatcaataccaatttaataattataacctttgtccaagcagtaggaaaataattatagtcaatggtttattaaccagtgtagaagatatccaaattagtcctacactcatacttagaattgtgcttcatgttccaaaattgtctactaatcttgtctctatacaaaaacttacacaagatttgtgttgcaatgtgattttttaccctactcattgtgtaggatatcatttgtggaagatgattggattttttaaggaatggaatgggctatattaccttgagacactaagcaaatccttcgtatcttttcattgtgagacatatgaactagctaaacataagtgttcaatctatgtaattcacagtgatatttggggtccttcacttgtcccaaatatatgtagggcacgttggtttgtttctttcatcgatgattttactagggtttgtggatctttttacttaaacacaaatctaatatcagttttgttttcctaaattttcataacatgataaaaaatggtttggtgtcactattaagaggttccagtcagacaatactagggattatttcaatcaagtcctaacttcatactttcatcatcaaggtataatccatgagtcatcatgtgtgaacaccccacaataaaatggagttgttgagaggacaaatggtcacctccttgatatatcacaagtttttttgttccaaaaacatgtgcttaaatcttattggaaggaagtcgtcctaattgccacacatctcataaactgattacattccatagtcttaggtttcaaaagtcccaaggaaatattctcatcatttcatcctactatgagaaccacaagccatatcattcttaagatatttaggtgcgtgtcctttgtgcatattcacattccaaacaagggaaaattagacccaaaagcagctaaatgtatttttgtgagatattcgtcaactcaaaagggatataagtgttaccatccatcatccaatttattttattttatttgtctcaattgatgttacttttcaatgaaaaatagtcttattttccccttcctagtatttgttccctcctttgaactcaattcatccattgagcctactcctgagaatcaaggaaaaaaactgcaattccccgactttcaaatccaagaatttgaatcaacttttggaaatgaggtaatagtctttcatcctcccttacaaactgagtcagaactttagtctgaaaaactcatagaccaaaacctttctattgccatcaagaagggaaagaggaaatgcactaaacattctttgtatccattttcccattttgtgtcatttgaaaagttgtttccatcccataagagttttcttacaagtttgaataatattcatattcctatcactttattcgaggctttatctaatgaaaattggagacaagccatgaatccaaaaatggaggtcttggagaaaaataaaacttaggagttggtagatttgcctataagaaaaggccaatgggatgtaaatggatctatattgttaagtatagagtagataagacattagagaggtacaacacaagattgatggctaaaggatatacttaaacatatgacatggattatttagagatatttgcttcggttgccaagatgaacacagtcataattttgttatcattaacaacaaattataattgggatttacaacagtttcatgttaaaaatgcatttctgaatggagatctgaaagaagagatttatatggaagtccctcctggatttggaagtgatttaaccactaaaaaagcgtgttaattgaataaaactctttacgagctaaaacaatctccaaggatatggtttggaaggtttgctaaaatgttgaaaaacatggaacacaaacaaagttagggagatcatatgttgttcatcaaagcattcagatttaaggagagttacaactcttttggcatatgtagacgatatcattataatgggaaataatgcaaaaaagagatagactttaaaacaatgcttaactaaggagtttgagattaaagagttagaagagttgaaatacttcttagaaattgaagttatacattctcaacggaaatatataacagaccttctcaaggaaacaaggaagttggcgtgtaaaccagaaggcacatcagtagatcctaatcatgagcttgaagaggttgagaaagatactatggtagatagaaagatgtaccaacatttggtaggaagactcatttatctctttcacacaagattggatatagcatatgttgtaaatatgattagccaattcatgcatagtctaaaagagattcatttgcaagctactaatcgagtactacagtttcgtaaggagtctctaggaaatgacatcttatttaaatgaaacttagggctagtatttaaagcatacacaggtgtagattatgttggatctatggttgacagaagatcaatcactaggtattgcacttttcttggtaggaatctgataatatggagaactacgaaacatagtttggtagcgaggtctagtgctgaaggtataattttgtgcaatgacctaaggagtttgtgaattactatgattgaagattattttggaagatttgaagattaaatggaatgacccaaggagactttagttttgcaatcagcattgcacataattcagtgcaacatgatcgaatgaagcacatagagataggcaaacattttattaaggagaaactagatagtaggttgatttatactcttttcttggtaggaatctgataatatggagaactacgaaacatagtttggtagcgaggtctagtgctgaaggtataattttgtgcaatgacctaaggagtttgtgaattactatgattgaagattattttggaagatttgaagattaaatggaatgacccaaggagactttagttttgcaatcagcattgcacataattcagtgcaacatgatcgaatgaagcacatagagataggcaaacattttattaaggagaaactagatagtaggttgatttatactctttatgtatctattgaccgtcatcttataaatatactcatcaaaggtttaagcaatacaacgtttcaagtaagtgtatccaagttaggaatagaaaacatttattcaccagctcgaggaggagtgtggaagaatgtaattagaaaagattatagttatagatttttgtaattgaggattaggacaatcctcgtaatcaaggcaatttcatagaattaggttaggaaagtttccattttttatgctaggaatatttgtataaacatgtgggtatgtacagattgaaatcaagaagggaatttattctcttgcctttgaattcttcttcagattctacaattatattatccattgtgccttatctcaatattcaaaatcagcaatacaaaaaataattggttttattggtcgatcaaaggccatgcattaagttaaagcagggatactttctagtcttttctttatttagcacctttaacctgcagtcattacattttctcattagtatgtttactcattgtccttgaactccaaagccatttcaatctcgcccctaaatttattacctcctatatctgcttacaggattttgaatgtatcctgatggtttttcaaatatccatcagttccttggaatctcagctacactaactgtatgaagctaactgagccaacctgtgactggattgttcatgtttgacttagactgaattattttagccctttcctagctcatctgcagtggggtgaaggaaatgaaattacatttttcaaaactaaaagtgatgcatccgacgtctaggtttggtgaaatttaatgggacaatacccttttaaagttttttcaaaccccaacaggttctgtaatcaattcaagataattatgaataccacttttaataaatttgcacgtaaggatatgtaaattttagcctctatttgcatgcctttcgaagcctagtctactaaagcttagttcctttagcaatcaacttagagctagcctagtatgtcttaatgatcatttatcctgtaaacatgacctggtaaacaagccaaatatgttctgtttatgagcatatcccatttgccagtgttggaaaaaactgtaatattataatatgtagaaggtattaaggaaagcagcccagattgcttcaaggcacgttagaattaattctttctttgagatgttattcacccccatcaatttgtcaaatctggtgtgcactgtgggggattagctagttactgtaagatacaatgaaacccagctatgcccctaccttatctgcagcgaacataatgcttgcaagagttggaaggagatgagaaaagaagacttttcatatgtttatcccaaaactaagcaattgtacagaaaccaatttggaattatccaagtcaattaaccatgagatatgaacacatcagaatcatgatatatacatatttcctgaaaacttcctatcatgtagaaactttgaaacagcaccttcaatcatatgcttaggataattgttttcaggaagctttttgtcttggtctctgtagttatgatccaaaatttggtttctattcagcttatagagactttattcctgacatttgaacatcacaaaaacaagatggtaaatattggaatcatgttggctgcattttatgcttaatgttaaatccttctgaccttctgagttggtggaggttgggtaacacacatggtgaagttgaggccttggagtcttatcacttgaatttatgcagat

SEQ ID NO: 13535 - DNA, 4186 bp, Vitis vinifera
  Intron number 4 from transcript GSVIVT01014604001 (locus G SVIVG01014604001) derived from phytozome v7.0 (chr-ID chr1 9; pos 5532168 to 5536353)
gatttgctgataaggttagtctgtcttgtgtgcagttgaattatgcatttcaattatgtgttgtttgtctagtggaaccagaaggttaataactgcttgcacgtgtattgttctgttgctgttgttcttttctctattctctctcttttttgttgttcctttatacttttgatttcataaatttttatgattgttcaccataaaattatagaatggaagaaagagttgtgcagaaaggtatttttgcctaactaagaaaattagcatggaacaagaggatacagagagatggcacaagtggcaaataatcccaatggaatacttatctaaaaaaaaaaaaaaaaattcccaatggaagtttgtcccaaaaatacataaattctttcttcattagagaatctatcaatttctcagccatcagactcaggagatagctacaagtaacaaaatgttcgctatacataccaaaacatggattcccttaggattagactatttttcaaaagtttctcccaatgtctactttaagctttctttggaaactttgtgaagggagactaatagtaaattgtaacctgtaacaagtttttttttttttttttggataatggggaatcctccctgatggcagggcatttatcccaactactggtgaagcaaaacctaggcagtctgggctcaaccctctactctgcatttgcattttggatttcttcttcctataatatccatttgagtggcccccttcaaacttctatttattgaaactacaaccatcactctgtttcccttgatgtggagggactccagtgtttccagtttctgtactgttgcccttctgaaatttctaaatgtggaaagctattgggaattgtttgagcttttgtggatacaacccatggaatgagataaaactttgaaagcccatctagacctgtgctcccagtcaccctgaagggaaaccaagaaaatgctctttcactgaaacctcttccttttgttgttacgtctaggtttccattgagaattattaaaaatatctagtgaagaaacctaggactgttaaagaagtcaaggatataaatacaaataccccttttattatgttgtacccttgatatctaaaatttgggtcttttttagtcaggtgttttatttttttattttttatttattttatttattattattattttataggggatttggatcttttttagttggttgtctgtatcctaaattttggagtcaaaataatttgagtcctagatatttatttgcacacaagtccaagcaacatagctacaaatgatgtttgggaatagaaggctccatttaattatgtggtccaattgctctagaaagactaaaaattgataatatcattgttttgataagtaagagaatgcaaaaaacacacaagagtacacaaaaagtttacaaagaatgaagcaagcgaaacaaaaaggaggggacacaaaaaaccacaccctccctcaacaagaacctgaccaatgtacaatatcaatcaaagacaaagtgcttccatctatgcacacttgaatccacatagcaagagagcttaggaaattgataagatcattgttgctcacttaaagtcattgtgggatcatgtacacccttgaatccaagtgttctgtgtttttttttttttggaaattgaaaatgttatcatgtttatgtgtaagcatggtgtaagattttggttccatttttcacttcaatgctatcccatttaaagtataatggtaattccttcaatcttctctcttgccctgccatggcccttgcatttgtttatataagctttttcttgttaatcttgaaatgagtgcctgttttctatatatatcattcttcagttcacacaccggcagtgccattccattttaactcgccattgcggttgcaataatgtcaggttttttatgaagttgtcttgcaagtggactataattatttatattccatttataaaaataagttcaggcatgaatagggtcctcttggttaggtttagtttactttctttttcttcaatatagaaaagaaaaatcccctactcagaccaaactcgtcttgggttagggcagctgagtttattggcattccctcttcaccaggcccagattttggtagcaggtaaatttgggctgtgttgggacgggttgcattgtgtcacaaagtcatccacctcaaaatgccaatctttttccaaggaaaaaataaactttttgaaggaaatttgcaggattaaaggcccacataatgatagagaatatggatcaactccacaaaaatggatttcctccaaaatagccctcaagataagagcaaagtcaagaagataaacaaggcccagatactaaagcacacagatcttgaaatatagaccaatctcttcttgttaaaccgtacgaaggattcaaaacacctcagggaccaagatgctaaaaaacaaagtagaggcttggaagcataacctaccaagcaggatgttactggcttgagttagtacccaagataatgtgaccaagactgcagaagatgaggccaatgcagatgctggagaaaatatcaagaagatgcaggagaaatgatgagtggggtgttagggtttaaaacgttttgagagtgtcagtggagagatttatggagaacatgttatttatatgggattcctatgggatttgtaaaagttgaagggtaaactgcaatggggtggtgtagaatctgatcctgccccaaactgttctgtgtcttcaaatgcctccctgaactcgccttgaacccaaatttggcttccctaaacctgtcccagcagtgatggcctggccagattactgataaacccaacccactgcatacctaagtgaatataactaccctttttttttttttttctcctatcaaaaaaaaaaataactacccttttttcatcatttgttgcatatttatttcatgagtaatccaggatcattcatcatgtgcaattgtattagaatgagtgcctaacaagaatggggtgcaatccatgtatgcgtgaggtatacaagtaacaaaagcacgaaagtagaacctatagccctaactagttaaccaatttccattttatcaacaaggtccaagaaagaccaaacacttaagctcacatcctcttttatccacttatgcaccagttgacatccagaaaactacaacatatatgatacttccttgtattctcattgatttgagttggaaggtgttcacccgcttttctaaaaagtccatgtcttttgtatccaagctcctagttgctaaactgcccccaagagccaaaaagattgatggccactgttaatcttcactgcaaaataattttttgatatttatttttgcttctcttgtatttaatcttgttttgattactacaattgtattctcacatctatgatcatatttttaatttgaatggctaacaattgcattctcatttttatgatcatatttttattttgatgaccatccattgtgaatgttgactgaggaagaaaatattattttccatgggaattgacagttttcttgaccaaactttgaaattatgtagtggattgagaggaaataataatgcttgctgtaatattatattagtcatctgtatatatgcatagtgtctagaatgccttatccaaccatgcaagtccagtgacaagcatcttgctttaccaatttaactcccaaaagccatggtttgggttaattcttggagtttcaaactttatttatttattatcacttttttaattttctattttttatttataggtaacattctttttctgttcttaggacttgaacctgaaacctcctatattcccaacccaaccccttgccacttgagccaggccttaagagcttgggatttcaaactttgcttattctaatttcatccatgtctttttcagccttgctcttccctttctagcctcaacttatacaatcatacacttcccattttgctgttattagtgtaaaacattttcaggatgcttttttctgtggatttgtggatttgtgtaaatgttatatgtgtgcttccagcttgatgctgctatcctttatgtggctttgagattggatgatacatttctttctgttataataccagattgctgacggg

SEQ ID NO: 13536 - DNA, 3089 bp, Vitis vinifera
  Intron number 5 from transcript GSVIVT01038610001 (locus G SVIVG01038610001) derived from phytozome v7.0 (chr-ID chr1 6; pos 21522971 to 21526059)
agtgaatacactggtttgaacccacaatcatcggggtggtcagggaatagggagccagatgattatcaggttcaatctgcaattggtgagctctctaagcttgtgctctctcaaattatgaaccttcaatcagatgcccaagacccttaaaaagggaggccacccaccctcctcccagcagcaatctggtaattggtttgtaaaattatggccagatgacttatatttttaattttttttgccatattatcacagaatttgtgatctttcgggtcacgttcgtaggcatttgatgaattcttggaagtcctttagaatccttattttgatgatgtatcaagacaacactacccatattttataaaattcttgataacctctatcatgttgtgtactgttctaaggaattctgtaggggtttgttgatcattgagtctctttacccggttaagttgatggggttcttttcttgaaagcaccgggtctttaacctacctttgttatactctggaaaccgttggatgtttccaggcaggtaaatttggtagtaggcattttcctagcataacagtaaggagatcagcgtctcaagtatagggaacgaaattagtggatttcatgtgatgatgtggcctggttgagcccaattttcccgcatttgtaccttcatggtctgaatctgggttttatagggtatgggtccttgttctgcaacgtcctaacaggcaagtgggaatgaataatggagttatagacttgtataaagtattgtttggtttctgggttatatggtgtttatatagggaccactaggaaagttattgatacgagtatccaaacgtgttccaatttcacccacctcttctcgttcttgtctgaccgcatgtggccagtaccccccctgagaaaacagctgtggatgattgagaaccctcctggatgtagctggcactagacgtgttacactgaatttgggtttggccaattcgggtaatttcacactcaaaacagagagctgtagcctcatttttaggggcgtataaatcattgggtgagttcggttgtgaacattaaagtcaaattgaactggactaatccattattaataatcaaataaagttaaagaccggattgatcggctcggtgtctaagtcggtttattttgatttggtttcacagtaaggatcaggcccgaagagtagtgggtcgttgagaccttcacctaactcttaccctttctaacaatccagtcaacaatcaaaaatctaaatggataaaagagtagtggtcaatgctcacatgtctataaaggatgtttagtttttcggctcactttcatttacctttcgtatcgaatgtctcttttaatttttttttcttaaaatatgaaaaatatttgataaaatttagaactattgggttagatatatttagccaaaatttcgttaacccgagtttttatggtagatgcaataacatcagttgtgttgttgcattttataagcaatgaggggtgttcctatgttaatgatggctatgaatatctgttaccatattaatatatagaacgtaagttggtgtattgggaattctcggaccaccacaattatgcatggagtcatcttatattaaatgttaccagaatgaggacaatttcatttttatagtggcctggtagaggtggttaaagtattgaaagttgcatcaaactcaaagtgaggttgagccagaatccattgttttgtttttgacaattttttttttctttcattttctcgagaaaagaaaaactcaaacgagtaaggttaaaaagtttccggaatcgctatcctgatttgctttttccaattcaattcaacacgaacatgtatccatagaagagacaaaagactatgctgaagttaaaccattggcggcttgcccatcaagccatcacacacaagtacaattgagaaactaacacaagaaaaatcatattagtctaaattgaaagttctcaatttcaaatttgccaactaggttaggattttagtgatattgcgactcagtcttagccaggagcaaagcaaagttgacggtggaatagttggtgtttggtgacgcagtcagtcatatgttaggtataattaattaattattagtactgtaagaacaatgagaagttggggtacgtttggtaggagagagagagggagtcatgccagaagagttgtcaaaagttgtcacaatcgtgccttaaaagtaataaataaataaaaaaatctattatttttaacactactttttcctcgcaaaacacactccataaatacctccgatccctaaatttaaaaaaaaaaaatcagatttggagttgtttttactctttagtcaaagaaccatgcgactccgaagaaaaatgatacaaacgtagctattagtataattaacgtaagggagactaataggaaattcgtattactattttaaaacacacattagtctcattccactatacacattattctcattccacaattaatttggtcatgagtcgtagattgacggccgaggcatgaaccccattccttcctctgcagccggccaacgcagtcttcaaaccttcaaccaccgttaaaaccatcccccacaagttgttccccgaaaccatatattatctctcatgacttctcatcgtgttcattgaaattcactcctcagaagtcagaaccaatgattctttccgattcaatcccgttccttctcgcattcgccgccaccttcttgattctccgtttgctactcaaaacttctgtgattcttatcgttagaaaatgggttcggtctctgggggacatgtgctatgtgtggcagtgctatagggttccgcagtacaatcagcttttgcaggaaaatgaactgtatcggaagctttcggcttacatcaactctttggcttcagtcgaggattctgattttgcgaaccttgtgactggttctagatcaaacgacgtcgttttgtctctggacccgaaccagactgtttttgatagttaccttggcgccagagtcgcgtggacgaacgtcgttggagaatcggacggtcggag

SEQ ID NO: 13537 - DNA, 10809 bp, Vitis vinifera
  Intron number 21 from transcript GSVIVT01019298001 (locus GSVIVG01019298001) derived from phytozome v7.0 (chr-ID chr 15; pos 1720535 to 1731343 reverse strand)
ctaattttggaagtactcgtcaatcgattcttcaggtatgaagtatcaaaaaagttgttgtagtctaattcactagtgatattgattgaaatgatagtaaatctattgcattgccaaatgttttccaaatatgtgagatttattgtttccagtgcatccagctttctattttctttctagatgcctgaaatcaatgtgcatattaatcaatgttcacctcagagtaggctcaaggattgtctgtagatgcatgctaatgccttgagctttgttgcgtattaggctcacactggatatgttaaaggagagaatactatattgcatttgccatatttaactggtttataattgttggcaacttacccagtttaactgatttatatattctatctatttcacattaagattgaaattagagccatcaatttggaatgcaatcttttgtgattttgatttcaacatttcatttctcttatttaactattgtatggttcttggaaatccttccaattccaagattccatctcacattaaaaataagtttggatccatcaacttggaatacaatcttttgtgactgatttgacatgtaatctgcatttcacaatttccacatgcaatctgtttctcaatattttaatgatttgacatgtactgcatttcaacattttcttccaataataataatttttttatgttaactttttacataatttattggttgaatattaccttttttctttctcaatatctgttaacttttcagtgtgtttcttaaatacgaaaatagtttatcactttatatgtggaagcagatggcctttgatggtcatatttgggcatattaagccttgcaccttactttgaacccttaaaacttcatttcttgatgcctatcaaactttcaattcttgatttgaacaattgcctgtaactttatggtttggagcacaaattttccaatggatccacctgattggcagttagtgtaagatttccattaagccacatggtaacacatacctggatatttatatagatatagactgaaaatctaatctgttgttttcactttcacacctactgtgataagctggcattttttttttttcatgttgaatatttgaatgccatgacatctgaaatcagattatattgagtcccagtataatttaagaaaacattaaagatgagtgtatcattagtagactcaaaatgcagctggctggatatgataattgcaacaaatggaaaccaatcttgctaaattctccctgtagtgaatgtgtatgcttctccaatcttcttgaaagttcaataaaatcgtctcccaatttccataattctaataggttattgatgcagcagcataggttgaagcatgcttaatcaacacacctatggtttactgaaaagggtgcaatttgggcactccaattatcaatttcaagggccatacaacctattacatgacaagggcatttcttacaacctagtccaaaattattgggtttggagaaattataatttgtgacattcacatgaacccaaagtttcaaccatataattagaattatcacattggatgatatttgaaagttataggatgtcacaaagatcttattttttatattaattttagaatcaccaatttgggaattatgaaaatgttaagatgctatgtcgggatcttgaggagctattttgagtccttgatatgttagaatcttggcaatgtttttattcttgaactacaatggaatgaaaatgtggtgtagtgtagtgaaagccatctccaagtttagtggagttagccatttagatattagcctctgtgggtgtcttgaatggtatgagttcattgggattaacaatcttgttgtggaaggagactcagccattgttattgcttgagtttctaaggagtagagaggcccttggaaactaaatgattaggtgcacaaaattgttgatatagtatttttttattttttattttttatttaatcagaacaaaattcttgatattttgaggggttacagataatgtttcaaagaccaagtgtcaataactaactttgggggttctgggagaaatcatgatagtagcatggattaatatcaaatgatacacataaccttgtgtggaaatatgggattatgatttgtaattaagtgccaagattagagggattgtgttaggatattttctatttttatggatgagagaatctctcctaattagttattgtttccttagagatagtgattgtgcatattatatggcttagattaggaatcccatttgtatatatataggtcactttgtattcagttttgacacagaaaaaagaagaatattttcttcatggtatcagagcattcaaatctgaaccacgtataaaaaaaaaaatcatctttttccatggagagcagaacggaaggatcaaactcagaggtgacgtccagacctgaagcagttcactccggcagtgccagcaccacagacggcatcattcttcccataacaggtcataaactcaatgggcagaattttattcaatgggctcagtctgttcggatcttcatctacgggaaaggtaaggaagaataccttacgggagccattgttcagccgaaagaagatgatccaggataccgaacctggaagttggaaaatagtatggtgatgtcttggttaattaactctatgaccaatgacataggagaaaacttcatgtattatggcacagcgaaggagatatgggatgcagctagagagacctactccaacatcgataatacctcggcgattttcgaaatcaagagtattcttcaagatcttcgacaaggagattcaactgttaccaaatattttaatatccttacacggtattggcaacaactcgatatttatgaagaattggtttggaagtgtcccgaagatggactcctatacaagaaggtcattgaaaaggaacgcatctacaaatttttacttggccttaataagaatttagatgaggtacgtggaagagttctaagtattaagccattacctagtgttagggaagttttttctgaaattcgcagagaggaaagcagacaaaaagtgatgttgggaacctaaaattcctccaaaaatcttgagaactcagccctagttgcacgaggaacccaatccaacaacaacaaccaccaaacgaagaagaatcgtccatggtgcgaccattgtagaaaacctggacacacgaaagagacttgctggcatctacatggtaaacctgctgattggaaaccttctcggccacaacaaaacagagaagaagacacatctggcactatctcaaatcctggtccgtttagcaaagagcaattggaggcactacagaaaatgttccaatagactcttcaatcaactggaacaactattggtacccatctgtagcccagaaaggtattttttcccatgccctaaatgttagatgggaaaatcacactacatggatagtggactcaggagcttcagatcacatgactgggaatgtcatggtttttcatgaatatactccttgccataacaattcctctgttcgaattgccgatggaaccctttctagggtattcgacacaggttcagttattatttccaaggatattactcttcattccgtgctctatgttccgaaaatggattgcaacctattgtctataagtagactaacataggatcttaattgtgttactaaattccttcctcacacgtgtgaatttcagtccttgaactctaggaagaggattggcaatgctgaggtgcgtgctggactttaccttctgagagctgaggaaattcgaaggctaccaatgaagactgcttgtgtagtttccaaccctagtaccaagacagatagtgttgttatgttatggcactaccgattaggtcacccaaaattttcctatcttgaaaaactatatccatcattattcaataaaaattccaaaaattttcaatgcgaaatatgtcaattgtccaaacatactcgcaactcctatttcattcaaccatacaaaccatctcatcctttttccttgattcacagtaatgtttggggggcctctagaatcaacaacattacaggttctagatggtttgtcacctttgttgatgaccacactcgagtgacttgggtattccttatgaagaagaaatcagaagtgagggaaatatttgaaaacttcaacaacatggttcagacgcagtttcaggaaaaaattcaagtccttcggacagataatgctcgagaatactatcacaacattcttgggtcatatcttttggagaatggcatcgtacatcaaagctcgtgcattgatactccacagcagaatggagttgcagaaaggaaaaatagacatttgatggaggttgcacgatccctcatgatagcttcaaacgtgcctaaaaaattatggggtgaagttgtactcacaacaacctacttgatcaaccgaatgccttctaagattcttcaatttaaaaccccgtgtcaaatcttcctcgctgcatatccatccgctcgaataatttcgtctatcctagtcaaagtctttggttgtactgctttcgttcacatccataagtcctaacgtagtaaacttgattcgacagccactaagtgcatctttctcgggtactcatcaaaccaaaaaggatacaagtgctactctccaacaactaagaaattctacacttccatggatgtcactttcttcgaaaatcaacctttctaccccaaaattgcaattcagggggagaattggtccacagatgaattccaattttgggaaaccgaaatcagcactacttctcctttgagttcatcactgcctcctcaaacagatagtactctttctgtccccgaaaacaattccttggatgtcccttctgtcacacctgagtcaactacacaaggcagtaaagaggtaatagtttattctagaaaaaatttaaaggaaaagcccgacaaacctcctcaaaaggagcccgaggacagcactccacctgagcagaaccaagaattggaccaggatccaagcaacccaaactcacaaccaggtaacacaatttatgatctagattccagtaatgaccttgatgatcttgatcaacccattgctttaaggaaaggtgtgagatcctgcactcagcatctaatcagtaatcatgtgtcctatggatagctttcacagaatttccaagcgttcatcacttctcttgaagatgatcgtatcccatccaacatccaagaagcacttcaacaacctgaatggaagactggtgttcaggaagaaatactagccttggagaaaaatgggacatgggaaatctcataatcaccaaagggtaagaggcctgttggatgcaagtggatatttaccgtgaagcacaatccggatggaagtataaagaggttcaaggctcgactagtagctaaaggatttactcaatcctatggcattgattatgaagaaacatttgcaccagtagcaaagctcaactccatcagagtgttattgtcagttgcagtaaatttggactggaatctccaccaacttgatgtcaaaaatgcatttctcaacggagaactagaagaggaagtctacatgaagattccacctagtatggaaactccagaaaattcaggaaaagtgtgtaaactgagaaagtccctatacggtctaaaacagtcacctaaggcttggtttgatcgactgactagagttgtgaaaaaacatgggttcatccaatgttaagcagatcacacactgtttatgaaacactctaaggaaggtgaaatgactctgttttttgatagataagcgttgaatatattgaagagaggccaaaaagccaaaaagtatacagggagtatacaaactagctaagcctcacaaccaaaaggaaagcaaaaaaaaaccccaccatcccttatctggaggctatccactccaagaagcctataagagacagcgaactctctccactatataatctcgcccaacaccataaatgacagaaaaaagaattttttaatttctgaattgctatcacccccccccaacagctagtctatttctttccttccaaagagtccaaaaaatgtacaacggtatagacttccatatctttttccttttttcctctacaaaagggcccctccagctcaataagacctcctttacagtttctggaaagacccactgaacaccaaacaaagcaaaaatcatatcccacaggacttttgccactatacagtgtatgaggatgtgatttacagtttcctcttcgcagccacacaagaagcaacggtttgggagttgtcaccctcttttctgaagcctatctagcgtaagcaccttaccccaagtggcctcccaagcaaaaaacaaaattttagttggaactttatccacccaaatgttacttttcggaaagttgttagccacggtattaaccaccaatttgtaagcttccttgactttaaactacccgtttcttccccctttccaataaactgcatcttcttctgaggtaggtttgtagcccctcagaatatgaaacaaattacctaccatatccaagcagtttttgatgaaagtcatgagaaaatggggttcggatcaaagtggttgggttggatgtggagtttcatatccacagccaagttttcggtgttggtgaatggagtgccagctggtttcttcccaagttctaaggggttgcggcaaggagatcctctttctccttacctctttgtaatgggaatggaagtgttgaacaatctcattaggagggctgttgaagggggatttctgtcagggtgtaggatccgaggaggaggaagacagccaatgcatatatcccatctgttatttgctgatgatacaatagttttttgtgagtctaggaaagagcatctaactcatcttagttggattttgttttggtttgaagccgcgtcagggttaaggatcaatttggataaaagtgaaataatcccagttggcgaggtggaagagatggaggagatggcagcggaattgggctgcaaggtgggttctatgccttctgtgtatttggggttgcccttgggggctcctaataagaatacctccatgtgggatggggtggaagagaaggtgaggagaagacttgcgctttggaaacgccaatatatctccaaaggcgggagactcattctcataaagagcacgatggctagtatgccattgtatcaaatgtcccttttccgtatgcccaagtctgttgcgcggaggttagaaaaattgcaaagggactttctttggggaggaggaaatttggaaaggaaagtgcacttagttaattgggaggttgtttgtacgaagaaggaaaagagggggcttggcttaaggaagctagtcccattgaacaaagccttgttgggtaaatggatatggaggtttgcttgtgaaaaggaaaatctatggaagcaagtgcttttggcgaaatatgggcaagagggttttggttggaagaccaaaaagactaatgggacgtttggagtaggggtttggaaggagattttgaaggaaaaagattggtgctaggaaaatatggcttttactatggggaatggtaccaaaatcagattttggactgatctttggtgcggttgtacagtgttgtcccaaaggtgaaatgactttgttcattgtctatgttgatgatattataattaccagagacgatgaagaagtgatagggaatctcaagaacctgctagcaagagaatttgaaatcaaagatcttggacaactcagatactttcttagcatggaagttggcaaaactaaggagggaattatggtcgcgcaaaggaagtatgtccttgatctacttcaggagactgggatgctaggttgtaagccagtggacacgcctatggatcctattggtaagattgataaagataatgacagtcatccaactaacagagacaggtaccagaggttagtaggaaagtatacttaactcacacaaggcccgatattggtttcgttgtgagcatggtaagccactacatgaacaatcccactgaaagacacatgaaagccgtatacagaattttacagtaccttaaaaagagcccgggtagaggactctacttcaagaaaacctcaagtaaggaagttgaggtattcacagatgctgattgggcaggatccttgacagatcggaggtcgactactgggtattgttcctatgtgtggggaaacttggtgacttggagaagcaagaagcagtccatagtggcgagaagcagtgcagaggcagaattcagggcaatggctcatgggatatgtgaaggaatgtggctccaaagaatacttaaggaacttggaattatatcaaactccactatgacagttttgtgtgataacaaggctaccataagtattgcaaagaatccagttcaacacgacagaaccaagcacgtggagatagaccgtcacttcatcaaggagaaacttgaagggggaacaattagacttatgtatattccttcaagtcatcaaacagcagacattctgacaaaggcacttccaaaggccacctacaaaaacatgaaaagcaagttgggaatgctagacatctactacccaacttgagggggagtgtggaaatatggaattatgatttgtaattaagtgccaagattagagggattgtgttaggatattttctatttttatggatgagagaatctctcctaattagttattgtttccttagaaatagtgattgtgcatattatatggcttagattaggaatcccacttgtatatatataggtcactttgtatttagttttgacacagaaaaaagaagaatattttcttcacctattaattgaaaagctcacaaatttctgacaaaataataatttttttaaataaatatagttaaatagacctaactaattaataaaaagtatccatcacatttgatattgtttaaataattataaaagcgcattttcagattgtctttgacattattaagaattcaaaactgtaccattttgagtgcaattgtttttttttacctaaatttgcataattctatggtcaatttcatattgaatgacacaaaactcaaagtcactgttatcagtcctacaatgagtatataaatggtgatgataattcccatgggaagggtatgattgaaaagttgtccaaagttcaacttgctcgcaaccgggccttatatattgaattcattgatgtgaggaatgctgcaaacaagtattagacttaaccagtcctttgaacgatggttcaattgtcatttttacttgaatcaatggactggctagctaagtgtgaatcaactggccaaacaaggagcctcaaaaactcacagcatttcatgtctccctagttgatattttgttgttaagtcctcatggcctttggttttactatttttcttgttccttgagtagtttttgagtgacctgtggtttaactaatgatttgaaaacaaatagggttgagtgccctcccttttccccccaatagatcttgtatatatatgctctgaaacaattgaagtttttgagatgaaaaaacctgtttttggtagatttttaatttgaaagtggattccttctctcaattgaagattcctcagggcctcctggaagtagtgcctaaaaaaattccttgctacattttcttcatatttgtaatgtcatcttccttaaattcatcttattgtcacaacttttctttcccatttctgatctctttctgtcctatcttgtttttcgttagtttggtaccagagccaaacttcgaattctagaccccatccattcgatagttcttcattaagggtaagcatttcatcccaatatgtctgcaaagtatgggaagctcaaatttgatgcacatcttatatgtcaatggcttcaagaaaagagaacatgttacaagcatgagcaaacctaaagtacaaattgctgggaagaattttattgtaaatattatgattctattatcaaccactcaaatctagaaaatcaatcaccatatgatatatgtgtctactttagcattatgaaggggagttcaaagtgattctatcaggatatatgctctacttagcatttcaaagaggagctagaagtgattctatcagaggtttcaaatttcacctgaacaagagaccagtttactggagtgtaggtttccaccaaacagttggttaacttccatattagagtttgctaaataaacaatgtattcacagagatttctatgagtcatataggataagtatttgacattaggagttcccttctctctattctatcgtttcccgacaagtgtcatggaaatcctggaacttaataacttgtcccaacttttcttttattatttatgcctttattctggaaaatagaagaaagcaatggtgttatactagatttcttctggtcttatttcttgaaataatatagagaaaaaagagtagaattataactagtggacttccatcctttggtttatatcacttgtgactcttccagttagttaatatttgtactcgttttctgttgccatgtgaccgtctactctcatctcattcatgatgatgagttgtcaccttgtttcctttggcaaagttttgttaacgaagtatctatcaattgatttgtgacaggtacttgccaatctagcttcagttcagtcgtactt

SEQ ID NO: 13538 - DNA, 8055 bp, Vitis vinifera
  Intron number 14 from transcript GSVIVT01032848001 (locus GSVIVG01032848001) derived from phytozome v7.0 (chr-ID chr 13; pos 275453 to 283507 reverse strand)
accggactacatataagagacgatcgacaggtacagttcacaatcttttggaaattgcatgagaaaaaaggatccaatgtgctaatgttcagtgacaaactcccttggtgacctgactgcactaggcctatttcatctttgtatcttaagaaaagggtgatggttctcatgaaagcattttggattgatttcattcacttcacatatattattttccttttgtagctgtttcccttctctatcacgttaaaaaatgtgtttctttcgagagctaattaatttcctttggtcacaggtgggagcggtttaaggcccttcgagaagatgattacactgcttacctttttagcttctacttagcatgttcttctgtaaattatctgaggttaagtctccagtctgcaacctgtcttatatgcatccaattcagtacgcttttgggtagttgataacatagcgagtatatccttctgttttctctgtaatttctataagtagtttggtttgaataaattccaaccacttacaagctctgttttctctgtaatttctacaagtactttggtttgaataaattcccaccactcacaagcaaaaattgccaggagtgagggatgatctaagatggaggacggttttgactatcactctgtgttctaacattcatataggtggtttttaagttaaatatgtttgaatttcctgtgcttgttctacacaaaaactttggagtgtaaattgttttcaaaaacagtttcgaaaaacagtttttgaaaattgttttatattgttttgtagaacacaagtctgtttgaaaacttaaaatatttttaacctattttaaatatattttaaaaataatatttatattttatttttaatcattctacatatttatataattatttttttaaaaagaatccttaaaaaataaatgaaacaatagaaaacaattaaaagattttatctgaaaatattttattttttatttttaagaacaaaaaataaaaaataattttttgtggtcaaagtgttctggagaacaaaaacccgttgtgccaaacaggcccttggattctttatttctattatcaatttactttaacttcttgtgtgcttcttcaatagaatgtcctgttagaaaattgtattttttgacttgacccgatagataagcatagtggtccgggtctttttaaacgaggagtgtgacttttaaaaaaatcctatcacacttttaaagctgaaacaagtagaaatgatatttaaaactggaacagggagatagattaaaggatgatttttcaccatgaatttttttatggcaaaaaaaaatgaccttttaccatgattattctcataaaaatgatgtcatcacgaatttattttgagtgaaaagtcacatgttgccaccaatttattttgtggtaaaaagtgatatgttgcataaatttattttatggtgaaaagtgacatgttttcacaaattttattttgtgtaaaaattagttttttagttataaagttaagtttgatggttaaaaatacttgcttacaaacttttagcaacacactggtcacaaataaatttttgtggcaaaagttgataattgttgtagtgttccatggaccttgcctgttttttgagagaaaaaagaagtagaaaggaagtcttccatacaatctggaagccattagccagcatattctgacataggttttgctatggattattgaattacaacattaggatatgattcctgattaataattaagcaatcaagttggcattgatttctcctgaactccattgctggcaaagcgctactgtgccacatagcatgagtctgttttagagaaactgaagacattaaagaaagcattttcttttgtttggtgcatttgactcaatgggataagcttaatttatcatatttcaaactcttgaggaatatatatatatgatagatgatatatgatatatgaattggagaaaaatctctgaccccttaccgtaggtcaatttacttcggcgaaaagggggaccctcgttattttagttaggtttaagtcttatgggaataatatatatatatatatggctatcttaacgacttctgagatggtgatatctatgacttttgagctgcaacttggccatgagttgaggccttcacttatttatttaatattttttgaaatagggttggtaataaattttgacttgaagttgattagtttccatgaaacatccaagaaggctgattctgagataggaagaagaagaagaagaagagagagagagagaatcaggcaacacaaattctagagagaagagagattttattgattagacaatacaacacctctgctatatatagcaaggattaggaaaacaaaaaacaacaaagttttaacaaagaaacgaaatgactaatgctgttacaacaaactaaacaaactaaactactagttgttaatagtaaaacgacaagccgttttgctattttgcctaattttctccctcaaacaaagcctttaggaaccactaaaccttccaccataaacttcaatcattcaagctttttaccactcagtagaagcaatcagactttcaaaaagagatcctgagaaccttcactgattttccccttcaaaacaaacatcccaacaactccaagcaaagactgctgtcacaccaagcctaatctccattcttcagatcaagagaagtaatagtaagcttcccacgcagcttgtcaaagaacctgaaagataaaggctttgttaacacatttgcaacttgatcctcagttggtacatgattgaccaccagctttctctccattactttctcccttacaaaataaaggtctaactccatatgcttagtcctcgaatgcaaaactggattagctgaaagggaaacagtacttatattgtcacaccaaattacaggaaccatagtcatcttagtttggagctcagacaagagggactgcaaccataacatttctgaggtcaagctagccaagcttctatattctgctttagtactagatctggaaatagtgtgctgctttttttgaactccatgaaaccaagtttttcctaagaaaaacacaatgcccagatgtagacattcgatcatcaacatcactcccccagtcagcattacaaaaccccactaaattcatagtttctgatggcttcaacacaataccaagatctgtagtgccattgagataccttaaaattcgttcgacagtcttccaatgagtatctaaaggcttctgcataaattggcaaactttgttgacactaaaagcaatctcgggtctagtgatggttatgtactgcaaagctccaacaacacttctgtactaaaaaaacattatcaattggatcactcgttccagctgaaagttttagactagaaaacataggagttggaagtgacttagctccatccattttagtcttcttgagcaaatcctgaatgtatttttttttagaaagataaagtccaccatttgtagttttctttacctcaattcccaaaaaatagctaagctcaccaagatctttaagagaaaacaaaccacttaaccttgagataagctcgtgaatctcttgactactacttcctgtcaccacaatgtcatcaacataaacaagaacaaagagagaagagcagttggtaaaccttacaaataatgtctgatatgacttagtggaagaaaaaccaaactgttgaagagaaatcttgagtttgtcaaaccaagcccgatgtgcctgctttaagccatacaaggccttatgtagtttgcaaactagcttttgttcttgattggttctgccatcaaaacctggaggttggtccatgtaaacttctttttggaattcaccttttaaaaaggcattattgacatccaactgccttatagaccaactttgagaaataacaacaacaagaacaactctaattgcagtaggcttcacaattgggctgaaggtttcagaaaaatcaaaaccaggaacttgagagtagccctttgctactagacgagctttgtacctagagacagaaccatcaggattctttttgagtttaaatacccatctgcacccaatagaagttctgttacttggaagagaaaccaaagaccaggtcttgttcttcatcaaagctctaaattcttcgtccattgcttctttccatttgggatgagagattgcttcctggaaagtattaggttcttcaacattaagatcaacagtatagacctttggtttaaaaataccattctttgacctcgtaaccatatgacgtggctgctgtggtaaagtgactggtcttgtattgatagattcatttggttcatttgaatttgttgataaaggaattgtaccaggaagaacatatagattagaagaagaagatatggaagctgactcattgagaattgacacagttgaagaagaatcagtgtttgataaatcctgttgaacaaacctaatgtttgaaccaggattctcatcaagttgatgacttgactgagctaaagatgtgggaagtgatggtgaatgactgacacttattggctctaggtttttaacgaaaggaatgcaaggaagaccaactgttgaatgtgaaacagtttgaacaagtttttgaagtttatctgcaaaaggaaacttagtttcatcaaagataacacttctagaaataaacattcttccttgctgatttaagcatttataccctttgtgtttagaactgtagccaaggaaagtacaaggtgaggacctaaaatctagtttatgtttattgtaaggtcttaggtgaggaaaacaaaggcaaccaaacaccttaagctgagaataattgggtttaaaattaaacaaaaactcatagggacacttttgctttaagacctcagtaggcaacctgttgataagaaaaacaactatggaaaaagcattaggccaatatttaagtggaagagaagcttgagcaagaagagtcaaacctaactccactatatgtctatgctttctttcaataatgccattatgttttgaagtatgaggacatgaaaacctatatattataccattttgttcaaaataggttttcaaacttctaaattcaccaccctaaaaaggtttctctggtttgtgacttagttttcaagaaataaacataggtgtatctagagtatgcatcgacaaaagaaacataatatgtgaacccataagaagaattaattggagctggtccccataaatctgatacaactaactgaagaggcttagtatacacagtttgagaaattggaaaaggtaaattatgacttttcccaagctgacaagctgaacaaattgaagaaccagatttggtaggaaatggaattttattatcattgagaatttgtgttacaatttttgaggccggatgaccaagccttttatgccacagatcaaaaacatgaaaactaaaattggttgtttcaggaaaatcagaattgacattatgcataagagaagcaatacaacatgtaagttcattttgaccatttgataaagaaagaccagatgcttttccaaagagtttctttgacaggttgaactgatagagtcatttatgcagattgccctgcaaaagtaaagagtgattagatatgtctttaacaaaacaaacctttggatgaaactcaaaataaacattattatctctagcaaattgagaaacacttaacagatttttcttaattgtaggaactctaagaatatttttaagaaaaagtactttatttggactagaagaagaaggaaaaacggataaaccaatgtgtgaaatttcaagtccagtcccatttcccatgtggatttttgagttaccattatactcagcactagaattgaggttgccaaggtcatgagtaacatggtttgtggctcctgagtctgggaaccaacaacaattttgaagatcttcaggagtggcaaccattgcttccatttctgagcaatcttgatcttcttgagcatcatactcagcgagattgacatttccaacactagaaattgaaccagatgctccattccttgcaccacttcctaaaacaccaggagtaggtccattagcaggcatattcccatggaaatttggatcatacctatagaagcaacgatgaacaatatgaccaaatttattgcatagttgacattgaggcttgattcctccttgagctctgccacgacctcttcctctgttaggaacaaaagaccctttagtcatctgatttcctccaaattgattcctattctgaaaaccgctagaagagtagccattagaattccaagaggaagaagaacctctattagaatactaagaggtataattcacataaagatcattagaggagattttgtgtgcaattcttccttcatgagcaatcaaagtcgaggtgacatattgaagagaaggagaagactttttcgaggagataacaacaatgatagacttgtattcatctccaagaccttgcattatagcaagtatatgatttgtgtttaaaatcttgtgaccagcagtagcaagaagatcacaataattcttcattttggtaagataatctctcatagtcagaccatcctttttaacatctgcatttgactcttgtagaacataacctttgtagaagattgagaattgaaattctgggaaattgtattccatacctcaaaagctgaagaacacccaacaacctgaggcaagaacgcactttcgattgaagatagaagccaagaaatcaatagatgatcttggcgttggtaatctctgaacttgggatttggaaccaaaatccctgttccatcagtcaccatctttggtggaacttgctctgttccaaacaagaaaccttcaagaccataaccccatacaacattttcaatttgatacttccacatcaagaaattatcattctttagacgcatcgtaataagctgactcaaagggctttttaccatcctcaaagattcgtctgtggtcatcagattgcctcttttacttcagctaaaggatccgaacgtagcacctctccaatagtctaattcacagcagccattgatgcgtgagcactgatgctctgataccaagataggaagaagaagaagaagaaaagagagagagagagagagagagagagagagagagagagagagagagagagaatcaggcaacacaaattctagagagaagagagattttattgattagacaatacaacacctctgctatatatagcagggattgggaaaacaaaaaacaacaaagttttaacaaagaaacgaaatgactaatgttgttacaacaaactaaactactagttgttaatagtaaaatgacaagccattttgctactttgcctaattttctgcaactaatgattaacttcacttgcaaagaaattgttgggacttataatcctttatattgtaattttttttccccaattgtgacatcctactataggaaaaaagtttatgatgctatatgcataatttttttttaatttatttatcataaagaagcatttaaaagctatatttcctttgaacttagagcagacaaaatctatacgaggagccggttattaaaccactactgtttatgaaccaccaggattctatttttgtaattttatttctagtttgtttttcaaattattagtagggccaccaatgcctctttttcttgccttgtttttgcttcatctttgagggtgaacagctatatagtcctgatcattgcttcatagtcccatgctccatccaattcaccttaaattgaaaaagtttttctgatccaatcgggctttcctgcagaagttttggaatgttgtcatctttttgtattcaggcagtttttcttctcatgtgctttggcttagccacccatgctattgaagggaatgagacgtatcgactggccttgcttgatttcaaggctaaaataaccgaagaccctcttgggatcatgaggtc

SEQ ID NO: 13539 - DNA, 10584 bp, Vitis vinifera
  Intron number 8 from transcript GSVIVT01036936001 (locus G SVIVG01036936001) derived from phytozome v7.0 (chr-ID chr2 ; pos 17361944 to 17372527)
gtgtactcaccaatttttctgggaactcgtaagtacaatctttcttaacctaatttcattctaacatgtttcaataagtatcaagcaatatagttccttgaatttctttttacgtttttgaggattgcttcatctggcttgcaagaattgggttcaggctctttatgtaactgcttatgaaattgtacttttatatgttttctgtcctggttaactattagaacttgtgaagtagctaatatcatgtggagaaacattcttattgtgaatcgtctttgtaatcctgaagttaatacctagtttttgtgttatatttttgaatttgacatattgtgagattctatgtttctgaaggggattctggcaagctgaaaaatgaaactaatgggactgaatattagcttcagtgctttctttctttctttttaattatttttttgttggtatcaattccatacagaatactaatttaaggatgagccatccttcaagaataaaaagaaggatacacgcactagaaaaggaggcacagcagtagttagaattgcttgcagttctcccagtagacactgaaggtaaaaacaccttaaggaggcatgaaatccccacaaagctgtctattgaagatctgtttggctaattagttagctacttgactgtaggatccatttgaaatatcatcctaaaagcctcactgtattgatgatcttgcttggatgtgttttcacgcccatatgattgataataaggttttattgtcacttgtggtagtctatgagagttgaagtttggaatgagtaattgacacattctacatctatatatatatatatatatatattgtatgtgtgtatgtataaagacaatataaaaaaagatttcttatctttccaacagaaaatacaataagcaaaactaggaagaataaaactcaatctcagatcaagtggaaaaatgctaggacacctgagaattcctagtaatacatacctaaagagttgtaaaattgtatatctatcctagcatcttacatcaatatccacctagcctaaaaattctggtatagcaaagatagctcctctcaataaggctaccttgtaaagaggtctttggtaaggttgaaactcagaagcagcatgctttgattttggtggatttttgggacaaggaagagagtgctcgttcattgtctatggaagaggaggaagctaggaaggaggcaagagagacttataaaaagtgggtccttttagaaaaggcgttgtggaggcagaagtctagagaaatttggctgaaggagggggatagaaatacaaggttctttcatcagatggctaatgcttgtagaaggaggaatcaactaactagagtaaaagtcaatgggaggtggttcactgaggaaaatgaaattaaagaggaagtgagcagagctttccagggtctgttgtcagatcctggaggatggaagcccaatatagatgggttgatttttgagaggttggaaggattagatgtggaagggttggagaagccttttttgggggaggaggtctttggtgtgttgtcaggtttctgcggggagaaagcgccaggccctaagggtttcccaatggctttctagtagtattcttgggactttgtaaaggtggaggtgatgaacttcttcagacagttccatgatttcgggagctttgtacggagtctgaatgcaacctatctagtgctgattcctaagaaagggggggttgaggacttgaaggattttaggctaattaacttggtgggagggttgtacaagtggttaaccaaggtgctgactaataggttgaagggggtgttagctatggtgatctcaacgtctcaaaatgcgtttgtggaggggcggcagattatggatgcagtgcttatttctaatgaagcaatagactcgattttgaaaagcaatagaggggtgattctatgcaaattggacattgagaaagcctatgatcatgtggagtggtcttttcttttggcggtgttggagaagatggggtttggggaaaagtggtgtagatggataaagtggtgtttatccattgctagattctctgttttggtgaatggaacccttattagatttttttagagctcaaggggtttaaggcaaggagatcccctttcgccttatttgttcgtaattgtgatggaggctttcagctgtctgctgaagagagcagtttctggaggctttttatctccttgctcggttcaaggaagaaggggtgaaggggtccaggtctctcacttgctgtttgctgacgatactttgattttttgtgaggtgagggaggaatagttgacgtgtttgtgctggctgttaatgtggtttgagacaattttggggttaagagtgaatctggacaaaagtgagctgattctggttggtagggtagagaatgtggaagagccgaccgaagagttcggttataaggtgggaagattgccttccacttacttaggaatgccgttgggtgctccttttaaatctacagccgcttggtatggaattgaagaaagattccgcaagagattgactatgtggaaacgtcaatacatttctaagggagggaggaccaccttaatttgcagtactttgtctaatctgctgatctatttcatgtctatttttcagttgcctagggcggttagaatgagattggagcatattcaaagggattttttgtggggtggtgggctcttgagcaaaaaccttacttagtaaggtggccaattgtttgtttagataaaagaaaaggagggctgggggttaagagtcttgggacattcaatagggctctctttggcaagtggagttggcgctttgcaaatgaaagaaaggccctttggaaccaagtgattagaaggaaatatgaggaggaaagagggtggagctcttgtgaggctagggaggcttatggagttgggttgtggaaagcaattagaaagttaggacacttagtgaccccttcttttgactttgtggtgggtgatggaaggaaggtgagattttggaaagacaagtggtgtggaaccacccctttgtgcgagtctttcccttgtttatttgctctagcaacttccaaagaggcttgggtaaatgaagtttggatagctgcgggggaaagggggggaagttggagcccttgtttccctagatgtttcaatgattgggagatggaagaggtggaaaggttgttttgttgcttggatgggaagaaggttaatgtgggtgaggaggatagggtgaggtggatggactcaaaggatggcttgttttcggtaaagtctttgtatagagccttgcagccagtttctcttgtttctttccctttgaagattatatggaactcttgtgtgcaacctaaattaagtttctttgcttgggaggcttcgtggggaaaagctctaaccttggatcgtttgcaaaagaggggttgggctttggctaatagatgctttctgtgctaaatgtttgaggattgactgatcacctccttcttcattgtgaaaaaacaagggaagtgtggatgttgctcctttctttgtttggagtgtcttgggtgtttctcttttcggtaaaaggaaaccctcttatggtggaggggttcttttgtgggtaaaaagaggaagacaatgtggcaagcaggaccgttatgcttgttttgggccatttggaaggcaaggaataaaattgcctttgaagatagtgtgttgtccatccaaaggctaaaagcttcttttgtgtatttattgtggttggagaccaaattgtggataaaaggtggtccttcgactttaataaattttatagattgggtgggttcgtggtgagggagaaggttttttgttttccttgttgtttttgggtccagctgtaagggggtgagtgtctctatgctgtacttctgtgggtcgctattttagcgcctcttcgtaatacaattcttttgcttattgataaaaaaaagaaaaaaaagaaaaggctaccctgtaaggatcttttttctgtttgatttgcaatgcctctcaggaaccaaaactgctatgcaaagtgttgccaataaaggaggagatggtcagatgactcaccacatgttatacatagaatgtgacaatcagggctattgcagaagcaaaatcattattttgaccttttattaaccactaaccgtacaaaaaccctgatttgcatgagtgttttttgacttcagattaacttcactagggcgatagaactggggttcagacttcaaaagagcagagaagaaggatttaattcagaagaataccaggaaccagggtccaacatatctagtctgtggttaacatagaaagaaaaacattttacaaagataggggagagaagggacagtggtcattaattagtaggtcccttgagtttgtacaaaaatcaaaatttcaggctgaggaattataagatatagagaagatagatatggaaaaactctgaatcgggataggagatgaaggtggggttggtggcaaaagagctgaaccccacttcactgctcttcccaaaaccagtgaacaagctatttccactgcttgaaaaatgtacaacaaatggagtcctgagagccatgtcctattgctttctaagaatactgaagttaccacaaaattggcatctgatcaattaactatataaaccatgaatacttttaatcctgatgctataaagcaagctcccaagtaaccaccataaccactttaccaataaagactattccttgcagaaataccccaggcctacccctccataaggatgctgtatgacaacaaatctgagcaaatagaactttatgaatattgtggatacatttgcaaataatatgcccatacagtttatttcagttcaagaatggatataaacgacctttagatccattgtaagatgtgtgcactcacaacccaaattagggttaaccttatctcttgtgggacacacaaccccaagggtagggatcaactccgtgtctttatggactaaacctggtggcaaaaccaatcccacacacttgcatcaaagtgtcttcctgaacgatttttaggatattcacccaaggacccatggtcctatatatatatatatatatattcaaccatttctcaaggttttttttttttttaataggtaatcaaaatcaatttataaaaagtaacaccggagaaagtgttacaaagtatacaagaagtatacaaagaaactcctcaaagcaacacaaaaacaaggagaaacatcaacaacccccttagcccaaacccaagcactccacaaaaactaaggaatgaggcctaggaactaggtgcatcttgcaccaagcccaaagattacaagcaaggaaggatttcaacccttgaattgatcgtccctcattatcaaatgccctactatttctttccttccaaacagtacaaaaaaggcatgaagctcgatgaatacatgcttcaagataactctaccttatatcatgtttttccctcctaatcaagattatacatatatatatatatatatatgtgtgtgtgtgtgtatgtatgtatgtatatggaagcatacatcatgcttcagtacaataaacaacatgataccataagacaatggttcatattcaatccatcttatcccacatgggcacttcatgtgaacttccatagtattccgtaccatgcagtgctataagcatatgcatatcctttttttattcctttctcaactataaatgtgagcttttcttggttattgcatcccaataataatgagcaattgttagttttgcagtttagtaaatccaacctatcttaatgcctatttaaagattaaattctggacaataagatcttccaagtttgaagttataatctctagtcaaatgtctaaaaattgaggtggctttttttcatgcaatgctagtctcaagaaagaagattggaaaccaaaatgtttgaattatatacttaatattactcaatagttatcaatattatactgttgtttcatgccaaaacttgttgaatccatacaattgtactttggatgtgatctatgactttaagcctcaaggaacccattttacaatgaagcaaaacaattctcatttgattgggagtttttacagggagttactgtttattaactaggatgtgttcaaattaaccatatatgtttcttagcagcaccataacttttttccacattccatatgcgtttcttttttccttttcttttttctttttctttttccccataactttagaagtcataagttgtagcaataccctacagattctatgtcatataacttaatgtacaaactcaagctctaaaatcaaaccccacaggtaaggttcataaataaaatttggagtaatattcacacatttttttgatggagtaatattcacacatcatagccatatgtcaagaacttcaatttgattatctaaccatcaatgaaatcagattacaacttaaacaaatcataagaatgacctacctcacaccataaattcaactcccaacatcaaaggactcctttctttttctctcttctctttctttcttcctttgtgcatgacttcaattggccactttaaaggatatgacctaattaatcaagctaaattcaattaaacaatacccaaacttaatcactttaaattagttttggaagaaaattgttcgtttatttgcttcaaatgaaagcttgaaacacaatattagcaaaagctccaacttcttccttttttcctcatgcttcatttaccatttctatctttctaactcagccatttctggcagatttttttagagctgaaaatgaggccgaacaccccttacgtttaggtgcagagaaagtctgaggtggcatgtgctagtttgccacccattacctctttttctatttgcacctaagcccttttgcttttaactcttcccagtttcaatttcaatttcctcttttgatggattgcaatttcaatctccttatagtagtaatttttagtaggtgctaatccatgaatgtttggcctcattaaatgcatttagcattaaactgggtttaatatataattaaaatgattagttttaatgatgtttaactcataactaaacctggttagccttaaaaataattttaacctgtaattaataacaattaatctttatgcaaagatgtagggttttaacaatacttccaggtattacagttgttttagggaagttggtgaaaggctagtggtggtgtttttaagagggtggggtgtttttccgacttggtgtttgaatagccattaaaagaggttagatcacgttagtttatgaaataacatctttgtagggaatgacaatagaacgaagttggtctggcagttgttgtggggattttgctttgaaggatcattcctggacttgtttaatgttgctgcaacagggaagctgcagtagcctattattggttgtggagggtggtcagggtcacttgtgtcctggtctgatcccagaccaagggtacatatgtcctttgctgacagtattttctgtgatgcttttatcatgttatgttgagggttgctcttgacttcattctggacatatgcaaaactcagcttagagaagaatatgactcttcggttccctttattggtactttatctctatttgtgtttgtttttaatttttagggactgttattctcttttttcatatcagaacaaaccatttaatttcatttaaatagtaaatataaagtaggataaaaaatcctcccaaggtttacaaaaaactgatcaagaatggaaaaatatgcctatattactcccaggtaaagaaaaacaattagcacatcttataaaaaggaatccaaaatcaagcacaatccaaaaatgagccttttgctaaaggatctgctgagtgattggttagcgtggttcctgagttaaggaacacctcaggtttctagcaacatcaataagctggagggtctatccatcatacttccatggatctttctcattttggaatgacattgacagagttaccctcaacctacaaatctaaaagactcaaagctttggcctgcaacagacttgccaaaccaaaagagcttgtatcactcactataacacaatgatctgcatgcactccaatccccagttgttttatgttaccgaaggaacatcatcgaagtttaattttgttgattatagttcagttagtagtctttttaaggttttcttctcaagtttgctagaaggatggctaatcctcttatactatattctctttatatgataaacctcattctcttatactatattctctttatctgataaaccttattatcttatactatattatattgttgtttctcatgagaaaaaaaaaaaattctctttatctaataaaccattcttttctcctacacaagaagacttcgttagtgtttaactattgctcctcttccacttctagggtgccaaatatgctctccatccttaaggtagattcaagcttaactttgatggattctcaaaagagagcctcaaaacaattggcattggaagcatttttatggatgatttggggaagatcaagaatgtgcctcctatgctaaatgagaggggtagttgtatagagccacccattttctctaagattctccatatgacattgaagtcccctcatacacaccaaattgggaaagttagaccaaaaaggtcttaaagctccaactagaaatccttcctcaagttagaattattgggaccataaactgatgtgaactaaaaggtcccctcttcattagaactcaacttaatagttactaaaaaagacctaaaaccatctctaaacaattgaacttgtttgagtcccatattagtatgattcctctgatgccccacaagccggaagaacctaatccttatttctacctttccagacattgcccacaagcattctatcacaagtctcattctttttttcctaaagcatcacaatgtctaggttttcaaagctaagaaaatcctttacaatccttcttttctctctggaacccaaccctctaatattccaattaatgatcttcatgtggacacttaagagcccttcaaactaccaaatcaaacctaagaatccctaagaactccagataaagtcctatactttcttctaaaataaaccttaaccaatggttgtgcgttgctattgtccactgggaagacagtctcactgcctttgactagcttgatgttcatagtttccaaaacctactctacattggccattttattgggtgtgggaccctgtatgtgaaatcctcctagtgaggaagagactggttctagggattgatcactgactatgaaaaggtgctcagtagggctgctaaattgtgccctgagaaaagaaaagccttacagtcaaacatggttccaaaattgtcttttttctccatgttgtatgggcaaccttgtatagtggaggagtttagtctttttgttaagggttttgtattcgtgggaaggatttcgcatccttcttttatactttttattaacaattaatacatctttggttttttaatcaaattgcaaaaaatgtttttttttttttagtgattggaagcaataaaattctgtaattactgtgttctcattgagacataatgagattttttttttcttttttttttctcattttctcaattattttgttgaactcctagggggaatacggctagaatgaacttttttcatgtatttggttatccctatttctcaatatgctttaactttattatttatttatgatgattcccacccgagtaaaattttgacttcatgcatttctttctctcttgggatatgggttcactttgtgtatataacatgtgatggatgtatttcacttttagctgttgaaataaatgggcaatataaaatctttgctacaaggagaaaacttagttgcagtcaaaacaagtgagagtggtaagaaatgcaactgtagaaataaattaataatataagtgtgtataataagaagggaaaattagcttcccatcaaataaagcacaatgacaaagaaattgcatactgatgaaaaatagtaagccactccaataaaaaggaaaaaaaaaaagtgaaaaatagcaggcagcaagtgcttgtgggtatcagagggaaacctccttcatttctgttcagtaccattgtcctactatttgaaatgtaactaagtattaatatttaactattgaatgattcatgttgtcttaaagtgatttcttggcatatacacttcattgaggaggatgtagtgcatgctgttttaatatatcatacttcctggtccagcaaattttcccaaattattggcaactaaattgttgttacattagagtattgtaaaaggagtatgttagaaagccaaacaatattgttatgtcctgcaatgttgatttaatgcattattttgcagctttgtcggaaatcgcggtttgtgtgggaagcaga

SEQ ID NO: 13540 - DNA, 7485 bp, Vitis vinifera
  Intron number 41 from transcript GSVIVT01007755001 (locus GSVIVG01007755001) derived from phytozome v7.0 (chr-ID chr 17; pos 9490512 to 9497996)
agaggtctcttattgaggtaaatgttcaatttctattgcaataagcctatcacactatcctgttaaatttttgtttttggatagcaagcctgcaagttatactgataggagggtttcctgctatcctggttgctgttaatgggtatcacctccatatacctcagtgatgtactccatagtcaatcttgtcatattagaggtgatagaaaattatggtttgggagttagttttagcatgtcaaaagtagaaatatgatagcaatgccataaattttgtatttggagtactccacattatattgaattgaaaatgatagtgaagtttctgaataattggtattctctaaatcagacaggttacttggtaaatatataatcgagctgtatagaaaatataaaaataggaaactaaatcagttcaaatcctgaaaatattcaattcctaaaattactccaaattctaagacttgcctaaagtacaaaatataatcatatcagagaaaaataaaggagaaatataatcagatccgcaaagtcaaccacatattctgacatcataaaaaaaatgggttggggaatctctcataaaaagatgaagtgcaaagttgaaaggattattgtggagaaaaagtattttcaggtagagtttgaaggattgaatggtggaacttgggtatcggtaacagagaggagccgaggtttcgtagtttcaataggttttgacatggaggagatggattggttgatggagcatttgaagaaagctgtggaggtggaggcttctaggggttttgtaagaaagatcaggggcaagactaagaccctcttgatggagatatgcttcaataacagagggaggttcatgaaaattacagaatttgttacaaaaaggaaacctttagttcttatcgtccccgagggcgtcaaagggaaaggatgggaagatctcaagaaggcgatcctatcagtgcaagagtattatgaacgagacggaggagcttcgaaggagaagaatggtgatatccggatgaatagggacactttcagaggaggaaggtcatatgctgaagtggtggcagaggctggtttgaggactggaggaccgttgttagctggaaaatgggccagagctgtaatatgtgaaagccaagaagaagtccaagactggactcacgaaggaagagccattgcgaggatgatggggatgaaaggaatggtgtccataaatcccatttcagctttcaaaggatgcttctttgtgagtacaataaggagagcggaaagtgttcatgatcagggaagactttcagtgaaaggaaggacgattttgctaaggaaatggtcgcccaaggaaaacatggtggttcaaggaaagttcaggaggggttggctagtattgagaggtctccctttccatttgtgggatgaagttcagttgaatttcattttgaagaaatgggggagggtaacgaaggtggcaaaggaaactttgaagctggtggacctgacgagggcgaagctgtgggtggagatgcttccaaacatcgtgttaccagcgttgcttgaggtggaagatggggaatggtcctatacagtagcagtttcagtcaccggagaagatgaagatgccgacgctgtcatgtctgaggtaaaccgtagcaggaacgagtgggtgagagtgggaggttgcgtctctcagtggtcaaaagttgcagaagggctacaaggtagcgttagggactttgagtgctacagaaagaggcgtcttccccgggcacgttatcggcagtcaaggacgtgtttggaggacaaaggggagacaggagggggatagagcagatcgggccaagctgaagcaatttttattgggccagagcatgagtcctcttttaaagcccaaaaggttagggcccaaagtgggatgaggcatcgtgggcttcaagatggcccagatgatcctcaagcccaccagtctgcatcggcttcgcccctttctcctcagcgagctgcttcttctacaaaggcggtcgcgacgctctgtccagacggtgcaagggtcggcgccgaggttttcttcggagaagaaggtcgggccgttgagctaaaggcccagtcccttcccaactctaggcctttgtcagacaacatcgtgggttgtaagtttaaaaggccgtcggggttgggccaaaaattaggaggaacgaagccctctggtatggaagactggtcgcgaagggaagtaatcgaagcgaggaaggggaaagcccccgcggttcacatgagagacgctacgcaggaggaagagacggcaatttcaaagaagacgtggtctaccctcttccctccaagcgccgatcgacgacagggacatcggtgctacagtgagcctattttcacacggggttcgtcgttgtcgagtgaagatcgcaacatggaagaggagtttgggatgggctttcagatggagcgaggaatcagagcgaatcctctctccagatgtcctctttctggtaagctttcgaaggaggacacctcggcgagccgcgttgaagtcaaaggagggctaacgggtcgagtggggtctgatcctcgtggctattcagtcatgggttcaccttctaattcaataatcagaggtaaaggactcatctttgaggggttttgcgaaattccgggagccaataacttggaggtatgtcagctctctccttctcagccacccgagtcactttcttttccttcctgtagtccggattctcctttgacgaatccctctggtccaattcttcccaatttagtccctcttcctcagtctcctacggaaaaccaaggcatctcaaatattttttatgaaaaaggtggtgttgactatttaaatcatggtgacatacctgaccgtgttgaggaggtgaaccagtgtgctttatctaaccagatgtcagagagctgtacccctaaggattctattgtcaggtcgcataaggaggtttcgggtgaattccttattgatggcctgtcccccgggaaaatggccaaagtgagagaggtattatgctctctagacattaaagtgtattttaggaggaagtgcagaggccccacagggcattgagacttgttggtgttggttcggaaggctagggtatgtgtgttttcccatgaaaattatcagttggaacgttaggggtttgggttcaaggaataagcgtaggatggttaaagattttcttaggtcagagaatccggatgttgtgatgattcaggaaacaaaaaaggagatttgtgatagaaggtttgtgggtagtgtctggacggtcaggaataaggagtgggttggcgtctggggcatcaggtgggattttgatcatctgggattcaaaaattctgagtagagaggaggtggtaataggatctttctcggtctcagtcaagttctctttggacggttgtggacccctttggatttctgctgtttatggtccaaacagtccctcacttaggaaggatttttgggtggaacttttcgacatttatggtttaacttacccgctatggtgtgtgggaggtgattttaatgtcataaggagaagctcagaaaaaatggggggttctagccttactccaagcatgagggaatttgatagttttatcagtgaatgtgaactacttgacccacctcttcggaatgcttcattcacttggtcaaatatgcaagagtctcccgtgtgtaagagattggatcgttttctctactcaaatgagtgggggctgctctttccccaaggccttcaagaagccttaatcagaaggacatcggatcactggccaattgttatggataccaacccgtttatgtgggggccaacaccttttaggtttgagaatatgtggttacaacacactaatttcaaggagaacttcagagattggtggagtgggtttcaaggaaacggatgggaaggtcataagttcatgaggagacttcaatatgttaaagctaaactgaaggagtggaataagttttcttttggagagcttaaagaaaagaaaaaaagtattctcaatgatttagctaactttgacgccattgagcaggaagggggtctcaatcctgatttgataattcaaagagcctcaagaaaaggggagctagaggtattaatattgagggaggaaatacattggagacaaaaagccaaagtgaaatgggtcaaggaaggggattgcaactctaagttttatcataaagtggctaatggcaggcgaaataggaaatatatcaaggaggtggagaatgagaggggtttagtgctgaagaatgccgagagtatcacagaggagattttacattactttgagaagctttacacaaatcctacaggagagtcttggggtgttgaaggattagattggtcccctatttcgaaagagagtgcattaaggttagaatcccctttcaccgaagaagagatttctaaggccatttttcagttggatagggacaaggctccggggccagatggctttactattgccgtattccaagagtgttgggatgtgattaaggaggatttggtgagagtgttcgctgaatttcataggagcggaattatcaatcaaagcactaatgcctctttcattgttctaatacccaaaaagagtttatcaaagagaatatcagactttagacccattagtttgatcaccagtctctacaagataatagccaaagtgctctctgggcgtctaagaggggttctacatgagaccatccactatactcaaggcgcttttgttcaagggagacaaatattggacgcggttcttatagcgaatgagatagtggatgagagaagaaggtcaggggaggaaagcgttgtattcaaaatagactttgaaaaggcatacgatcatgtgaagtgggattttttggatcatgtgttagaaaagaaggggttcagtcctagatggaggaaatggatgagtggatgtttatcttcagtatcttatgcaatcttggtgaatggtagtgctaaagggtgggttaaggcatcaaggggattaagacaaggcgaccctttatcccattttttgtttactttagtcgcagatgtaatgagcaggatgctcatgagagctgaggaaagaaatatgatggagggttttagggtgggtagaaatagaactagggtgtcccatttgcaatttgctgatgacaccatattcttttctaactcaagggaggaagagctgtagactctgaagagtcttttgttagtgtttgggcacatctctgggctcaaggtcaatcttaacaagagtagtatttatggcatcaatcttgatcaggctcatctttcaagactggctgagatgcttgattgtaaggcgtctggatggcctattatatatctgggtctccctttgggcgggaatcctaaggcgtgtggattttgggatccagtggttgagagaatctcaagtagattagatgggtggcaaaaggcctacttatcctttggggggaggataactcttatccaatcttgtctttcccatttgccaagttacttcctgtccttatttaaaatgcccgcttcagtggctgcaaaaatagagaggttgcaaagggattttttatggtcagggttggggaaggcaaaagggatcatttagtgaggtgggatattgtgtgcaaaccgaagacaatagggggtttgggtttggggaacatttcttgtagaaatctcgctcttctagggaaatggttatggaggtatcctagagagggttcagctctttggcatctggtcattttaagcatttatggttcacactctaatggttgggatgctaacactttagtcagatggtcacatcgctgtccttggaaggctattgctcaagtctttcaggagttttctttgattactcggtatgtggtaggaaacggggatagaattcggttctgggaagacttgtggcggggggaccaacctttgggaatccaatatccaagactattcagagtagtcgtggacaaaaacatttctatttcttcagttctcggtccatctcggccttttttgtggaatttgaatttccgccgtaacctgtcagattctgagattgaggacttagaaggcctcatgcggtctcttgatgatttgtatctctctccttcggtcccagatgctagattatggccattatcctcttcagggcttttttcagtcaaatcattttttctagcattatctcaatcttctggatcttctcagaactttccttcaaagttcgtgtggaattctcgagttcctttcaaagtgaagtcctttgtctggttagtggcacacaagaaggtgaatactaatgatatgttacaagtgagaagaccctataaagcccttagtcctgatacttgtatcctgtgcatgaagcacggggaatcagcaggtcatctatttcttcattgttccttgacgattgggttgtggcacaggttatttcagttagctaagatggattgggtttccccaaggagcatatagtccatcaaatttaaaggcttcggtaattctaagagagggatagttttgtggcaagctgcgagcatagctctaattcgggttgtgtggtgggaaagaaacgcaaggattttcgaggataaagcaaggaattcagaggtcctttgagactctatagttttccttgcttccctttgggctttctgttccaaggcatttaaggggatcccccttaatgtgattcaactggattggatagcggtgtgcactccttagggattggtccttagtgggtgttcgtttattttatgtgtatttccctgtaatttagttgtctttggttggaggatttctcatccttcttcttgtacttcctttttatattaatatatatttgtgtcgtttccaataaaaaaaaaaaaaatattttgacatcaatattgttgaattagagttgattgaaagttttgttctgagagttggttttagtctgtcaaaagtagaaacataataggaatggtttaaattttgtatcaggagctggttttagtccatcaaaagttgaaacatgatagaaaagattaaaattatatatggagaaacacatggacttccttcttcttacgaatgaatgcttatttaaatcttaagggaaaggcctaaagatattgatttgagtgaattagaggctgatatacacatattgaatgacacttactacatagggattgagttgctcgggaaaatggcaaaaatctattcattgtgtgtcatggtctccagccatttcactgtaggaattcaaacatatttccccaactggctgctcccataagtaatatacttagaaaacatctatgagcattatgcagtttgttttggtgattcaagtatttggagtcttataaattcatatgacattatttccctttgttgtaggttcactccaaaggtgtca

SEQ ID NO: 13541 - DNA, 4729 bp, Vitis vinifera
  Intron number 2 from transcript GSVIVT01028360001 (locus G SVIVG01028360001) derived from phytozome v7.0 (chr-ID chr7 ; pos 6578653 to 6583381)
tggggggatcttggagtaaaaatattggctctgctgtgagttctttatccctgctcataatataatctagcaatggttttacttctgttgattttttgggggaaaaatataattaacttgcaagaaatcaaagctaattaggaaattccccttccaacaatgtggatataacttcaaaattttcagagtttgatttgctctgtttatatagtgttattggttatggcaatggcaatttatagttttattgctttgatttgtggatattctttcatgatttatgatacttgcatatcaagttaatgtttattttctttgatgtgtaaacgcagaagagaatatattaattagaaaaaggaagcctagagggcaacccaaggcatacatgaagtatacaataggtgccaaaaggctaaaaagagcaaacaagagagaaaacaaaaacctcatccgtcctcacctagaacccaaccaatcaaaaaagtttattaaagataaaaggtcagcatctgtatacaactttgtccaagaccataaactacacacaaaagaatacttcaacctatatactgaaaactcatcattgtcaaacgctatcctatctctttttttccacactgcccaaaaaagacataaagaagccagcttctaagcttttttgctcttcttgcccaccaaggacccaaaacaaccaagggaagtctcccttaccgagcaaaggagaaaccaagtcaccccaaagagagcgaataataactcccacaaaactctagtctttgtgcagtggattaagatgtgattagtagactcctcttcggctagacaaaagaaacatctattagcaagggtccaacccctccttttgagttgatccaaagttaaaactttcccccacgaggcttcccaagcaaaaaaatccactgtgggaggaacataaggattccaaattatttttctttaaaaccgaactgtacttcccggctttccagcactgtaaagagacttaattgtgaaaaacccactttttgtctttttccaaatcaccctatcctccacttctgcactaactctctttccttggattgtcatgagcaaccgctccaccaagactacctcccaatcattgaagccctagaaaaacgaggactccatctccccccctcaaccaaagggtcccaaacctccgccacccactcctcttttgaaatcgccaaagcaaacaaagaggggaaagagctgcacaaagcctcatcaccacaccaagagtccaaccaaaatctgattcttcttccgttacccacagaaaagacaatgtagttgctcaaccaggaaccttcctttctaatctccttccataaccccacaccaaatccctctctaccttcctgggtataccacaatgtagttgctcaagttaatgtttattgagattgggacgatctaaatttagcctttaaaatatattggcaatcaattcattgttttaggagtttatgctgcaaggcaaaggtaaaagtctttatttggtttatgcttaggtttgtaagacattgactggcagaagcctgagagcagtcttgtaaattgtagacattcactctttttcttatgttgattttaaactctgtttagggagaaagaaaacgaacctcatacatggtttgggcttctggtgattccttttgtttttaccatcttgttaagatttctcttaaaagactttattggatttcatggagagtggtgtatcatcatcagcatttacttcttgttcagctccatgttatatgaggaaagagatgaataatagtagtgaccaaatatattatactgcatagtcctgtttattttatggtcagcctcatgctaattagatttattgcacttaaacattatggctgcttttggccacatagatgggatttctttaacatcccaaccatatggatcttgagtttactatgagcttgtggacttggagcttatggattctgggtctggttcctattttttttttttttttgtatttagggcaactgaattgtagatttttaattgcagccttcaattctgttccaagtctccagttccctgtaatcatacacaacctaaatgaattagttaccctacttccatgatattatttttttgataagcaatgaaatatgtgtatatacaaaaaggaaagatgtacaccagagtacattggccatatacaacggccacaaagtggcaaatccataagaaagagaaacaaaaaaccactccctatctctctcaatatgatcccaaccaatctacaaaatcaatcaaaggcattgggccttcctttatgtacatcccaacccaagctaatagataacttaggaacaacaattttaacttattctcatgatgctccttattttcaaatgtcctatggtttttctccttccacaaagtccaaaaaatgcatagaggacgttcgccaaaccttcttccattttctccctacaaaagagccctgtcagcttaaaatagtttctaggattgtggaaggaagcaacctaactacaaaaaaaaaagggagaacaacaattgccttagaacccttgacatagtgcaatgaagaagaatgtgattgatagattccctttcgattttacatagattgcatctattcaccaacaaccatccttgtctttgaagctaatataatgttaaagacttttccccaattggcttcctaagcaaaaaagcttgctttagttaagacctatgaatttcaaatgattgccaaaggaaggggttgacctccctggctccaagagagagtaaggatttcattagaaaaagcaacattctttgactccttccaaatcatttgatcgaaatcttcccttttcactggcttatgttgaaaccttgagagaaatttctcaacaactccctacttccactcatttaagtgcctagagagacacagattccaataaacccctgcccctatctcatcccatatatccaccacccaagagtcttttagagaagctaaagcgtacacggaaggaaagggcacactcaagggtttctccctacatcatttgtatttgtaaaatttcacccttttatcatttcccacttcaaaagcaaccctactatttaagaggtctcaccccttcctgcttgctttccatactccgaccttgtacccatctcttactttgttggacttctaaccccttcgtccttcccatacttcccctctatgacatgtttccaaaaaaattcttcaaaagcgaatctcctacttcactttccaagaatagcctgattaaaagatgaaagacttctaatctctagccccccttactcctatccatgcacacaatatcccatcttagaagatatggctttttctccaaaatcccacctcctcaaagaaaatctcgttgcaacttctctagtcttaaacttaccattctaggaatagaaaataaggacatgtagtacataggcaaattggacatgtagtaaataagtgaatctctagttccatggtattcttttcacagaatattggtagaactacatagagattcttataaagcatttttgttgagcatgcgtctaatatatgataatttagaaattatctaaatgttgataacaaggaccttggtatgggcttgggcatcaatggcctcatggattcaagatgtgatgcaaatgcaggaaaaaagccttgaatgtatatgcaccaatcatgttgtttttttttttttttttttgataggaaacgacaaagggatatattgataaaaaaagaagtacaagagaaggatgaggaatcctcccaccaaagaaaaactaaactgcaaggaaacaaatacaagaaaatacaaagtaaaaacaagcaaactctctaggttagaccaatcatgttgttgcttgttcaaaacatttccatgtttaggtgtttgaaagagaaaagacggctaaactaggagttttcttgtcacttaagttggataagccttgggtagtgatgacaacaatgatggtgttgattttgccgtttgtctaaaatgaaaataattcaacatctgattccatcataaattttcttagacgtttttccaattctatgagataaaagttcattaaaaagatagaatattggataaaagttctttgaaaagataggatattggaatagaaaaggaatgtccacataaaaaaagttcaaaaaccatttgacgattagaatcagtgaggtccgtaaagagcatttgcccttattttgcaaaatgtccaagacagcataacctagtcttctgcttctctctctctctcacacacacatcatggattcctgcaattgcagaatccatgtcatgtaataaactgacaacctcttacttatagtgtcatccacaaattaaaattgatagctagctgttgcatcaaaatatttgtctgcttatcttctggtaaactgatttgtttactcctctatatatacacacacagattttacatacatgcatacatatatgttcatgtacatgtaagtataatatgctgatttgatgaatgtaacaatctaattagagtttttctagatatgtacctctttaatgatttctccccagcatttcaaacatgcacctgatgtactcattttaaattgaaccatctttgggaacattcagggagaggttccactccagggagacttctctgccga

SEQ ID NO: 13542 - DNA, 17241 bp, Vitis vinifera
  Intron number 4 from transcript GSVIVT01032296001 (locus G SVIVG01032296001) derived from phytozome v7.0 (chr-ID chr1 1; pos 14692391 to 14709631 reverse strand)
ctcaattttgttggtattttttattccttacaacatccaagtgcatttttttttaatttcattctaggaccttatttttttaataaaattatggttgtttattcttttgttactcttaagttataatatatctgataaaaaaggttaatagtgtcaaagtttcataatttaacatatagacatggtgtttgtagtattgattttaggtttgcttttgattgtactttgtgtggttgtgttttgtttacttgattttttttgttgttttattatagttgttctttattcattctcttatttgctatctatgcttttggtggttgaaggatccctcatccttcctttcatctaatacaatctctttcgactttgtgaaaaaaaagaaaaaaagggcaaagaactatttaagccaaaaagccttaagacttttgggatatgtgttgtgaatttagctaattgaacatatggaaattaccaaagaggaggggattgaattagttgatggtctattttcgaaattttttaaacccaataaatgcaagcaagaacaatatatgataaattgctgaatgaattttcttatatatctcaagggtatttataaagggtatacaaggctattttaggatagccaactatacaaaatagtcgacaactatacaaacagttgtacacagctgtatgcatagttgtacatcacaactgtacacaactataccggtagctggacatagttgtaccaacagctggacacagctgcaccaacagttggctttccctctcacgttggtgcatagatatcacacatgtccaatttggataatgatgcataaaatggaccactagtaacaacatgagtcagcatatccgccaactgatctgtactcttgatgtaagaaacctttatcatgctagaatctaggttatccttgatgtaattcctgtcaagttcaatatgcttagttcaatcatgttgtaccagattatttgcattctcaatagctgctatgttatcacaaaagagcatcataagtttcttgagaccaaacccaagcttgcttaagagaattcttagctaagagtagttgcatgatggagcgcacggtattcagcttttgcactagacaatgaaaccacattttgtttcttactcctccaagtcaccaaatttcctcctacaaatgaaacacaccttgaagtagactttctatccaatctagatttgacgaagtcggagtttgtgtaaccctcaatatctagatgtccgtgtttggagaacataatacctttgcctggagaggacttcagataggccaggatacgatttactacattcatgtgtctatcacttgtattatgcatgaattgatttacaacactaactacatatggcaagtcaggcctagtgtgggtctagtagattaattttgctactagtctctaacatcttttttttgtccgttggaatttgattagggaagatggacaagccatgatttatctcaatgggaagtacctacaagttcgcaagcggagttactgatttcaaccaagagattcaatgtataattttgttatgagacgaagagtccttgcttggaccgagacacctcaatacccaagaagtattttagagcactcaagtccttcatttcaaattccttgacaagatagcttcgaagcttctttatttttgtagagttactacctttaacaatcatgtcatcaacataaacaataggcaaattaatatcatcatcatctcttttgtagaatagagtgtgatttgccatcacttgtttgaaaccatattccttcatcgagtagctcaacttgccaaaccatggccttggcaattgtttcaatccatataaagccttttttagtttgcatactttggctccttttgatgtgaacccaggaggggggtccatgtacaccttctctaacagattaccatggagaaagacattctttacatcaaactgtcttaattgttggtccatattaaccgcatcaggtcattttaagcatttatgggacacattccaatggttgggatgccaacactatagtcagattgtcacatcgttgttcttggaaggatattgcacaagtctttcaggatttttccaagtatactcggcttgtggtaggagatggggaaagaatttagttttaggaatacttgtggtggggggaccaacctttgggttcccaatatccaagactatttaaagtagtcacggataaaaatattcctatatcttcaattctcggttctgctcaccccttctcttgaaactttaatttccgtcgtaacctttccaattccgaggtagaagatttagaaaacctcatgcggtcacttgattgtttgcatttatccccattggtttcagatgcgagatcctcgtctttatcttcttcagggcttcttatagttaagtctttttttctagccttgtcccacttttccgattcttctccagttttcctcactaagtttgtatggaattcttaagtcccttttaaagtcaaggcctttgtctagttagtggcacacaagaaggtatatactaatgacttgctataattgagaagaccttacaaagctcttagtcctgacatttgtaagttgtgtatgaagcatggagaatcaacaaatcatcttttcttacattgttctttgacgatggggttgtgacatagattatttcagttagccaagatggattgggttcgcttgaggagcatcttcaacatgatgtccatcaattataaaggttttggattatccaagagagggatagttttgtggcaaactgagtgcattgctttaatttgggttgtgtggcgggaaagaaatgcgaggatatttgaggataaagcaaggaattcagagaatctttgggattccatccacttccttgcttctctttgggctttttgttccatggtttttaagggcattccccttaatgtgttacaactagattggctagcagtgtgtagctccaacgggatagtctaacctagagagtttgtttgtttttacattgtagcttcttgtttttgtattcttgttgtttagtttttctttggtgggaggattcctcatccttctcttgtacttcttttttctatcaatatatctctttgtcgtttcctatcaaaaagaaaaaaaaaaaaaaaaatattaaccgcaagagagagtatgactaacggtgttcatcttggtcataggggcaaaggtctcttggtagtcaatttcgtaagtctaggtgtattccctggcaaccaatctaactttgtacttgtcaattattccatctgacttgtacttgactgaaaacacccacttacatcccactatcttctttccttaagggagctctctcccaattagagttcttctggtgaaccttcatttcttctaccatagcagacatcatgactcaaataaaacacaattttatagttgttctacccaatcccaacctacatccactctcctcaaacttcaatcacgttaagggttccactaaaaccaaatcttcaatcgaagtctttacttcaatgcaattagattatggttccaatcaatcattgcaattcttcctcaagtgattaccctcactcgaatctttctctcaaagtttcttaaggaatgaaagagcaaagacaatcctagtgtgcaagataagatcttaagatacaaatgaaaagctaggattggatcaaaggtgaattaatgaatttgcaagttgtttgaattgaattcactcaaaaacactttatgagaattctttaattggtaggaaattgaaaactcaagttctcttgtccataaatgcactttaaagctcatatttataggtggaaaacttaaaacacttatttgacacaatttaggtttgattgttcgaacaattggttaaaccggttcacttaccgttggacattaaatgccatagtaggtgatcattggggtataagagcttgattggttgagcatctggtcaaggcttatgcttcaatgagttaaatacccattctaccaaactttgcacatttaggccaccttgatcggttaggcccaagtggtcgaccggttctcttgttttttaagctattttggaaatttgcaattttgagggcaaaccaacaatagggagcatcgagtaagcttccaaaacacccccagaaaccctttaaaacatgatttttttagagatttaggcttaggtttagagtaaaataaaacgtcatctatttttgagaaaatgaaatcaattcaaagcataaaatggatggtttcaaccttaagtgcatggaatatttaaattaatcctagtacaccattaaccaatcttactcaaggttcctaatgtctttaaggtgtccaagtcttcacaaaatcaatattgtccttgcttgattcttgacttggcttaattccttaaaatccttaaatgataagcttgatgaacaattagtgttgttaatctcgttttgttatcatcaaaacttgattaggggaaaccttgggctaacatgtttatgtatttgtgtgaatatatgaaaaaaggaactaggaattatattactagaagagaattagtttacgaagactcttagtagttctaattatgagctctttctttgataggaaataattgtttaattaaaaagggaggagagcatcaaagagggtgagtatcctttagactaatctaaagtaaaaataatgagacacgaaacttaacaataacaacaaaacttatggctcaccaaattatcctagaagacctatgaaaagagtcaggaaggtatgcaatcctaagaaatatttttataatagcctctagacgttgtttctctaaaaactgttgaaggaatgaataatttctcactcttgattctcaaaaaagaatgattacaacttatatagatacaaggttgactagactaaagctaatttaggactaaatcaaggaacctaattacattcaaatttctaggaaagaaataaggaaaaaactaaaatatacaaccataatatttacaaacaaattataggcattcaaatttagacatattttgtcaaatctttcaacactcccccttaagcaggtgcaaagatgtcttgtattcctagcttgtctaagatttgatgaaaaaccagatttggcaaacctttagtgaggatgtttgccaactgcctagttgaggagacatacggtgtacaaatttgttcagaatctactttctctttgatgaagtgttgatccactcccacatgttcggtgcaataatgatggactaggttatgagctatagttatagccacctcattgtcacaatacaacatcattggctcctttatcttagtcttaagatctatgagtctaattttcagtcatgatatctcacaaatattgtgagccatagctctaaactcagcttctgcattagatttgaccacaacaagttttttacttctccaagtgactaaatttcctcttagaaatatgtagtacctagtggttgatcttttatccaccattgaacttggccaatttgcattggtataggctcccaacttgaaatcgtcattcttttgaaacgttattcccttgcctagggttgtctttagatatatgataattctatgcacaacctccatatgagatttaagtggagaatgtataaattgacttaccacacttatagcatacgctatgtcaagtctagtgtttgataagtaaattagtttccccactattcttttgtggatgccccagtcagccataggttctttattcttgttccctagcttatggtttgactttataggggcattaacaattttgcaccttagcatgctagtttctttgagtagatcttgtgcattttttcgttgagaaataaaaattccctgttttaatcttgcaacttttatccctaaaagtaccttagattacccaagtctttgttctcgaattcctttgctaggtatgactttaattctctaatttcttccaagttattgctagtaacaatgatatcatctacatagataatcaaaatagttactgaaccaagaggggaatgtttgaagaatagtgtgtaatcaccttaggtttgatgataacccctcatcatcattgacttagtgcatcttccagaccaggttcttggggattgcttgagcccataaagtgattttctaagtctccacactctatttgtctaagatttgtgtatgaaattaggagcaacatccatgtatacctcattttctagatctccatgaaggaaagcattctttacatgaaatggttgcaaaggtcattcaaagttagtagagaaagatacctgccagagtagcctagttggtcaaggaaaacactgggaagtgtggtcccagtaagtggcacatggtcctggatttaaatcctgctattgatgatatcctgaatttactcggtactggttgttgcagggcggtcagcactctgagattcgggtccctatggagagtcctaaaggtttggccatgaaaggttcctaagggtttggccatgaaaggttgctcaattatcaaaaaagaaaaaaaaaaaaagggttagcagagaaaaataataaaattcttatagggtttatctttgctttgctatcggtgcaaatatttttttttttgtcaaaaacaaagataaattttatggataaaagaaacggagaaggatgaggggtccttcccaaaaaatacaaaatctcatcatagagtatacttctccactatacaaagagaaactaaaacataggcattaacaaaataacatagaaattgaaaagaactcctctcaatgttatacacatcctatgaattacaaactaaaagccaacctagttgaataacattacgtggaactcccttaaagtgatgaaacaagaggcccaaagggaggggtataacatcatcttgcctaaaaaatcctaacatttctctcttgccacacaatccaaagaatagtgaggcaaatgatttgctaaagagtcttgcttcttaatgaattccctaattctctagaagaaataatcatcatatctctaatactcctaggtggcacccaaatcatattggctaaactgaagactttatgccaccaaagccacaaagctaatgaacaatgtagaaaaagatggttgatcgattctccacttcctttgcataaaatgcaccaatgcagactaagggatttgtagagtcttctcacctatagcaagtcattcgtatttacctccttgtgtactactaactagacaaaagtcttgacctttgaaggatcttttaatgtccaaaccaaattggcctgaaagaatgggattggattcgaggacttggataagaccaaaaagaaagattttactaagaatatgccaaaggaggataaagtccatgcccttgaatctgtggtggtgggaaacaagcgcaccaaggtgagtgatgacatgagtcttttaagagaatcaatttcaatatcaatgagattgtgatggaagttaaaatttcaagaaggtaaataggaattaccaaggatggttgaaatggtgaggtttttcactaagataactttatagagttaagaaaattgggaacatagaagttgacttccctaccataaatattcctagaaccggattctctccccattctccaccacaaagcgggtgggtggggcaaaaccttgaaagacttgtgcaatagccttccaaggacatttatgtgaccatctaaccataatgctaacatcccatccatgaggatgtgtcccataaatgctcgcaataacttaataccaaagacgacaactttcctttgggaacctccaaagctacttccctaatggagcattatttcttaaagaagtctttcctatccttgaaccttcactacctaactaataagatgatatctcttgccatcctcaatcccagaccaaaggaagtccctttgtattttctcaatctttgaagctattgctaatgagatcttagatagagagagaaaatagctaggaatgagagtcaaacatgactaaattaagtttatccttccccccaagagaaaaaagcctttttccacccatccaacctcgaggttccatcaatcattggatcccaaaatcctattgtctttgaattcccttctaataaaaaatcctattgggagagaggtcactttgaaactctacaatcaagcaacatggccagcctggataacaactcttagctaacattaataccagaaagaatgcttttctctaaatttattttcaaaccaaatagctggcaaaaaaccaaaaggattagcttaaggttttgttgaaaatccatagaggcctttgagaagaaagcggtgtcaccttcaaattgtaacagagacactgtagtcctatccctaccgacaaggaaacccttagttaaaccactttcctccattttggtcaacatcctacttaggacatccactacaatggtaaaaagaaaagaagaaagagggtctccttgtctcaaacctctagtggccttaacccaacctgacatttctagtaactaggactgcaaaatttgttaaagaaagtcaaccccttatccatgatcttcatcttgtgctaaagcctttcctttctagaacatgatccaaaaaactccaattgacatgatctccttcagtgcaaaggtttcttggtaatctataccatatgtctgagtgtaccttttagcaactagcctcactttgtacctttctatggttctatcaaccttgtatttgatgatataaatccacctacatcccactgttttcttgccttgaggcaggtccacaacctcccaagttttattttttttaaaggcttgtagttcttcattcatggcatctttccttggtttactatttaaggcctcttggactagtttcattagagaacaaatgaataataaaggcatggtattttgatggcaatctctgtaagggaaaaaaatttgagataagatgttgggtattagtatcaagactggaattaacattttcattacctgtcacgatttcagagattggggcatgtgcaagtactgtggatctttttctcttggagtacacattgaaatcaggtgcttcatgtctcttatgcttagtttcaagagactgaatctgcaatataggttttgagggatttaggttctggtcaagacttgaggaacttagactctgttcagtttcaatggacagactttcaggttgatttttttagactggttcactctcaaaaggagtagaatgatcataaagattagatgactgtttatatatagcacttggtaaaacgtaatttaaaaagtgatcagaatcgtgctctacaacctgtccagaatcaaaatcttgcactaacacctgaccagaatcccaccatccatcttccataatcttcttactctcgcccggaagataggttttagtgaaataaggtttgtcttcaataaaggtaacatccatggtgatgtatatttccttttggtgggaggatgctaacatttacatctgttttctgtgtgagaatgccctaagaaaatgcatttgggaggctttggatcaagcttgcttctcaagtggttatgaacaagaacaaaagaaacctgcccaaagatttttggaggaagagaatcaatgcttgaaaattttgaaggaactcttaaaggagtatctataggagatttgaatgcaagaacctaggatgacatatgattgatcaagtagatggctgttagaatgacttcaacccaatagattttaggaactttcatttggaatagaagggacctggcaacctctagtaaatgcctatttttttctcttggcaaccccattttgttggggagcatcaatacatgacgattgatgaacaagggcttttttttgaagatatgtaatcaagtcattattaaagtattctttcccattgtcagatccgagtgtctatatcttggttccaaattgtgtactaatgagtttatgaaagagagtagagattttgattttaagtgataaacccaagtggttcgagtgcaatcatcgatatatgtaacaaaccattgagaacctaaataattggaacacgagaaggaccccaaacatctgaatgtatcaaactaaatggagaaagacatttaggattttttattggaaatggaactcgatggtgcttagcaagaagacacttcacaatgaaaattgagatggtcaaagttttcaaacaaagatggaatcacctttttcaacaatggaaatggaggatgtcctagatgtctatgtcaaagccaaatctgatcaacttttgaataagaggtcaagactaagccttgacaccttaaaacacctatcttccaattagtatctatgtagtatagtccatctttttccttagcatgtgcaatcgccctccctgttacagaatcctgaaaagtgcaactagaagaagtgaatataaccaagcaattaaaatctttagtgatttttcctatggacgaaaggttataggaaagattgggaacatgcgacacagattttagagacaaagtggggttgattttgtctatgccatgaccagctataaaagaaaaagatccatcagcaatctttgttttttgctttccagaacatgtggactaggtggaaaataattttggaatgttggtcatatgatctgatgcacctgaatccatgtgctggaaaaacagtcattagagacattcattgcatggatattacttaaaacctgaaagttggtgtagaacttggattgtgattttcaagctgattcagcaatgaagtctaagcactcttgattttccagttggcaaatttaaactggatgaaaatgggactgatagaaggctgatgggtataaggttcaacaatgaaggctaagcacaacagtcagcaaaaaaggccaaagaaaaaatgcaatgaaggcttagaagaagatgaaacaaactgtagaatttttacttgccttgataccatgaaggaatgaataatttctcactcttaattctcaaaaaggatgagtaaaacttatatagatacaaggttgactagcctatagctatttaggactaaaccaggaaaactaattacaggcagatttctaagaagtaattaggaaagaaaaaaatatacaaccatacaaatcaattacaatatttacaaacaaattatagccattcaaatttggacataatttttcaaatcttctaatgggtataaagatctttaatctaagccttagtagtgaaactataactcaaaggtttaaaaatggtaaacaaaaatttcattcgctatccttccaacgtgaccatacataactgttccaagatacctaaagagcatcgatggaagtctactttgatagagatgtagttggggattgaattcaagttaaagccatcttagcatgcttcatacatgaggaggaaactactaagtagctgtataatgtaactcaaagcaaataccttctaattgctttgaaatcaatgcctagggagaagctaaaaggaagaattttcttgcgtcaccctagtttagaatgaagattcttaaaaagttgtttcccctaggagaaaattttcaaccaaaattcaataattaggtggtgcaaggtccttggtttcttctctatttctacatcacgtaccaattaaaagagagagggctttggatggtcatgtaagaggttataagttgtatcaaccttttatgagctactaatgaagtgaaggccttgacttgcaaggaagttaagtttctttcttcttatacaccgagttttctgaaatggaagaatgggtgctattttcatcatgaagaaagccaggtaaagatatggatgaaaaagaccacggcttgtaagggaagatatttcttatttttaactaagtgtgacaaaagagagaggttagaagatgaagattgggagtgaactcattcggggttatgggattatatgtgattttgtactatggtgtatatgttgattgggatttgtgctttcggtgttttttaattttttaattttttttttatgattagaactaaccattttattgtattgaaatagtaaatataagggaggatgagaaatccttctgacaagtatagagcctcataaaaaaggaaaatagttgtatggtagtccaaaaggcaaatttatttgtacaggccaaaatggttcacataatgctcactatagttcatggtcgaaatattttgtatggtggatgtggttcaaacacatccaccacatgattgcttaagaggtacctgatattaggaacatcccaattctaaaaaaatatcaataattttgtacaaccaccttgtcatatttcaatgatatatagcaaagtctgtttttacaaagagattgaagaggcccaatgatgtaggatcatagaagttccaccaatatagaagggtttattttttttggttgtataatgagaagagcaatcaaaaaagacaaaggcaaagaaaagaaaaaatagacctttggcaattacaccaaggttcctaaactatcttagttagatgaaggataagagaatcttgttgtcatctcattggaggagtcatttccttcatcattattcgttcattgttgttatcgtgacctaccaacattgtgtgaatattgtttgctttgggctcatagccatcatgacctccctcatggctttaaaacagattcacacagttcaaaggtgtcaccccttataacctctaggaacttctcctccttaggtgatgcggaggagtccttgagttgtgaattttttatccttctttcttttgtatattttcttacctttatttaatacaacgaaaagatagtttttcatatatataattacataaaaatctgagcaagcagttgtttgtattaggctattagcaacaagaatacaacctaagctagggcgttgttgatatgtccctctttagggtgtattaaactcaatttctatagttatttgttaagaaatctaggcagatgaggattgatgatgtatttcatgtgtcatggagaggcccttcttcatatcatatttgatttggctattgaaggagaggtcctaagtgtttgttaaaggcaccttatttgggccttggaaaccatcatatggaaggagactcgccaattgttctctctttggtctctcaggggagaagatatccttataaaatggcttggcttttgttggggaggtgcttgttccttgtggtctatttttgctgtcaattttgtttgtctcctctgctttgttcttgtctattggttttttaattattccttttggaggatatgcttgctctctgtggtctatttttgttgtctattttgttggtttcctctgtgtttgttcttgtctattggttttgttattccttttggaggataggtattcattttttgtaactatccctttctttctcctataaaaaattgtgtttatgagacttgattgatggaatgatcctatttgatactaaagatgaatttatctgattagtggagctagattcaatactgaatcatggtgatttaaagatgcttattatttatatttatgtggacccctgtgcctgtcctcagtttatagcccaaacatttccttacttaggaaggatttttgggtggagctcttagacatttatggtctttcctttactttctggtgtgtgggcggtgattttaatgttataaggagaatttcagaaaaattgggaggctctaatttaatttctagcatgagggactttgatggatttataagaggttgtgaattaatcgacccccttttaaggaacactccattcacttggttaaacatgcaagattcacctgtgtgtaagagattggatcggtttctttacacaaatgagtgggagcaattctttcctcaaagccttcaagaagttcttcctagatggacattggatcattgaccgattgttttggacacaaatccattcaagtggaggataactccttttaggtttgagaatatgtggttgcaacatcctagtttcagagattgctttagaagttggtggagaggctttcagggagttggttgggaaggtcataagtttataaggaagttacaattttttaaggccaaattgaaagagtggaataaggaatcttttggagtgctaaaggaaaggaaaaaatgcatccatagtgatattgctaacattgatgctgttgagcaaggaggggttctttcttttgaactttcagcacaaagagctttgagaaaaggggagttggaggaattaattttcaaggaagaggttcattggagacaaaaagttagggtgaaatgggtaaaagaaggggattgcaattcaaagttttttcactaagtggctaatggcagatgaaataggaaattcatcaagtttctggagaatgaaagaggtttagtgttgaataatattgatagcatcatagacgagatcttactcttttatgaaaagctctactcaagtccccctggagagtcttggagagtagaaggcttaaattggtcccctatctcagaagagagtgcttctaggttggattccccttttactgaagaagagatttctaaagccattttttagttagatagggataaggcgccgaggcttgatggatttaccattgcagtgtttcaagattgttgggatgtgatcaaggaggacttagtgagggtgttcgcagagtttcacagaagcgggataattaatcaaagcaccaatgccaccttcgtagtacttttgctaaaaatagctagacaaaaaaaatttcatactttagacctatttccttgatcacttgtctctacaagataatagccaaagtcttatcaaggcgattaagaggtgtactacatgaaactatcaattctactcaaggtgcttttgttcaagggaggcaaattttggatgcagttctaatagccaatgagatgtggatgagaaaagacgatcagaggaggaaggagttgtcttcaaaattgactttgaaaagggttatgaccatgtggattgagattttttggatcatgtgttggataggaaggggtttagtcctagatggaggtcttggatgagaggttgtttgtcatcggtctcttatgcaattttagtgaatggaaatgctaaagggtgggtcaaggcaactagaggattaagagaaggtgatcctctatctccttttctgtttactatcgtcgctgatgtgttgagtaggatgttgttgagagcagaggaaagaagtatgttggagggcttcagtgtaggtaggaatagaacaagggtgtcccatctgcaatttgtagaagatatcatcttattttctagcacttgtgtggaagaactgcaaactcttaagtttattttgttagtgtttgggcaagagtaacctttatggcatcatccttgatcatgatcatctctttaggttagccctgttgcttgattgcaaggtttctgattggcctatactctacttgggtcttcctttgggagagaatccaaaggcttgtggcttttgggatccagtgattaagagaatctcgcggagattagatgagtggaaaaaggcttatttatcttttggaggtaggataactcttatccattcatgcctatcccacattcctagctactttctatccttattcaagattcccgcttcagtggctacaaaaattgagagattgcaaagggatttcctttggttaggggttggggaatgtaaaagagatcatcttattagttgggatgtagtgtgtaaaccgaaggcaaaaggggaattgggggttggaaggatttctctaaggaatcttgctcttttagggaaatggttgtggaggtatcctagggagagttcaactctatggcatcaggtcattctaagcatttatgggacacattctaatggttgggatgccaacactatagtcagatggtcacatcgttgcccttggaaggctatcgcagaagtctttcaggatttttccaagtatactcggtttgtggtaggagatggagaaagaattcgcttttgagaagacttgtggtgaggggaccacctttgggattccaatatccaagactatttagagtagtcacagttaaaaatattctcatatcttcaattctcggttctgctcgtcccttctcttggaactttaatttccatcgtaacctttccggttctgagatagaagatttagaaagcctcatgcgttcatttgattgtttgcacttatccccatcgatttcagatgcgatatcctagtctttatcttcttcagggttatttgcaatcaattttttttttttttagcgttgtcccaccttttttatttatctccagttttccctactaattttgtttggaattctcaagtctcttttaaggtcaagtcctttgtctagttagtggcacacaagaaggtaaatactaatgacttgctacaattgagaaggccctataaagctcttagtcctgacatctgtaagctgtgtatgaagcatggagaatcagtaaatcatcttttcttacactgttctttgacgatgaggttgtggcacaaattatttcgaatagctaagatggattaggtcctcccgaagagcatttatgacatgatgaccatcaattataaaggttttggaaaatccaagagatgcatagttttgtggcaaactgcgtgtattgctttaatttgggttgtgtggcaggaaagaaatgctaagatttttgaggataaagctaggaattcagagaatctatgggattccatttacttccttccttctttttgggctttttgctccacggtttttaagggtattcccgttaatgtgttgcaactagattggctagcagtgtgtagctaagagagtttgtttgttgttgttaccttttagcttcttgtttttgtattcttgttgtttagtttgcttttatgggaggattcctcatccttcttttgtacttcttaattctatcaatatatttcattgtcatttcctatcaaaaaaaaaaaaagatgcttatttctgctgtatgtattaacaggagcagacatagcatccgggcctgt

SEQ ID NO: 13543 - DNA, 2588 bp, Vitis vinifera
  Intron number 5 from transcript GSVIVT01016203001 (locus G SVIVG01016203001) derived from phytozome v7.0 (chr-ID chr1 3; pos 6644128 to 6646715 reverse strand)
gcagaaaaatttgtaatttacttattgcacaaaattttgtctttttcttctgaatttattttgttggatgtgacattttcttctatgaaattattatatgtggatgtgttgtactattgctttgactccataaatagatttttttttcctttatggaatccaaatatctgaaacaaaaactaatacccaactattcatgatatttttttgttatgtgcattttacttgagctactgccttgaaaaaatgtatacaagatgctgataaattacagaaactgaatgtttatgtgctaccttctagagttattgctagttaatcaataataaactacgacaagaaactttatacatctctttgtataaatatcttgattagttgaaaaccataaccaatgctatgcttggatccctctttatacaaacaatggtatataacatatggtaaactgttatccaaggtcctagcctaactgacatttctagtgttgcaacacagtagtctggattgtttgtggccttgaggattggctcaagtgacaaagggttggggtgggatgtgggagtttccatgtttgagtcctaccagggacctaaaaaaagggaggatagagagaggaagtaaaaatattatttattaaaaaggaaaaaagagcatgctgaagcttgaattgtgaagcaatggaagcaaaagctaatgttatagatttactttaaaatgatttttatttttggtttaaccacttggttgatcagtctatactagtgacttcatatatggttgacaacaaacagataaattgaaccactcaacttagctttatctatattagggtgatattttttttttaaacacctgttctaccttactaatcctatctgctcctcctttatcttgtcatttgacagcttcacttagaaccacaagcctcctcactctatggtcacaggaactaaataatacaaaattggatgtcatgatttactgttttgcctactctaaacattctaaaatgacctaaagaagggtataaccattatgagtattctggatgtctgtttaggaaagtttacctcctccctcttctttctctcacacatacacacacatgcacacttatctgctggctttgtctttgtacctttgtgcaccctcttttttggtgctggtaatatattctctttgcctatccaatatatatatacacacacaagtttattttcatgggtagctttatgttattaaatatgttaaactcgtttttattattttttattcaaggtttggactttgtcatagatgaaagtgaaaattgtatggaagtagtgattggtctatgatgtatcatattgaaaaagtatatgtattctggatgtatgtttagaaaagattacaaatataaaagaattgaaactttgaagatgacacataaagacatatatcaacaacacatagatgtgcaaatgcctagtaaaatttggaactaaaaattatatctaaaaattttaaaaagtttattctgtgaatttttttaataacctatacattcaactcatatgttgtcaattgaactttttaaaattctagcattcaatgttttcatatggtatgatatggtttaaaatctttaaatcctactatttttcatgaaattggttatatattattttatacttaatgcttccagtgcatatctgcatgcatgtatatatttttttatttaattttttgttatatcaaaaacttatgatatacaatacgatacaaaaaatagaaaaacattatatgatacgttttaagttaactactatgaatacaaatggtaattgttatattaattctcatatagaaaacataaaaatctctctcccctctacccctctgaatgtgctatccttgtctttttacacaagtttacttgcaagggtagctttatgcaattagatgtcttaaacttgtgttttttgaaaggttctaatttcttaatgaataagagtcaataaaaagctagatgttaaaaattgttctatgtgtttttatctagaaagaatcgaagagctcacccttttgttccatgcacatctagtggtaggagtttggtccaaacacaggcatcactgactgctatatcaaagttcatatccaagtatccatacaaaattactggttgtgttggtgcttaatcataaagaagcttgcataggtataaatgatcaggcaagttcagttatgtgcctttattagtaggagtttggtccgaacacaggcatcattgattggtatttctatactagaatgcaagtatctatacaaagttactggttagtgtggttcttgattataaagaagctgtggatgtgggatgagaccagcatgtattaaaattattttgttctgaaaatcttttctgactagaaactttttggttctttaaattcatgaaattatctgcctcagttattttttttttctctttatctttttaatataaatatatgtatatatctatatatatacatcatgaaatgatacatgttgcaaatacaactacagggtgggggagtttctgccaagaagagaaataaccc

SEQ ID NO: 13544 - DNA, 2181 bp, Vitis vinifera
  Intron number 3 from transcript GSVIVT01020531001 (locus G SVIVG01020531001) derived from phytozome v7.0 (chr-ID chr1 2; pos 4753174 to 4755354 reverse strand)
catcacttgttgctgacatattaattgggcccaaggttggtttgatgaactcatctgctttcactatgctactgtcagtttttgtcacactaaatttattgtgctactaactccaaatatttggataaggctttgttaaattaaagtttatcttggtgcatattactttgactaagcttcttacatcagattatgacaattttcttagagaatgcgtgtgcttgttattatatttatatttttggaataaaattcaaatacatgtggagagaagaggattggctcagcatgagcccctcaaccctttatatctcaatgggttatatttatcacaatgaattatcctcttgtacaaggatgaaaatacacatccatccatagtttctttcaaaatttctgttttcagttagtatcctctattgtcaccccctttcctcacagtgattttattatttttttctctctttgctttctactgatactctttaatctttatatggtttgaagcatcttgaggaattatctgcaactatgctttgctgagaatggaaccttaaaaaacagattattagtctgctaagaaacatctttattgcatcatatctcatctatggtcattgttttaaaatttccttctttacaaccacaaagccatgtgattgagcacctcttggactgaacaaggacatgataatggcatctttcatgattaacatgaattcagctaaactaaatcatgcttcagagaataaatccttcctcttgtaatcaatccaacctcctcatgggaaataatatgcgaagacttgaggataaactattaattagaagaatgtgatgctaggttcaatggtttgtgtggcaatgaaatacaggaacctaagatgtagaagatcttgattagatgcagatttggcggtactagctactaggatcctatgattctcttttgagctttcagtgcaaacattttaaccaaaatgatctaaatcttagcctgaattttttacaatttacagtcttaaatcctagtgctttattatagatccagtgtcaaaattttggagaaatgaactagagaagaaaaggttagtatggactatcttatatatttagcaaaaaaagttgcagaggctacatttggatgttttagggaagttgaataatccccttgtctttttcatagcatttgaaacaggactttacatttttcatttcatatggaatttagtccattcattgtgttaggcatgcaattatgccactccttgggaaagtcatggttgatgaaatgaccctaggatgagtgtgcaagtccaaagatagttaggccctgttataagcctcaagataggcatgttatggatgattaagccccactgtaatggttagatgtcattataaaccttgggatgagtaaaaggcctcaagataggcatgctgtgggttggtcaagccctactgtaagcctctggatggttaagccctgtgataagtatgaatgtgtgtgatgtcgaactatataaagatgattaacttgacctcattaatcctaacaagtattagacctaggttatgcgttcaagtcacaggatccatatgttggggatgaattcttaggcatataacaatgttgctcctcagtcaattggggctaaagccttggtcctaacacagtgcataccaagaggataagatttatgattttgttatgtatcatggtttcagttttatacttgattttccatggcaaatttgctctttaggatgagatttgttctctaatacaaaggctatcttacacattaaaaggtatacaaatccaaaataataagggaatattataaaaaaatttcctgttgtgtaaatgtgtaacttacatcattgtgcattcaaggttcttttacacatttgaaaccttactccatatgaagtaacttcaaagaattttagatattctataaacttggccttcttggtgttaattttccattttattgctattcttttcttttttttctttctcttattatagatgacttattgacccatctggaagatatatatggatcaatagaagcctagtattactaaacttgagtcctattctaacttgtgatgtacttttatgcccgattttctgcaggctgtgaataaccccatactaaaggagatcctttt

SEQ ID NO: 13545 - DNA, 1292 bp, Vitis vinifera
  Intron number 4 from transcript GSVIVT01029918001 (locus G SVIVG01029918001) derived from phytozome v7.0 (chr-ID chr8 ; pos 1474643 to 1475934)
gaagttgaaaagaggcagtgacagtaaggctccaggtgtgattttgccctttatttgaaattttcattacttttccaaaaaatctgttgggctttaggccttattccactcatctgtgttttttcttggcttttgtttttcaaggaattctttttgtttgacctggtttttagttttcactctttaacttgatttcctatcatttttctattttttaaattttgggtttaccatattatttttttctgatcaatgttcaaagttatagtaacagttacgagttggtattcaaacgtttaagcacaattaaggtgagagtgccaccattttggatgattaggcagtgcagatagaagctgatcatgggtgtactagtaagacctagcatgaatttggaaacctcagttgtaaaatgtatcaaatgcttcctccttgtatgtattgtatataaaagaaaaacttcgctggcagaaaagcttcatccttatatctactagcaactctctggcacagatcaagattacacttatgtagggagcctctctccatggtcacaaatcagttgtttgtgtatgtcaaacactagtttagccctcggaatgtaactcagctgtagtgccatctggcagtgaactagaggtccagagtttgagcctattgatatttaagtggtgtagagtagaggtgcggatccatatcacctgaggtatgttttgcctgcagttgggatcctcaccatactggtggattttcctcattatctacagaaggaaaaaagatacatgaaaaacttctcttctctgatggagagtaaagaagctttatttcatacctttttatacgatacagtctcccccatgttggggaaaatgtgggtaccattagacttcagtaagttgggcgtgactcatcctattgtcatatttccaaaaagcccgaaaccccacatgtactttggcaaaaagtcatccaaattcaatgtgatgcaacttgtccatatgtagtagacctagagatttatcataattctagttcgatattcaattaaacttgggtggtcgaattagtctcttcttggatgtgtatgtcctaaaaagacaagctatcatccttggattgagaaccccaaaaaacatggaaatatttcctgcccgttgtcatgttcattttgaaaacaatggattctttgcaaaagaatgtatgtttcaatttatcatacatgccatcgcgatatgcaatactcattcagttctgagctcaccccttacttttcggtttttctacaggtacaa

SEQ ID NO: 13546 - DNA, 1878 bp, Vitis vinifera
  Intron number 3 from transcript GSVIVT01003614001 (locus G SVIVG01003614001) derived from phytozome v7.0 (chr-ID chrU n; pos 11277891 to 11279768 reverse strand)
cacaacaacaagcacaccctgggtaagaaaccctagaatcctctatatctattgtatctacctatatcatcctactgcgcagtgagtgtaacaatggaagttcatcccgaccggttacaaagttgcaagtgggaaatgttgttgttgctgagcactctactttctcgggaatttagtttttctctttctttccttttttctcctttttagggtttttatctctctttccttctcttgttatcttcttggttttccacttctgtcgtgctggtgtttggatggatatgatatgtccacttgttccaaaatctagagtaggttattgttgatgtgttgttctcttttcgtgcatggaaaatctttacttggtttcagtagatgtttctttatagcagtacctagtgagtaacatgagtggaaagatggtgaatgggggtcttaaggttttctgtgtcataactggttggagctaggtgtgaggatatgcttgaaacccaagcatttttccttcaccttgttcaatttcagccttcatttgtaaatttgtgtcatcttataaactttggaacagacgtgtgagaacctgcattttccattcacattatctctttctacgcgtgcgtgtgcttgtgattttcttcaagagggagttggaggttcatgtttgaagcattatggatggcattgaatgagtgcactccctctttttctcgctttcttttcaaaatttcaacacagatccctcgtcctccattcaatgtggatgcgcgctgtctgtgttaagagtgtgtgctttttactcgcgtgctagctctcagagcctttgcttgcctgcatttcttcttctcttcttttcttttctcttttatctcttttggtagaggtactttccacattaaatgttgcaccaaacaaacaaaacaaggatgaatggaagagccccccttctctgccttatttctgttgcaatgtctttgtttttccttgctctccatttacttttgcagttcaagtgcagtttccgatcttttcttttttctttctaacatttgttagttgtttcaaaattatgagagttacaggttttccattaaaaaattatagaaaaataatataccttatattacttcaacatggccatatgattgaaaaggtagaacccagatgtctgatcattgatagggggtaccttgggaaggaaagagctgtaccaaattgttttcacattattttatactattttatttgttttattttctcttgggaaagagaatgtatctgcaacagtagtatggtctcatggaagctccaatccaaacgtgggttgagtccatgtttcccaaagtcgatagatccaaagcttgcccttaaattcaatctctcttctttttttccttttctttttccctacatgttccaagggaaacatgtgggcactcatccatcaagaaaaatctttatatatacactagaggtacacgctgcttttgtctgcaaaatttcaactactacctggcctcacttgagattcagctttgttgcacggattccattaagatcccaagaatctcttttcactgatcttcttcttccttctcttctacaatcatttctctccaattctcctcctacaggcaaaagcagccgtttgtaaactgctattagttagtaattaaggattcatggttcaacttgatacagcagggggtctggtttgttcggttagggtaagattaagagaggtgtgcttattttggtttcctttcactagttctatatatgagatttgatgtttcaagtatactggcaacatacacttttgttgacgattttgcttttcctggactccaggcttgcctacaagacatacccttcaag

SEQ ID NO: 13547 - DNA, 4383 bp, Vitis vinifera
  Intron number 3 from transcript GSVIVT01031499001 (locus G SVIVG01031499001) derived from phytozome v7.0 (chr-ID chr6 ; pos 17922925 to 17927307)
tcgtaagtattttgatttttttttggaattcctagttaattgacgagtgtgatacagcagtttatgatattaatgctatccaaattactgaaaatatatggataataagtgtgtataataaatatacaaataaaatgaagtagaaaactgaaactcacaaataaggttgatcggggttagagtttgactctatgttcttaaaacggatttgtcccactcaagtgcttacggtttattgacaattgtctcccaggatacaacaatcactttcttatgataatagcatttaaaatcacaagaaacaacgaatcacttggtgatttgtactctcttgcataccaaatatttgatagaaaagagaaatgactagacttgaagttaaggaggacttaaatgacaagaaaagagaaagagtggagagaatggatgaatgaatggaatgctatgggggctccctatttatatatttgttggtgacttattagaagagacatgtctttaaaatactagacacatcatttgaaacaagtggtatcgattaggaaaagatgtgtcctaatttccattcacctatataaatattccaacaatcccccaaatgaatgaaaattgtcttaaaaaatgcaaatgacaagttaatcaatcaagagagtacaacttgaaaagtaattgcgtcaagataggtagcttgtgactttgaaccttccttagtaaaatattattggattagctaatcagtgaacgtgatgtcttaaactatttagccgttgatgtaaatcaagacaataatattcacacaattccctttcgaatcaccattgattttcatggttttgttcattttgaccctaaacagatcctggtttcatgagtgctataaaaaatttcagccttgaaaattctcatagaaatggccccatttcacactcacataggtgattcctattaagagtatcctgtcataccccacttgttttccaagctataagactcattaaaagcaaagcttaacctagttcatgctatagaaaacactatttcatcataggaataggtaagagattatctctttagtgtttatcttagtcattcataacttagttgtccttttgaacctagatattgggatctccagtcaactaggttgggttgccattatgaagattttttggtcataggctttagtcccattccccttgataagtagttaacttgatctcttggcaaacctttagtaagtggatccgcaaggttgtcctttgatttgatgcaatcaatcgaaatcactccatttgaaattaattgtcttgtattttttctctaaggactctcaaagttccttggcagttcttgttggactatacgcattgtataatgtgttgtccaaactattgaggatgtaattcttgtatagaaagtcagaatgattccaagctcccatagttgcttgcacttgtttatcggtttcaccctcctttaacatagggtcatcctcatataggacccgagcaagattcagagttgtaaggtagaacaacattttttgttgtcacctcttgagatctgtcccagtgaacttcttaggtttctcaccatttgcagcaataggaggtataatagaagatgtagaagccatcttcactaaaaaaaatcaattgtaataagattagaaataaaagaaaatttagcttaagcttgctatccaatttactaaaaatatatggataataagcgtgtatgataaatatacaaataaaatgaagtaagtagaaaattgaaactcataaataaggttgatcgaggttagagtttgactctatgtccttaagacagatttgtcccactcaagtgcttatggtttatcgacaatcgtctcctaggatacaacgatcactttcttatgataataacacttcaaatcacaagaaacaacgaatcacttggtgatttgtactttcttgtataccaaatatttggtagaaaagagaaatgactaagcttgaagttaaggaggacttgaatgacaataaaggagaaagagtggagagaatggatggatgaatgaatgaaatgctatggggggggtccttatttatagatttgttggtgacttattagaagaaatgtgtatttaaaatactagatacatcatttgaaataagtagtattgattaggaaaagatgtgtcctaatttccattcacctatactagacacatcctttgaaataagtagtatccattaggaaaagatgtgttctaatttccattcacctatattaaacacatcctttgaaataagtagtatccattaggaaaagatgtgtcctaattttcattcacctatatacatattttctttttgataagtaagaaaagtattgtattatgaagaggtgttaaaataacaacttaaaatgtacaaaacagaaagggaaatactcaccctctaacaagtgaaacaaaaaactgtccacaatgatatacaaaaaacaaacccttcccttaataggaacacgcccaatcaataaactccaaaaaggtcgatggaccatcttttataaacaatttagtctccaaccaaagtgagttaagaaaagaagttttcagcatttggatggatgacacctcatcttcaaaggcaattttgttccttgtctttcaaactgtccaaaaaatgcaaagaggacccgctctccaaactatcttatgccttcttcccacaaagaatccgttccaacccaatagggtttccttaactgaagatggaaacacccaagacactctaaaaagagtgaaaagcatttcccgtaatgcccttgtcttctcacaatgaataaggagatggtcaatggattcctcttccgcttgacaaaaataacatctatttgctaaagcccagtctctctttttaacttggtccaaggttaaaactttgcccaagatgcctcccaagcgaagatatttacttttggtcgtacacatgatatccaaatgttcttcatcggaaataaaattgaagagcccgactctagggctttgtaaagtgactttgtcgagaaaattccatcctttgtttccatccacttcatcctatcctcctcctccaagatcagattctgaccacacaagcgtaatagaaggccctccaactccccctccccccctattgtcccgttccattcatccttcacccaagtttccttaggattagctagggcaaataaggaagggaaagaagcacataaaggtgtatccccacaccaagtatccttccaaaagctcaccatttggccattccccaccacaaaggatagtctactactaacgatgtgcctaaccttcctaattgctttccacaaccctacaccataccctctcttacatcccgagacaaccaccctcctcattcctccccatcacctatataaatattccaacaattaaaagttgggttctgaggttagttgttggttgatgtggggtgattgtgttttgggggttgtgggatgaattgtattggcataattgtattattgaagagagcaaggttttgggagtccatttctttctgaataatgtcaaatagttgagtttcttgagtgtatgacgggtgagaatatcccttggtactaatcctctttctcatggaaaagtaccatataaaatgaggagagtatatccaggacacaaaggatgctttgtggctgtgttcccaccacaatttcaagattttatcttggtggaaagctcgaaacatttgtgcggaaaaaaaaattccagtagtttatgctgcagtaagctgcacttattttattgtattttattatcattgtgtatgattagcattctacacaaaatcacctatcaaatgatagaataatgtcatgcaagggtgattttgtatcttggaggcatgtccatttgtcacatgttttacttttatccttccttcccttggccctttctaaagagctgtgcatgtttggtttctattttcttaatgagtaccatggtttagacaccaaatacaggtagttgccacttagcaaggccttttagttattagcttatggtcatagtataatgatgctgcatgcatatttgtggtgtgctgaatttcttgtggcttatattggtattagttgaaatatattattgtaatttacatctattatatttatttaatctgcatattctccttatcttagccttgaaaaattccatatctggcaaatttgagttaatatagagttgtgggtcatactacagactttttttccttttgctattagattctttaaattgaaaattaatggttgtagcttttttttccatgttttcttgaatgttccaggctacttaaacggttggattttccagag

SEQ ID NO: 13548 - DNA, 3071 bp, Vitis vinifera
  Intron number 2 from transcript GSVIVT01027622001 (locus G SVIVG01027622001) derived from phytozome v7.0 (chr-ID chr1 5; pos 14977463 to 14980533)
aactggggaggttggatcatccattgctccttgaggtgaattgtttccttgttagttgcaaattcctattgaatgaatatagcttagttagtttttagttgagcttttctctttctaaatggtaattgaagtttttaacattatattctcgcctgtatattgtgtttggctttccatttgaacattatgattgctgtttggtgaacttccatcgctgcaccaaaaccacgataccgttgtgcactgtatgtggtacaagttttatcctatgttagttggattctcttttcagagtttgagttgcttgtatccattacttgaattcatctctattttacatgaaatttgattaaggaatacgtattgtccttttcttgttaagaaacctattatccagttcatcatttatccatatggttctttcatgtatatacacatacctaaacttataaattatatttagaaaattaacaaatttccacacgcaccattgaactatccttttgttgacttagagagctgttgtttccaaaaccctgttcttcatggtggagtaccaatccagtgtctgttgaataaattacgacttttttttcattgtttatggaaacaattacccatttccccaatatcttttggcgatgttcaattttgtgatgggacacaattgagcattcctgtccatcatgtttttatccatacctttttcttgtctgcatgtttcctaatctcatatctataaaaatggcagcacctattatttctttctgcttctgccccgctattaataattgcaattgattatttcaatcattattggatggatcaggttatctgagaggtcctgttcattaagagtatattgttagactaaataattccctaaggttttgattgtttttggacgagaacactttcatgaacaaacgcatctcataattatattgtcaaattcagtcatttggtttcttgcctagcagtaactggtacaataagtttgtatttcataattcctgatatgctggacttattttgtggatcgcttcttctttgtttcaggcttcaagatcttgtaattcagtctaggtggtccaaacaatgtacatgccctttagtactttaggagagtcatatgatggaatccagcttcgattccttgttagggtgtttgaaatgctgtcgaaggacagacaagcttctctatcagctatgggtagttctataccttttggtggttcctcattgccactttcattcatctaccatgtctaattccatctctgggccctcatgattctaagcatcatttagtctatgatattcccccagttttgttctctttcctcaccttccttcaattctcacattcttctaccagtaggctttctgtcaggttttatatgtttgccactgaatcaacatgacttcttactacaccaagggcagcaactgacttttttaaacccacagaataaattaaaataaaaaccggagtttttcccctcccaaagggcctctcgaatctgacatggctgtttaagaacatgggttttatctgaagggccactggaacatataattttaattgcaacactctacaattataaatgacttgattacccatcctccgccctgtatgagttgacagttcaaaaaccatgtcttcaattaacactagaaatgtacatgccaactttacattcgaattcattaccttttatgcttcacctatctgctcacctttccatgcaatttctttctgccttcaaactaacaaccaatttttactcctggattaaaagaaatattcaagttcttttggaagtttaccagttgggaggctggttcctctttattctgtggctaaggtctttgacaatagcttgtttgccttattcttcattcatccatagaatgcagatatccctactcattaggggcttaatgtggttaagcgaactgccattgtagagagtttgacatctcacagtttggaagcttgttccacctggggtgtccctgttaagtaattaaaaaacatcaaactgctcattcttgtctttggaatgggaaggagagtatttggaattgtgaattcactgaaatccttgttaaatctttattctaaaggagaagattgataagcctgtaacagccatggtttttttccatgctcatcttctgtaatattcggcctcctattattcctaagacatctggacttctttggatttaatcatactgaggtgtcttgtctggtggtaaatacgatgtgcaattgcaaacaaggacttaggcagaattggtctatatggatcatttgagcaatgtgcttatttttactcatttcttcactagcatttttattttaaaaatttttgttagttgactatttttctgtttcacatgaataaggtctcacagtgccattgagctgcattagcttctgcttatatgtgaattgatgttttatccttcttttatttcaagtttctgaaaatttccaagaactagttctacttccataggtggttgatgctgtaccaaagagcaagttatacatgcaaaacaggatattagaatgtgtttctagaagatgcaaatgattaacatttcaaaaccaaaagttgttagaaatatgcacaactttggcagtaaatctcagggatgcttggcaatctatgaataagttttccatgaaacatttttgttttcaactaaacaatgttcatgaagagaatactttagtatttttgcatagcgacacactttttcatgatagttttggaactatgaacttgggcctagagacatctaagcagcaggtaaggattcaggttttcatccccaaatgattgggacatatagctttatgttgatattcatgaggtgtattccaagatcaatatctaatagatggagctttgaaagtactaaattcttctgaaataactttttgtttattcaaatgaaatactttgtattatttacctcttactacctgaactgaagtcattttattggtgcttcgattaggtggcagaactggccctcctagaagaatcttttga

SEQ ID NO: 13549 - DNA, 8729 bp, Vitis vinifera
  Intron number 4 from transcript GSVIVT01007845001 (locus G SVIVG01007845001) derived from phytozome v7.0 (chr-ID chr1 7; pos 8423956 to 8432684 reverse strand)
gagacagtcggcaagtagcacaggttgctcgtcaggtcagtaaacttcttcccttggttttgtgtgagagatatgtatatcttatatattttacacataagttgctcctatcatacttttattcaagcccaatcttgtaatatatatatatataggatacttgtacattataccatcaatgttaagtgagggtcacacattgcatgtacagtatagtataacgtgggtgccataaatagtaaatagaaatgatatttaaatgaggaaattaactcaaatctgaacctgagttgggtctgaaattccacttcaaactgaactggccttgatcatgtaaatcacaaaatttcttccaccatgttgcagtccctagttagatccattatcttcgagatttaccttttagtcatgtgccaaaaactgtaactttgtcacctttgttggacccccaggagataaaaattgtagagaagtcaaaagatggcttgccacccatatttgggtgaatcctccaatggtgacattattatccaaccatataacagtgaaaatactggttcctaatattacagaattaccttggagagttgagtaggtagtgcttccaaatttttagtgtgaagaaccataattgattagtccacttaaatgtgatgattccaacaacaatagcacaaaatatttggacaccaaattaaatgtgaaaacccttataggacagaaaaccataagcctaggactgccccactaaaacaataaatgaagtacagagtttagcaagtaacttgcctcacaattcaacttcagatccttttgaagttcttgtactctacctcttgaaccactttgtcactcttgaagaagccacaaattttcccataatctgcacttcagtaaaaccacttcaaacttttcgaaagcaaacatctcagcctccttcaactccttcaagggacataacctctccctagagattgcaacgtcaagctgatagaattaagcattttgagagaatttgaaatttccaattccaaatcatgaatgctgtgcatgaatgtttaatttgaaatcaataatgaagagcaaaaatattaaaatctgctctgaatttactctcttcaatgcaattagttacaattttcaactagaattgccaatacatataaagtacacttaaacaatcagtttgtctgttgacaagttgaccaaccataatttttgaatatgtaagtgtgataaaagatggtgcaaattcctgtgtactaggtgtgttccccttttttgagtggcggttttaatatattttcatttgcagaagaagaagatggtgcaaattaagtttttatcatgcgtacaaaggctaatagggcattaagtattcttgtcagtaagtgtcctttagtcatttcataggtgatacactgctgctttttggtgcatcttagtactttcttaacataaaacctgtggtttgatctttatgaaagtgaatcctgaatagaaaggaatagagtgaatctgggttgatgtggccgagccccataattgcttatgagttgattttattgctgaggagatgaacaaggatgagcattcacctcagaaaagtctttctagttgattgttttggggataagttctttatttatttattttttgataggtaaaatcaagatagtattgaataagaagaatggcacccaaaaagcgtccccaagcatataggaagtatatgactatcacctggtagtagaatctacaaaaaggaggggttacaaaaaacaccacctgccctcatctagaggccaaccaataaaaaaaattgattaaaggaagaggtccttcatctatatatgacttagtccaagaccaaaaagtacaaacaaaggagttttttagatgttgtaccgaaagctcctcgttttcaatggcaagtctgttcctttccttccaaattatctaaaaaatacttaaagagactgtcttccaagcctttttgcacttcttgcccacaaaggctactatgtattatattgttagttgaagtaggggacaaggttttctatgatttacagagtctgttgtgtaaatcattattaagttaggggccagttagacttctcatgaagatgaaattatcctattttattattcctagaattgaaagcactaaaccatcctttaaaatgaagtctttgtcgatcttaatgagaatgtatattgaaactgaaaagtgataataagagctaaatgttgcagcttcttgatatctggaaaatgattttatacacttctaggagtaaattttctgtaataaatgcatagaagtgatgcccataggatgattgaaccatggctggtaataagcttaaggaagggatggttgggagtttgaattactggaagaaacaacctggagcacattcagttgagcacatggctgtgaagtttgggcctctacatatcatattgaacaacaacacattagtggagtttgtggagagatccatgagaagtggcggtgatatggaagtaggggggttggaaggggcatttggagcagtgaagggggattcctcccaatggtcttgaagaggaataccatgcctttgtggattgcttcaatggggcatctttcagtaagtttgtcaaatcgccaattgaaggtattgagggagaaatcctgactctctttaagaggatggagcttaagaaaagggcaaagttataatatattccttgtatgcttcaggttgcctcttaagcgccctttttctaaaaaaagggcaaagttcgtaatgtgaggattgagaagaattttgtctcaggtttagatttgagagggagctccacaagctggagtgctccatcaattctaggtttgattcaagtaaagggaggagtggaaagagtaggctaatgtatactccttgtatgctttgagaagaattttgtcttaggtttagatttgagagggagctccacaagctggagtgctccatcaattctaggtttaattcaagtaaagggaggagtggaaagagtaggtgggagatagctagggtttgttagtgaagattcgtattctctcttagaatgttggagagattaatgagcgagaaaagtagaaagtcgtataagtccctaattttatctcaaatgctagaccttgtatatttacatgaaacaaaggttcaacaaatgtcaatgaagattttgagaggtttaggtgtgggcaaatttttggaatggggtgttatgaatgccaagggttaagtaggggggattttggttttttcggacaatagggtgttgaagctaattgatatggaacttgaagagcattcaatttcttatcttttcaaatattgtgaggatagtttcatctggatgtttttaggactgtatggatcaattctaaatgaggagagagaggacttttgagtagaatgtgatataagagggctttggaatgacctttagtgtatcgaaggatatttcaatgtggttaagttccctgggcgaaggaggaactgcttgagatgcataatatcaatgagactttttttggagattattgaggaactccatttaagggtcctctctctttctagtagtcttttcataaggagatgtggttaaataatcaattctcattaaggctgaatcgtttccttgttttttgaaggttgggagaactgctttaatggattagttcaaagtgtccttccaagaccaagttccaaccatgctcttattttacaagatggaggagggataaaaagggacaaaatgccatttaggtttgaaaacatgtggttaagagtagaaaggttcaaataccttgttaggaattggtgagataggctacaatgtgattggtttgtatggccacatcttaacatttaagctaaaagtgttgaaatagaggctaaaagtatggttcaaatatgtttttaggtatgtcacaaccaacaaagtgataactttgcatcaaaatggtttttgggatgctaagaaaggaaagggaagtcatcatctcaaaggaggaggttgaggctaagagggaggcaacgaataaatttagaaagtgggtagcaatggaagaggtctcatggaggcaagaattaagagaattatggttaaaaaagggagataaaagcatgaagttattctataaaatgtctaatgcttgtaaaagaagaaaccatttggttaaaatcaagatgaatgacgaatttttatcggaggacacaaatataaaggaggcaatgacaaaagctttctatagtttactctttgaaatgagggagtggaagtcgaacatcactgggatgtcatttgacatttcaagtaatgacgatttaaagtccttgtagtcttcgttctctgagaacgaagccttttgagccctctcaagttaatgtggggataaagcccttgggtcaattgacacctcaaaggattttttacaatttagttgggattttgtgaaaaagtgaggtgatggtttttttttgtagagttctttgtggtaagctcttttgaaagaagcctcaatgccacttttatagtgctagttacaacaaaaagggatgcaataagatttaaaggacttaagatctatcaatttggtggagggttatacaagcttcttgcaaaggttttcggttacagactaaagaaggtggtgggtaaagtggtttcaacttcttgacacgcttttaccgaggacaaacaaatccaaatgcgcttctaatagcaaatgaagcagttgactcaaggttgaaaaacactgaaagtagggttatatataagatggatatcaggaaagcatgtgatggtatcaattaaggttttttgtctcttaagctaattttgttggtgtttgggcatctgtcaaggtttaaggatcaatataaataagagcactctttccaaaatcaacattagtcaagatcaaatcgccaggatgttgcttgattgtgcaatctctaattggcttttaatgtatttgagtcttcctttagaggggaacccaaaatcaatctccttttgggatctagtgattgatagtctctagaaggttagatgagtagaaaaaagtctttttgtccttaggaggtagaattaccctaattcaatcttgtttgtcacatatcctaagctacttcttatctcttttgaagattttagcttcaataacttcaaggattgaaaaaatgcaaaaagattttctatggatgggtcttaaaagatatcaagtcagttgggatatagtgtgtaggcctaatgaattcggtggtttagggtttgagaaaattgctttaaggaatcaagctttattagggaagtggctttggaggtatcttaaggaaagttctgccatttggcattaggttatcttgagtatctatgggacacatcctaatggatgagatgccaacaatatagtcagatggtcatattgttgcccctaaaaggccattgcacttattcttcaagttttttctacacacactcgctttgtggtgggtaatgggactagaattcgttttttggaagatttgtggtggggggttcaatcaatgtgctcacaattttcaagactttttagagtcactgcaattagaaacctatccatttcggccattttggataatcatacctctttgtctggggattttatcttttgtcggaatttaactaatgtggaaattgaagatcttgagagagtaatgcctttactttcccatgtacatttgtctccttttgttccaaatgcaaaagcttaggtaccttctttttcaggagtatttttagtaaaaaaaattcttagccttgtccagtttctcatattcagttcctttccacctagctgattttttttgtggaaatcaagcgtcccttctaaggtcatgacctttacctggttaatgacacataaaaaggtaaataccaatgacatgctatagttgagaaggtcttgcaaagctcttagccttgattggtgcatcctatgtaagaggagtagatagatggttgatcattacttcctaaattgtccaattactttgagattatggcataggatattctcacaagtttggatggtgtgggtttagctagacagtattcttgatatgatggttatttctttcaagttttttgaaactctactagaggcaagactctttggaagatcatttgtctcactttgttgtggattgtatggcgagaaaggaatgctaggattttcaagatacttggaagacatcagagatgatgtgggacttgcttcatttctatgtttctttttggacttacagtactgacatttttaatccctattctttgagtgtaattcagcttagttggctttcgatatgtacatccaagggttgggcctacaggatcaagttcctaaatgagcttcaggaggtgttatacttgtataggcttttttgttctttttgtatagctttccttgtatggtggaggtttctttgggtcttttgatcaggtttgtatatcatggggaggatttctcatccttctcatgtttttattcacttttaattaatacatctattttttctgataaaaataataataattaaggtttttggttggcaacttagaaaaaaatagttttttgtttgaagtgaataaggtggattaattgatgcatttctatgtgtggctttattatattgattaatgggctccttgtcgtttttttctagacttccaaaggcttgagaagggagacctaatatcctcctaccttttcatcatggccatgaaggctttctcccatattctaagtagggttaaggaagggggcttcttaacaggcttttctatgggtggaagagaagaaggaatgaaggtgttccacatgttatttgctaatcatatactcatcctttgcgatgccagtgaggagcgtatggaacatttgagctaggtattcatgtggtttgagataatttcagatgtaaaaatcactatagagtaaaatgagttgatctcagtaggggtggggggtggtctttgatatggagaacctagttgggattttaggtaaggtgggctccctccctaccagttatctgggccttccattgggagctccttccagatctacactggtttgggatgtggtagagaaaaaatttcaaaaatgacttgctttttggaaaagacaatacttatcaaaaggggaaggactaactctaataaaaaacactctttctagcttgtcaatttacttcgtgtccctatttttcatcttgagaaatgtgagtgtgaggttgaaaaaaattcgaagagatttcctttgagggggagatgctatggagaaaagtctcatatagtaaaggggggtttgggtgttagaaatatgtccattctcaacatagctcttcaaagtgaatggtgttagagatttggtattgagagggactccttttggaaggaggtgattataaggaaatatggggaggaagagggaggatgatgctcaagagtagttagggaaaggtatcaagcaggaatatgtaagacaattagaagtggatcagaggtttttaattgtagaattggtttcagggtgggcaatgggcggagagtgaaattttggaaggataagtaatgtgatgacttatcctccttcattgcttggaagcagtcatcttatggcagctgatttacactttggttggactaaggaatgcacccttgagctgtgacttcattgggaaaaagaggaagaaagcttagagagttgtgcccttatgcctattatggagcatgaaagagagaaataggaggacattttaaaatactgaaaaaatggatcaagcaatcaaacaattatttatatataattttttggtgtgggtcggattgtactggaaaattgctctttgttcatattagatttcattggttggttgacctctaggtagcgggtgggagttgttttttatgtatccctcatcttggtgtggcattttggcatcttgtatacaccatgtatactttagcacgcccttttgttaggcactgtccatatgatgaatataatggttatttacctatcaaaaagaaaaaaaaaagggttggaagcaggagtcctgaattacatatggaatgtgcagaaggacattggtaaagcgttagtgacgcagataaggaagttaagacgtgttacaaaaacatattaattagtttgaggactaaatgaagctcataggaagcatttacatttatgtttgaagagaactacaacatctgagagttttaactttctcccttttttcattgataagcaaggacataatttagagacatctaagagtttaaaaattattaaaatcaagtatttgttcccttgtgagacttcaaatattttttatgttttcttaaagttccaccaaaatttggggccaagattactttcaccctatgtcattctgtttgtaaccgtgttgctatgccatttggaagcacttttcttggtgtctatttaacactcctggtaattgagcataaaagaaaatccttggaccatatcccctctgatagccttgttgttcattgtaatatatttgtgtggttccgtggcatgatgaactcctttggtgctttaagtgtcagctatatgtttattgacatctttctgcatctttttgtgcacagctaatatctttgtcagagaaaaa

SEQ ID NO: 13550 - DNA, 6363 bp, Vitis vinifera
  Intron number 19 from transcript GSVIVT01033943001 (locus GSVIVG01033943001) derived from phytozome v7.0 (chr-ID chr 8; pos 16461597 to 16467959 reverse strand)
ttgtgattgctattgctccattggcagggctgagtgtaagtcccaatactgatacacgttactttttgtcaccccatgtgttgctgcataatatttaggttagtttagaggtttgttaatgtctgattctctgctaagggcttgtttggactaggcttttgaaaatcataaactcttttttaaactcaataagagcatctatacttgtttgggtgattgtagtaaaagtgcttctaactttaaaaagagcttaatacggaagcaagatgatgttgctttttgtagaagttctttttttagctaatgtgagaagctatttaatgtttaatgtaactttcacagcaccaagattccctctatggaatcatgacttgagcttcacctttatcttttggttaaagcaaaaatattaaaaaaaaaaaatgaaaggaaagtggctatcccaaaactaggctgacatgaaaatatgccctctatgatccatttggctcttcttcttcttcttttttttttttttttttttctgtaaactttcagaaatttactatttggtttacccaaatgctattaattaggcttgattgtgctattgatattagttttcaattaaacatcatagaaatgcaccaaggacaaaactaaagtcatttcagacttgcagcaaatttttgctaatgtgcctcagaggatggttattgataactttttagtatgaagtatgtgtgtggccctcggtattgaaaggaaaataataaattggtcctttcaaaattttagcactattggaaatctatgcaagaactttggtgttatgatgctgaactattcagttgcacaaaatgggaaggtgtataagaactgcagtggtttggcatctggtgtatagcttagttaagttcttatgcatgattcctgatgatttttttctttttcttttttaaaaagtgaatgttaatacataccttgaaatgataagaggaagttggtatgtgtcagaatcttctagtgcttgtaggtttgtatctgttactattgcaccatgtgtgtgtatgcagttgctaaagaccaaaaaagaaaagctagacaactattagccatgatgctacattgtccaaatggtcagcagattggcaatctgtgcaatcctagggagttttttggcagctatcatgcatgggtgtttgtttcagtgaataacatcagttactggaaaaattgagaatccttttgctatggcaagccactacgctgatgctctagagaggatataattatgcaggggttttggtgaggatttagagatgaggaagatttcaacaatataaacttgcttagaaaagtcctaaagggtagttttgaaggctatgtacaagtatagggtgatattcacagtttggcattgaaggagtaagaaataatggagttgagatgtaagggggccttgtgatattgtgacatttttcaaaagtgggctatttccaataaatggtctatgtgaaaacatataagaaatacataatttgttccttgatttttatgaatgttcaaaaatgtttcttgtattgtctaaagtgttgcttgggctatgatgtttggataactgattcctaattttccttgatttcataaaagctaagctggaaaacatttctcatattgtctaagtgttgcttgggttatgatgtttggataactggttcctaattttccttgaattcactaaacctaagctagaaaacatttcttgtatcatctaagtgttgcttgggttatgatgtttagatgactgattcctaatttcccttcatttcacaaaagctaagctggagcaaccttagtcattttttgtccatgatgtgccctttagcaatatcttgtgcatttggaattaatgaaaagcacacttgtcttttaattgcataatcttcaattcaaactatatagtactgtattgtgtaaatctcgctttaatgggtaagattttaaaaagaccatggactgtattttctaacttgaaattttctgatttcttgaaaatacctattgttattttttatcagaaacaaagatgaattttttattgataaaagaaagagagaaggatgagattgttattattattattattattattattattaaattattattattattattattattatcaaaaacaaagataattgataaaagagatcaaaaacaaatataaattggtaaaagagattagaaagagataaaaaaacaaagataaatttttattgatacaagaaagagagaaggatgggacatccctttcacagaatacaaaacctaatcaaagtaagagtagactactccactatacaagtataactaaacacataggcatacataaaataacctacaaactaaaatcaactcttttcaatgttattcaccctttttgaatttcaaattgatagctaacgtagttcaataatattaagtgaaactcccttaaaagcaatggaacaagaggcctaaagggagagtagaaataaagtaaatcccacaatgtctctactattctccactcctaaaaaattttagcatttctctcttaccacacaatccaaagaatagtgagccaagcaatttgccaaagtgtcttgcctcttattgaatttctcaatcctctaaaagagataatcatcatatcttcgatactcctgagcagcacccaaaccatattgactaaactctaaagttaaaggacaatgttgaaaaagatggtcgattgattctccactttctttgcataaaatgcaccaatgaggactaagggatttgtagggtcttctcacctgtagcaagtcatttgtatataccttcttatgcaccactaaccaagtagaggtcttaacctttgaaaggacttctaattttcaaacaaaattggccagatagaaagggattggatttgaggaattggacaagaccaaaaagaaagattttactgagaataaactagaggacaaagacaatgcccttgaatctgcggtagtaggagacaagtgcattgaggtgagtgaagacatgagtctttcaaacaaatcaattttggtatcagtgagattgtagtggaagttaaaattccaagaagttgattaggaattacataagatggttgagatggtgagatttgtcacttagataactctataaagttctgaaaattgagaacataaaggttgacttcccaccataaatcttcccataactgaattctctccccattccccaccacaaagcgggtatgtgaggcaaattcgtgaaagacttgtgtaatagcctttcaaggacatttgtgtgaccatctaaccaaaatgttggagtctcatccattacaatgtgtcccatatatgctcatgatagcccgatgccaaaaaccacaactttccttaggaaacctccatagccacctccctaagagaacactatttttgaaataagtcttccctatccgcaaacctcctaactcctttagcctacacaccacttctcaactaataagatgacctctctcttgctatccccagtttctaatcaaaggaaatccctttgcattttctcaatctttgaggctattgatatcgagatcttgaaaagagagagtaaatagctaggaatgtgagtcaaatatgattgaatttaggtcccccccttccccaaaaacaaaaagacaaaaaaaaacaaaaaagccttttcctatccatctagcctcctcgaaattctataaatcattggattcctttctaaaggtagacctagataggagagtggcttgaaactctacactcaagcatcatggctggcctagatatcaacttctggcttacattaataccggaaagggtacttttctctaaatttattttcaaacttgataactacccaaaattgaaaggattagctcaaggttttccagaatatcccggagaggcttttgagaagaaaatggtgtcatctgcaaattgtaaatgaaacactttagtcctatccatatcaacaaggaaacacttagttataccactttcctccgctctgattaacatccctgattaacatcctacttaggacatctgttataatggtaaaaaaaataaaataaaataaaaaagaaagagggtctccttatctcaaacttctagtggccttaaccaaacccttgacatttttgttaactaagactacaaaacttgttgaagaaaggcaaccccttatccatgatctctactttgcactaaagcctttcctttctagaacatgatccaaaaaaccccaatccacatggtcgtaggccttttcaaaatcaattttaaagaccatccttttctcccttgatcttcttttctcatccaccactttattggctatcaatattgcatttaaaatttgtcttccttcaacaaaagctccttaagatataaagattatttcatggagaactctacattattgccttgataagaccttacctataaacttataatcaagctaataggtttaaaatttgagattttgattaattgactcttttttggcactagagtaatgaaagtggcattggtactttgatttattatcccattaatgtggaactctaaaaacaccctcatagatcctctttgatcatatcccaacacttttgatacactactatggtaaaaaaattaggaccaggggccttctacttgttcagttggaaaatagtaaggtgcacctccatctcagtaaagggatggtctagccaagcagctctctatctagcgattggagaccactctaaaccttctatcttccaagaatcacctaagggtttggagtaaagctttccaaaaaactttaggatctcttttgaaatattttctatattgctcaaatttaccctctcctcagacaccaaagactttatgcatttttcggtttcatctcccattggccacactgaaagaaatttgaagttgcaatctcctttggtctatttcaccttggatttttgcctccaatggacctttttctttaactataattcctctagatctcacttccttaaggctctcaatgttgaaagatcaatactcattgctcaaccgagtctatcctaacaatgtctacaagaatattattcttttactcttttaaatctccgaacatcactctattccaaactttccatctagatttaacaaactttagtttcatcatatatctatgatcttactaaccatcaacttgacactcctgccaccaatgactaaaactttccttaaaatcagggtgaagtaaccacatattctcaaacctaaatgaagtcgggccccacttaaaaggtttagtatccaaacaaattggggtatgatctaagttccatctaggaagtgtttcttggagacttagagggaaattttggtcccattcatttgagaacaaaaatttatccaacctcttgcaaacaggaaactcttgcatattattttagccttgataaagccatcgtcctgatctgtagtctcatatgccaattttatttaaataaacattaatagaaagtaagtctctactccacctttctttgactccaagtttgtatacatctctttctgcatcgtttgtatataacttgagctataaatcatcatactttagtctggcctcatttgcttcccttttacctttcttgctttctttatatttcctttatagggggagtaaatagaagtaagcttcttgcaagttagtatattttattgggtttttggcttgtctcaagccattgaactttgactccatcataattcaatggtacttctagctgtaatattgtaaactctccctttgttttgtctcttcaactccataatgagcataatgaactttgtagggaaatactacctcaatgaatttgacctttgttttgtctcttcgactccataatgagcacaattaactttgtagggaaacgctacatcaatgaatttgaactcttattattattattatccattttttaccaattcacaaacaattactattattattataagtattatccattttttgatcattcacaaataatcttccctcacttggattactactttatccttgtggatgttggtatatatataaaccaagctataggtttaaagtacttaataatgaaattaaattactgcactttaacctgaattaaaaacttttgtagcttatgaaatgcagtcaaagatgtcttgatttgcttgaaaacctttgattctttgagattcattccgtatcagaactcatatttagtcgagagtgatcatgcattttccttttatttggaacagccaaagagag

SEQ ID NO: 13551 - DNA, 16330 bp, Vitis vinifera
  Intron number 1 from transcript GSVIVT01016940001 (locus G SVIVG01016940001) derived from phytozome v7.0 (chr-ID chr9 ; pos 2782763 to 2799092)
gagtttccaggaaatatacttccagaaaccagggcctaatctgaacagaacccagaaaatctaggtacattgcaccccagaagtgaacctgttctatatttcttgatgacattttctcaggaaaaaaaatctatcaggaaaaggcagaaaatatgagcccaaatcataattcttaatttaggttttgatagccaaaaactggcctagagttcagatattttcctttaaactttggtacatacgcaaaagatcacattacttgagccaaatatctttaaacctgtcgagttaattcagtcatcttacatggggttctgtccggctggccttgaatggtcggcaaatgtcaactacctataattactcaatcacatgcaactttctgttgtcttcagctcccactgtgtgtgcattatcctcccaaccaccatgttcccttcgtagttggatgaacaagacttcataattgtggtttttatgcactgagtgttatctctaagaatgagaaatgttatggatgtgagctaatttgagaagttgatattgtttcttttctgttatttgatgagctggagtagttagtgtggttgtgagactccaacctatatacaggtcaccatttttgtatcccggactgcacagaaatctgaatatcaatgagatagatattttcctctgtttttctttctcaacactctgttttgattcagaatttgtaatatggtatcagagcactttatgcttctgctcatctctgcatttatctccatttttgtttgatggcttaaggcaaccaatccaatacacgagctgtgattggattctctgaatcatcaccgatggaagacactaggagtccattctatcttcacaatggggatcatcctggtcttgtactcatttcacaccatttgactgggagtaattagtaaggactcccttgggcggacatgtggcagattgccttgacctcgcaaggcacccttctattggacacatggcaccccttcgcctcagtccggacatgtgccatcagctaggaacacccaatccggccctaatagtcaatggccggctgcctcgtgctcctccaagaatgcatgatgcgttccaaacaggatccctgaccggcttccgcgagcaatcattcttctccccaccaaaagcacgctcgatgggacatccccatgtcctttcaggtgacctgttacactctacattgcgccgcctgcagaatgagatgataagcaagacgccaggtcacctcaccagcgatctctatcagctgcctaaaggataatggttgttctaccaccctctgtgcaaccatcatgattgtgaaagtcaaaggaccttcccagtatagatgtgacaaggctccagacactataaaagccttcccatagctaaaaaaaaagggtagtaagacagtccacttcttgagttcccaagagggggtattctctctaattgtcaatctaactaaagcttcggagggtgtgttcggacatcttttgtaggagaggagaaagaagcctcactctcagttgattgggcgacgacatcaagaagacacgttacttccagttatccgtcatcaacattggcgtcatctgtgggaacgacataaacaaagatgttcacaccctcaagcagtcgttcatcagccatgggtgacgaaggttacttcgactggcgtgaaagaatggaaagacgatagcaagaaagcgagtgacaagtacaagccctgcttcaggaaacaaggagactcagggaggaaaacgatgtgttgaggattcaggtctctttgtcaggcccttccaatgaccagcgactgaggagccaccggacaaactccaggcataaccaagaggccatgtatcctgggaacacagaatccccccccccccttaacgtgcacggtgtatggcctaatgaaggacccctacctacctattgtgcactgcaagacgaaagctcgaactccactcatgtctcatcaaagaggcaatgcgatagaaagccctagttatctgacatgatgcgcgcaaggtagggacaacaagtacctagtaaagataggctgcgtacaacaacgacctaagaggcatatcctagtccctcagtcatacccatcacgtaagactgtcccccacactgaccactacaacgaatcgggaaagaggtggcaagcaaagccccccttcgactccatcagtaggcgattggatgacatgctctccacacctttcagctctcgtattatcaattacaagcccccaagagggttcctcgtgccaaaattttccgcgtacgacggatccaatgacccatttgatcacatcatgcgctaccgacaacttatgactcttgatatagggaatgacactctgttatgcaaggtcttccctgccagcctccaaggccaagctctctcatggttccatcggcttcccatgaattctgttgataatttctaggatccatcaaaggcttttgtggggtaatacctgtgctcaacacgacataaacagaatattagcaccctgcaaaacataaaaatgcaagaaaatgaatctctaagggagtttgtgaaacgatttggacaagctatattacgagtggagtcctacagcatggacgttgtcctctaaatttttaagcgaagcatatgtctaggcacgccattcttcgaatctcttgccaaaaaacctcccacgactatggatgatctgttctggcgtgcaaacaagtactctatgctggaagatgatgtttgtgtagccacacaacatatcctagttattggccaggcagtgaggaacaacgcgataaagagccccaaaccctcaagtcaacgaaggctaccgagcagggggcaaggcaagcaacgccagctagaccagttcgtgctcacccctctcaccgtgtcataagaaaagcttcttcctatgatcctcgagctatccaactttaggtggctagaaccactaaaaacgagcctagccaagagagatcacaacagaaagtgtgattatcacaaagagcatggacataccacagagtagtgcaggagttttcattacttggtggaaaaactcataaaagcgggacatctaaaacagtacatccgcttaggagctaaaagtggagaaacttcccaaaatcaagtctccgcagccccctcaactcccgttgttcctagggtcataatcaactacatccatggcagacccttgaacgaagaatacaactccaagcgaaaaagagaaaggctgctgtgggcctcctaggtccgagaaaatgttaactccatccggcctgggctagctagtggaggcactcacccaatagatggagtaatcctctttcccccagtggacccatccgaatattgtagccacaccgagatgcccttgtcttgacgctaggaatcgatgatttcaatgtgagacgaattttggtcgactcgggcaactcgacagacctcttgcaagtatcgctaataaaaaaaatgggattcatcccctccagtttagagacccagggtggatattgttaggattcaatggggcctcaaatacttttcttggggacatcgtgttgtcaattcaagcaggcccactcatccttaatgtgcaattttcaatggtagaaaacttatccatctttaatgccatcttagggcgcacctggttgtacaacatgaaagtcatcccttccacatatcatcagatgatgagttacctcaccaaagatggatagatcgatctctatggtagccagttgcctgcccgtcaatgctaccaagtagcactagaggccggacctagcaatgattgtgaaaccctccccccccccaagcaaacgtgcccaaccaatagaaattatagtacccaacagataaagatcccccggtagcaaatcctttgcaaactattcaagtcttagaggaagatggttgttttacttacgccaaccagcttctttttagagccaaacgagacgcaacgcctcaaggaaacacttcaacaaaacaaagatgttttcgcatggacgcactctgacatgcccggaatccacccatcggttgcctcccatcgacttaacgttttgccatcatcgagacctgtctgatagtttcatctggataggcagaaaatcattcaaaatgaggtagataagttactagcagccagggttattagggaagttgagtatctagacttgttggcaaatgtggtggtggtccccaaaaaggaaggaaagtggcgaggtgcattgattacactaacctcaacaatgcatgccccaaagatagctttccactaccgcggataaaccaaataatggactctatcgtcggacatgggatgctatcttttctgaatgtcttctctgaataccaccagattcccatggcttcgatagacgaagaaaagattgcctttataatgccgcatggactttattgctacaaagtcatgccattcaggctcaagaacgctggagccacctaccaaaggctaatgactaaaattttcaagcctttaatcggtcacatggtagaagtatacattgatgacatagtggttaaaagcaaaaccaaagaaaagcatacccaacgcttgtaagaagttttccacttactaagaaaatacgacatgaagctcaatccataaatgcacattcggtgtaagcgcaggcaaattcctagggttcatggtcacccaaaggggaatagaagttagcctagatcaagttaaggcggtcctggagacatttgcccctaaaataaaaaaagagcagcaacgcctcaccgataaactcattgccctgggacgtttcatagcccgattcacagacaagctgaagcccttcttcctcgtgttgagggaagccggtgcaacaggatagacggagaacttccagtccgcgttcgaagaaatcaagcattacctcacaaaatcgcttattctaagcagcccttagcctggcaagcgattgtacatgtacttagcagtgtctgattgggcggtcagcgttgtcttatttcgctgcctatagcataaagagtagaaacatgtttactacattaatagagcaatgaccgatgtggaaaccagatactcaaaaatggagcaaacgaccttagccttgtgaagcgtcgctcagaaactcagcccatatttccaagctcatccgataattgtgcttaccaaccagccccttcgaagtatcttacataaaccagatctataagaaataacgttgaaatgggccatagagttgagcgagtacggaatcgaataccaacctaggttgtccataaaagaacaggtcatggctaacttcaaagttgaggtaccctaacaacccgtccaaggcatggaatcgaacaaaaaggaatggtggaccttgcaaattgatggggcctcccgatcctcaggatccaggtaggtctccttctacgatctccgactggtgaacaattggagtagcccattcgactcggattccctgcatctaacaatgaagccgaatacgaagctattatatccatattaaacctcgcgctcgcattttccgcctttaaactcaggatctacaatgattctcaactcattatgggatatataaaaaaagaatacgaagccaaagatgagcgcatgtctcaatacttgatgaaagtgtgggacatcctgaaacaactgcacaaatgggttatcgagaagatcctccgggcggataacgtacaggctgatgccttggtaggaatagctacttcactccctgtaagagaagccatattgctgcccatacatctccagaccactccctcaattgtagagtcgcccatctgcaacactaacgaagaaagcaaagagtggacaagcacaataaaggagtatctccgaacaggatccttgtttgaggaattcaaacatgcacataagatccgagtgcaggctgctcgtttcaccttgattgagggttacttttacaagcgatcttttggaagcccatacctcagatgcttagaccgttcggaagctcaatatgtgctagcagaatggaatgaaggtgtatgtgacaaccactcgggaagccaatctttagcacatcgtgcccacttgtaaggatactattggcccactatgaagcgagacacagaagcttatgtcaagaaatgtgacaagtgccaaagatacgcgcccatcccacatatgccatccgaaacgcttaacccgataacgagcccctagccattcgcgtagtgggggatggacatagtaggacccttgcttgctacgaccgctcaaaataaattcctactcgtagccactaactatttcagcaaatgggtagaggcagaagcttatgctagcatcaaagacaaagatatcatgatgtttgtttggaataacattgtctgccgattcggtattccccaaacaattatagctgacaatagaccgcagtttaacagtgtcgcctttaggattttttattcagagctaaaaatcaagaacttatactttacgccacggtacccccaaagcaacgggcaagcaaaagcaacgaacaaaacccctgttatccgcattaaagaaaatgctagagcaagccaaaggaaaatgggtggaggagttgctcggcgtcttgtgggcctaccgaataacgcctggacgaccgacaggaaacactcctttcactctcgtatatgggatggacgcaataatccctacaaaaataggcatgcccacagcccggacggctgtgcaaggtcaaagggacgaaagctaagaacttggaaaacacctagattgggcggacgaagtaagggaaagtgcattcatccgaatggttgcctatcaacaaagagcggctgcccactacaaccgtaaggcccaaccccgcaccttcaaggtcggaacactcgtcctcagaaaggtctttgaaaatacaactaaaaagggagtcggaaagctccaagcaaactcggagggcccttacattgtctcaaagtcaactgaaagtaaggcttataacttgcataagctggatagaactcctttacttcgtccgtgaaatgtatctaacctaaaacaatactatcagtaaaggaaaaaatgaatgaagatcaaaagaaaagcagaggaatattgtattcatgattataaatataaaaattgtctttacaaatcatcagctaaaccatgcacggtagaaagaaagctatatggagggattacacaaagaaaatgtcgtctcatcacgaggaacccccaagtatctcatcgtcatcattagaaggaaatgagggaatgtcgtgcataatgtcgttcttcttcatgcagcagtagtaaccgaaaaagtacatttcatccacttgcttttggtattcttcctccagctccttattctaagcggcgaacctagcctccagctcatttttttgaacgataaaccttgtctgtagctcctccatatatttcttctgagtcatgaatccagcgcagagctcctctatctccctctttaattgggagatctcatgttcgactcctttgagcttggtctccataactccgctctccttcttcagcttgtccgcctcagtgcggatcgcttccctctctccctcagccagctttagagcctcaacttccttcgcaacagctttttaagcaacaacaagatcaatctctgctcgctccaaccttgcacgcagctccataccaccactcatgcgatgggagatgaaagctagcataggctcaattacctccaaccgcttaaaaaacagtgtgcgttgatgcaccatgttgcggatgccacccaccaactagaagaaataacagaaacagggttagtgctagctagggaggtgtgcattatccggaaatggagcaaaatagaagaagttaccatttctacagtctcctacactgtgcagtcctacagttgctgaatacgggagacggtagacttgagcgtgccaaaagaaagtcgggctgagacaaaaacgagaaggtcgccgcctaaattcatcgatatctacttggtaagaggaaagaaatctgacatcttggtggaaggcggctcagcatcgataaagcatgacacgcgcttcagcatatccatcatttcatcccaacttggaggaagagcggacgcaggagtgtctttttggtccaaaacctcctcaacaggaatagcaccactagaggccccacctagagtcgagccaacctctttctcagcagcaggtgcgttgctaggccccacggtatctggtgggggcactggcattagagggacgtctctcccaggctcctcttgagccccctccgggcaagcctttttggctggaggaggaaccatatcgatagcgtcatggagacgtttgcgatgtctcttcttaaaatcggccctcagatcagctgacatgtctttttctgcttccggttcgtctataaatctgagggctataggctctagctcgggcttgaaatggtaagtccctggatcgtttggatcgagcctcaaggaatcgaagtcacccttgaaagtttggatggagctatccgccgaattggacgttgaaggagtagaggtagtcggagatttagaaaccaaagtcgaagccttggtcacttttatgctgggcctattcttcttcttcttagctggaggacaagccacagacgatgaggcccgacccttcttgcttggtgctctccttaatttccccccctgtcttttctcctcccgctgctcaagacgctcatgacgagccttggcgtctgccttgcatgcctcttcgtaaaggggaaggtccttcaagacgaagtgctcttcaagcaccacaaccttagacaaccgcctaggaatgatggggaggacgtatggttggggctctcggataaccgcaagcaagttccgggcagagatgagcgtctggtggtttctttcactggcaatgatctcgaacaacttgttcagacaaatgaacgaagcctcctccacccactcgaccagacaacccctcttatccttacctacaccagctgaaacataaaatattagcgaccaagtggcattaactcaatagaaaatagtaaggggagagacactcaaaaccatccctacttggaatctttaatgaacaattagggtggaaatccctttctagatgctctatcaagccggcccatggtccccggaccagcacatgtcccttggcccctcctttgttcgagtcaggaaggcccgtcaccaacttgagggacgggatatgggcgaacatgctgaaaatgtcctttttgccctttttgatggtgtagacgaagaagacctctagtagggagaggtccaaatggaagagcatgttcaagatgttccaccccattaacacctggacgatattagaatggatatgggctagagggatctgggtatagtgcaagaactgcttgaaaatggacagaagaggaaaaccgagcctaacattgaactgctccttgctaaagaaaatggtgttgtgtgcagccttctctgtggacgttggatcttcctccactaactgaacacaaatgccatttgggatgaagaagtgttcgcggaattcctgctcattgagaagctcaataggcttccccggattagggcgtccggaactcatgactgtctaatcgcccttcccatcttacccagccgcactggatgaggcagtgttcttttttacaggcatattggagcggtgggctgagtcaaacctacatggcacagtgccaacagttagaaagcagctacccggtcctactgccaagagggcagtgccccaaggtgcgcaactagctagcatgcttgatctagtggccacacaaatggggaaacccgattccactcatcgattcctaaccctagctacggattgactcgctgcaaccttcagacacataaagggaggcaaacacccagtagactcaacagagcctcaaaatgcaaaaataaccaaacttaaccctaaaaaatgttataagggcatgccaccagtggagtatgacgccccggagcagtcacgtaccctattctacaaagtctgacaaagtcatttcctgacccaccgaaactcccaagcatcaccacaatccccaatcacaaacaagcactccaataaaggaaaaatggtaaatagacgacatagaggagaaaaaggaacatacctggcaagtgcttacgacgatgaaaagaactgaaccatggtcgcttgagtaaaccagtcgagaaatcgccaaggaaagtgtcaccgtgcaaagcctaagatcactgcctaggtattgtcagaacaaagcaaaggggggggggggggggggagaaatccctaggaaccccaaacgacaaggtgcccaatcgcacttcactcgaggtgacacgctgcctggtagcaatttcaagaacaacgtctcttcaaaatgcccttcccaagtgccacgtgtcgcgcaatcgctgaaagaatttgaaaaatcgttttaacccaccttttctgaccggacaaaacaatcaggttaaaagtgggcattgtaaagacctcccttgggcggacacgtggcagattgccttgaccttgcaaaacacccttctattggacacgtggtaccccttcgcctctgtctggacatgtgccattagatgggaaccccaattcggccccaatagtcaatagtcaactacctcgtgctcctctaagaatgcatgacacgttccaaataggatccctgaccggcttccgcgggcaatcattcttctccccaccaaaagcacactcgatgggacatccccatgtccttttaggcgacctgctacgctctgcactgcgctgcctacagaatgaggtgacaagcaagatgccaggacgccccaccagcgatccctatcagccgcctaaaggataatgattgctctgccaccctctgtgcagccatcatgattgtgaaagtcaaaggaccttcctaacatagatgtgacaaggctccaaacactataaaagccttcccatagctcaaaaaaatggggggtaagacagtccacttcttgagttcccaagaaggggtattctctccaattgtcaatctaactagagtttcggagggtgtgtccggacaacctgtccgaacatcttttacaggagaggagaaagaagcctcactctcagttgattgggcgacgacatcaggaagacacattacttccagttatccgtcatcaacaaatcacatgcaactttcttgtgtcttcagctcccactgtgtgtgcattatcctcccaaccaccatgttcccttcgtagttagatgaacaagacttcataattgaggtttttatgcactgagtgttatctctaagaatgagaaatgttatggatgtgagataatttgagatgttgatattgtttcttttctgttatttgatgagctggagtagttagtgtggttgtgagactccaagctatatacaggtcaccatttttgtatcccggactgcacagaaatctgaatatcaatgagatagatattttcctctgtttttctttctcaacactctgttttgatccagaatttgtaatatggtatcagagcactttatgcttctgcttatctatgcatttatctccatttttgtttgatggcttgaggcaaccaatccaatacacgagctgtgattggatcctctgaatcgtcaccgatggaagacactgggagtccattctatcttcacaatggggatcatcctggtcttgtactcgtttcacaccatttgactgggagtaattacaatacctggagtagagccatgattatggcattgactgcgaaaaacaaaatgggatttgtggacggaactataccatgagcagcgcccaacgatctcctcttcaatgcttggaatcgctgcaacagcatggtgatttcgtggctcttaaactcagtttctcgggagattgctgatagcttaatgtatattgcaacaagctcagagatctggatggatctacgggatcaatttcgtcaacgtaatgctcattggatttttcagcttcgtaagcaactcattgcactgcagcaaggaggtcttgacattaatacgtactacacttgattcaaggttctttgggaagaactcaaaaactttcaaccattaccagcttgtcattgtggaggaatgcaagcttgggtggagtatcagcagcaggaacatgtgattcaatttctaatggggttgaacgactcttattctcagactcggagccaaatcctgatgatggagcccattccgccgttagcgaaggttttcgcacttgttcttcaagaggagagacaacgatctatcaatcaaggtttctcttctttattgcaacccttagctttgggagattcaagtcaagcttctgcaaatactcatattggcagctctgcttctaaacccaagtttgaacggcctcaatgtacccattgtgggcttcaagggcacgctatggatcgctgttacaagcttcatgggtacccacttgggtataagcccaagtcaaagagtcaattgggccaggtccaagccaatcaaacctcctcacttgtttctaatgagccagctgctgcagatttgacagtgggtgcactctcttctagtcaatgccagcaactcattgccttgcttagttcctagttgcagcgtagctcactttcaactgtggaatcactacaacagggtggcccttccgtctccagcttcagtggtaaagtcattctgttcttctcttgttcttcaattcttgggtcatggatactgggacaacccaccatgtttgtcgcactctaagtttattcaaatccacttctccatctttcaattccagtgtcactcttcttaatggggaatctgtagtcattactcgtatagggtccatagaactgtttgatcattttgtgcttgagaacgtcttatatgttcctcaatttcgattcaacttgctttcagttagtgccctcactcaatcccatagatgctttattcaatttgattctgaatcttgttttagtcaggaccatttgcaggggaagatgatttggatgggtaaacgcaagggcaacctttacattttggatccaaccaacctttttcctatctcaggtgtttgtaatcatgtctctaagaaagaacatgaagtttggcattcccgtttaagacatctctcttatgttagacttaatgttttgaaaaatatattacattttaaacaactccttaatgaaacacctcattgttcaatttttcatttagcaaagcagaaacgtttaccatttcctaattctaattctgtgtcaatttttgcttttgaattgttgcatttggatatttggggtgctttccatttaccaacctgtgatgggttccattatttccttaccattgtggatgatttttttcgttttacctaggtgtatttgttgaaagctaaatctgatgttgctagcatttttcctgcattttataatcttgtccacacataatatggtgttaaaatcaaatcagtttgtagtgataatgcacctgaattagctttcacagatttctttcatgacaaagggataatgtctttccattcttgtgttgacactcctcaacaaaactccattgtggaacgaaagcaccaataccttttgaatgtaggtcatgctctattgtttcaatctcatatcccattagcatattggggtgattgcattttaactacctcatatctcataaataggataccttcccctgtcttgtctaataaaaccccttttgaagctttatatcataaggttcctttctataatcatcttcatacttttggttgcctattgcctatgctatggatctacactcactcgtcatcgtgataagttctctcatcgggcaattcggtccgtgttccttggttatcctccaggttgtaaaggctacaaactgttaaatcttgatactaatgcaatttacattagcagggatgtagtctttcatgaagctttgtttccttttcagacaaataaccaggaaccttctctttctgagttattttctgacaatgttcttccttctgcacataggagcactttttcttcacctcttactttggtcaatgatccaactcctacttttcccaagcaaaatcttgtcactactccttcttgcccttctcaagttgcaaagccaccctcttatcttcaggattatcactgctatgccactgtttcacaacccactcctgttttgtatcctctttccagtgtgcttagttatgataaactttcctcttctcatcgtgccttggttcatgctatcttttcacatgttgaacccacttcttttacccaagctgttgaaattccaaagtggtagcaagctatgcaagcagaactacaagttcttgaggcgaatggtacatggtccttaaccacccttccttctagtaaactagctgtgggatgtaaatgggtttacaaattaaaatttcgagctaatggtacacttgagcgtcataaagcacatttagttgcaaaaggatatactaaaaaaggtctggatcatgtagatacattttccccagtggctaaattggtaacaattaaacttttgttagctttagcagctattcatgggtggcatctcatccaattggatgttaacaatgcttttcttcacggtgatttaattgaggaggtctacatgtgcttgcctcaaggatatcaccgtgagggggagactcctccttctcctaacactgtttgcaggttgcacaagtcaatttatggcctcaaacaagcttccagacaatggtttgccaagctttcaagtgtgctattgaggagaggtttcactcaagtcatcctcagatcattcattgtttataaaaaataatgttgactctttcgatgcagttcttgtgtatgttgatcatatcattgttgccagcaatgattctaacagtattgcagatcttaaatgctttattgatagtcaattcaaacttaaggaccccggacaactcaaatactttcttggtcttgaagtggccaggtcaaagaatggaatctctattagccaaagacactatgcccttcagctactctcagaagcaggatttctgggctgtaaacctgcaaatacccctatggaagctaacattaagcttactcaagatgatggagagccactcaaagatcccgaattgtacagacgcttaatttggaagcttttatatttgacaattacacggccagacttgtcatatgtagtgaatcggcttagtcagtatcttgcaaatccaaggacagctcacctacaagtagtacattgtgttttacagtatatcaaaggaactatggggtagggtctctatttctcttcatcttcaacagtttagctaaaagcttttgtggattcagattgggctgcttgcaaagaaacgaggagatcaattagtggtttttgtgtatttcttggagagttgctgattttgtggaaatcaaagaagcaaagcactgtatctcattcatctgcagaagcagagtatcgtgcaatggctaacgttacttgtgaactggtttggttgatctctcttcttcgagattttcaaaattgaacacaagcagccagcaatgttattctgtgataatgaaacagcacttcatattacagccaatctcatgttccatgagcggacaaaacatattgggatcgactgtcaacttatgagagagaagattcaagcaggctgtcttaaaacaatgcatgtttcatcccaacaccaggttgcagacctcctcaccaaagctttgttcccagctcagttcaagtttttgctcagcaagatgggaattcacaattttcattctccatcttgaggaggagtaatagaatcttatggcatttatgtaattagctattcccaattcagttgatattgtttcttttctgttatttgatgagctggagtagttagtgtggttgtgagactccaagctatatacaggtcaccatttttgtatcccggactgtacataaatctgaatatcaatgggatagatattttcctctgtttttctttctcaacactctgttttgatccagaatttgtaatatataacaacttcagaaactgccttaatggctactctacttccatttttccttcaaggacacggacttcaatcacatcgtgttcagcgtttcttataagaccaagagtcctggatcagccccaagtactgtaatctgagaat

SEQ ID NO: 13552 - DNA, 5029 bp, Vitis vinifera
  Intron number 10 from transcript GSVIVT01025362001 (locus GSVIVG01025362001) derived from phytozome v7.0 (chr-ID chr 6; pos 1475118 to 1480146)
cctgtcatatatttatcatcatgtatgcgttgaatcgatctttcttatatctgtatagacctatatatggctatcttatgctattgtaggaccacaggctcaacttagtatgcttaaaatatttgtggcactatgctcgtcagggtgcttggttggttatggcaaatcacgaatgcctaggatgtgtggtagaggtgcatggtcttgggtttgattcttacagtcggttgagtttcctggattacacggtgttggttgtggtggctgcagttagcaactcgaggtttgggtcccaatggagagtccaaagggcttggccatgaagggttccttagttgtcaaaaaaaaaaagaaaaaatattgtagcagtgtcttccgcatccttatagttgacatcatgtagcttgtctgctatattatctggaattgaagtgttaactagcattgatatttattgcattctttacttgttaaaggaagtgcagtttgatgttaccttggattccagtcagtaagatatacatgaccttgtactagaatctggaacaggtttgattgagattggttagtttgtgccgtgtcataacaagatatgtcttcacttgtcagtcttcaattatgaattatagcctagtaaaagactataaatggttatcaatggattccagtcagtaagatatgcattgccttgtactagaatctggaacaggttttattcagattcggaagttcatgccttgttataacaagatatatctcatcttttcagtactcaattatgaattgcagcctcaaaaaaaaaaaaagcaaaagactataattgttatcaatcttatcagaacaaaaaaaaatgttcgttctgtatccttgattgggtaacctgtattaaatgaaaggaaattcattagatgcctgttgtctatgatttgtacccttaaagtgaagtaaaagattattccctacttattattagtatcagatgcgtgccaggatgtttcctgattatgttttttttttccttttttttttttgagatttttgtcttgattaatgtggttttgtttgtctggaaatttagaattgtaatttgtggtactgggatgtaatatatcatttggtgtgaattgacatataactgaaatttattgccttggagctgtgaacgtattaaatttgatgcttctgttgcctgtttgcatacacattcaacttataatttatttaaacacatcatgtcgatgatcagctcaattagtccattctattttttgctattatttgatttatttctcacctttgtattagagctttagattagattctctgagcagccgtctgccagacattggctcatttgagttcctaatatggatttactttttctttttagtgcctgcatattgtcatcatattagagctcagatccttcatcataaacctaacttcatatatggtggtggaatgggccttcacatccatcaaaataaaagatttcctgattaagatgtgataatctgaaatctggtttgatgccaaaatgttaagacttaaaagggtcttaggcagtgttattaaaaggaataatttctcatgggcgtaagagcttgttagcttgcatcaacgtgcttgatcatttgtgatttgttattttggctttggaatgatgtctgttttgctcaaacttgtcatacgtgcttatcctgtttatttcagatggttatgtttagtgaggttagtactttctgcatttagcctgtttaggctcctttctaattattggcttgtttttaggtccatgtgaagtccatggaatgtactttcatttggatttgtcatacactctttcttgaggacccagtttttctgtttttctgttgttctgaagtgacatgtctttttcatgtacatggaatggatccatagaaagtcttgtttggttacagattgatagcacattaatttgagggggagttttggaattccaggaaattctgaaagttgcattataatgtgttctactggcatacaatattatttagtacattgacatttagctttaaatgcttagagtataatttgatattttttgataggtgattagagtataatttgatattagaatcttggtttgttattttataggattagaaggatgggggcacaaactcagagaagagttggaaccttttaagataattttggtagtgtttgggcatatttctagacgtaaagccaatctagagaagagtaccttctttggcatcaacgttaatctagatcaactcgataggatgacattggtccttgagtgtaagtgttagattggcccattccatattcgggacttccattagggtgggggggggaccaaagacaagtgtatcaaaggatctggtgattgagagagtttcgtgaagattagatggatggaaaaaagcctatttgtctttaggtgagaggataactcttatccattcatgcttatctcatattcctaactaatttctttccatgttcaagattccttctttaatggcattgaaaattgagaaattgcaaagcaattttctgtggtcagagtttggggagcattagagagaccatctcattagttgggacttactgtgtaaggctaaaagggatatgagattagggtttgggaagatttttgtaagaaatcgtgctctattaggaaaatggctttagagaaaggtatgctctttggcattaggttatcctaagcatttatgggacatattaatgggtgggatgccaacactatagtcaggtggtcacatcattgttgttggaaagccattgcacaggtctttccaggcttttctagatacacacttgactagtggtgggagatgggataagaatttggttatgagaagacttgtggtggggggatcaaccttcgtgttctcaattcctaggtctattcagaattgtcacagttataaacctcactatctcattagttcttgggttcactaatcctttctcttagaatccaaacttccaatgcaatcttttggatcttgagttagaagatcttgaaagactcgtgtactctctttcacacttgcatttatctccatttgctcatgactctagagcctcgtctttatttatttattttttttttcaggtttattcacaataaagtcgttctttttagtcttgtccaatcatattgattcaactccatcatttgctatttattttgtttggaaattgtaagccccatttaaggtcaaatcctttgtttggttagtggtactcaagaaggtaaacactaatgacatgctacaatcgagaagatcctataaagccctcagtcttgatgtttgtttgttatgtatggagggtggtgaaacgatagatcatatcttcttaaattgcctattgagtttggggctttggcatggactcttcgacttggttcatatagattgggttcctcctaagagtatatgtgacatgatgattatttcatataaaagattaggaaataccaggaaaggcaaggtgttgtggtagtttgcttgtcttgctctgatgtgggttatgtggcaggatagaaatgttatgattttttaggacaaggcgagaacttcagagtgtctttgggacataattcatttcttagcctccttttgggcatcttgcattacaacttttaagggtgtttcccataatttgatccaacttgatagttggaggttggtgtgtggacccaagggtgggggctagcaaggatagattatttttgtatattcccacatgggacatagtttgtggattctcatgtatagattcttggacttggttttttgctttctttttctgttcctttaggaggatctctcatcctcctttgtacttatttgtatttatttttacttttcttaatatgctatattgttgtttctcatcaaatagaaaaaggatgggcataggttttgatgcatgctattaatgaaaatatggattccactactgtcaaatttaaaataaaatataaatcttgaacttcaataaaaaagtttgagccaacctagggtgacatggctctttatagatggaaggcatattaaggcttggagagctgccccttcctttcattttctagacggtttggacggaaagaaattggagattctttgaatgtgaggaattttgagatcaaaggttaacaattattttccttaacaatttttctgtgggttagggtgtatataggaggaggatatctgcaattggttgatttcatagattggttgggtcttggatgagggagggagtattttttttttgtgtaccctttttcctgttttttgttttgtgctctttttatttgacccgtgtactcttgtgcgccttttgcttttactgatacactcttattaaagaaaaaaaaagaaatgtttgagccaaccttgtcaattggtttgaaccaagctaataaatctctctcatcactaaatttcatttgtttttagaaataaaagaaatcataaaaaatgtagtataaaaaactcataaatggggtaagaaaagcctgaacctaggtagagtaccctgaaaattctctgaatatatagagaaaagctgtgagagttttaaaagagaagtgagagcagagaagtattttcagatagttgagaagttaaacctttgagatgaggaagaaaagcagtttgaggtggttgagaagttttgagatgttgagattgaggacaatattttttacaagatcatcactcaaaatgacaaatggatgagaaactgacgagttgtagggctgtttgatttcattaaggtaactattggcataaatgtcattgagaaaagataattattattaattatggcatggaatcaagtttccttggaatagttcattgattatcagatattagctaatatatttttgaagaaatactttcttgaaatgtttttcttttgggctattgataaatgttaattgtatttggattgatatatacttttgttcttgtag

SEQ ID NO: 13553 - DNA, 2092 bp, Vitis vinifera
  Intron number 2 from transcript GSVIVT01006231001 (locus G SVIVG01006231001) derived from phytozome v7.0 (chr-ID chrU n; pos 23802126 to 23804217 reverse strand)
caagtgcaacctcacccctcctgctagctgctaaggtaagttggtaacttgagaaatattacttcctttctttcatggtgaatgtgtaaaattgtcttaattcctatgtagctctttgtcattatcgtaaatgcttgaataagggccattatggagtgattgttatagtttctttgttttcccacggaatatgaaattgtctcaattcttagctgcgtctcatgaacgtagcactttaggagtgaatctcatacaatggcttttaatttatagtccatatgttgataaaacttctattccaaacttttttttttaattgaaaattaattaatatttgaatatacattaaaaaaaatattcttaaaagtagtgttttaaatggactaatatacaataagaaagaatagttttttgcaaatgcttataaaatgttagggttgcaacttgatgggattggacagattgatgactaactcgaacccaacccaaatcaagaaacaatcaatcggaacttaacccaacccaacctcatttctctaaattggaattgaattcagattgtttaagttagacttgagttgattgggttgaatttgggttaatcgggttgattaaattgcataatttaaattccatctataatatttttttgaagatactttttctaggtatttatatgaaaaattaattaataaagaggataaaatttcaagatagtaaaaaaaataaacataaatttatatatttttaaaaattttgaaaaagtatatgatgtaatataattgttattttttcttcaaatataaaaaaaatgaatattattatatatgataatataaattgaaaatattataaaaatattaattgggtttaggataggttggggttgtttgaaccttggcatgagtccaacccacattgaatttgggttgaaaaaacttaattgaagtccaacttgagtattaaagataattgcttaaacccgtccaaacattaggttcagacaaccctatgaaatgttagtccaaaaatcattttaagtgatttttttatattttaaaaaattatctttaaaacatcattaaagttcaaatatttttctatagggaaagtgttcctaagtattagaaagcggttttagctttccaagaatcactctaatttcaatggtaaggactatcattcctatgttgatgagattctcattagtcaatattaatgaggcttaggcctcatcttaaatactaaaccttaaacattaaaaaaataaaaagattggaaattagaaatagaagatacagtcaggaaaaatcctaaagaaaaaatgggcaatgaagttggcccaatcattaatcccggggggggggggcggcgaaacaagaaaaaattgttgggccttataagatgtttcactgggcttgtggcccaatagattaaaagtcaaaacctttttaaacggggctttgattagagaggaatcccgtagttgagctgggcttagtccattacatatgtttatggattaaaggcttagttaatctatagttaccttaatggaattacaagaagaaatttagtagatgttttattatggagtagttttctttagaggaaattttttttaaaattttaataaaataaatatttaatatttgtgatatctcacatcggataagagagaaaatttttaatgttatataagtataagtttttcttaaccatatagacgtgttttaaaactatgaagaccctttgatttcaaaacgaataatatttacacaattggatgcgaatcgttacaatatattagttattatatgataaataattacatgatttataatgttataaatcactacatcccttatgcaattatataattgacttaaatgtttataaacatttaataaaaaaatttcctctttatgttttatttttattctttttggtaataaattttataatttataaaattttgtaatcagttttggaaatggaagtagcatcatgaagattgtcatttaattccaactaactatggttctttttatttccaggtgtgtgtatatcgagaagactctgttgttggtaa

SEQ ID NO: 13554 - DNA, 4503 bp, Vitis vinifera
  Intron number 3 from transcript GSVIVT01000235001 (locus G SVIVG01000235001) derived from phytozome v7.0 (chr-ID chr7 ; pos 20292060 to 20296562 reverse strand)
gtggcaatttgggaagaaatcgagctttctgaaaggtaaagttaagcaccaaacgagccccattttatttttgtttctgatctatattttttttcagttccaacttcccagattcataattttcgtgtctttttcttctttctattttcctggcaaccaaacagaggttcccggcattcagttttagcaaaatctttttatttattttttatttttaaaataacaaatcatggattgctttccttgaaatttcagtttcttatcctttttattatcttcattttctcaccaatcaaacagaggtttcgacaattctgtgtgtggaaaatctttgtttgagatcattcatcacctttgatgtgtgcttttatttcatgttttctatttaaacaagtcaatgtacaattttctcctagaagttcctgtttcttctcctttatcttcactttcttagcaccaaacagaggattcggcattttctctgtgtaaatctttcgtgggattacataacacttcgtttattgcttgaatttcgtgtggatttctttttgtaataataaatccatgtaattttttttttccctagaaatttcagtttcttattgtttatcttaactttctcagcaatcaaacagaggattcaggcattcattttgagtgtaaatgttttcgagacgcataatacatatgttttttgctttaatttcgttatgggtttctttcgagacaacaaatcgtggattagtcgctgttaatatgcacattttttcccagaaatttcagttttattctcttttcctacaaaaaattggttgaccaagcaaagtacattagtttgttcattttcacgtcgttttgtgtgcttgaatctaagcaggaaatagcactttcgacaatgacttttcaagtttgtatatgtgagatagccggataattttcatttgagagatgtccccatatccatgttgtttctctcgttggttcatgcaaaccctggattttaagttcatagattgaatggaaaaaaaagagaagagaagaagaagaaggataagatagaatgagatgaccgtgctgtggtgctcttgaactggccttgattagatattataatcagaatccaaaaaataggcaaaaaaaaattgcccacactatcgttccctttgagttatgtaaaggaagcatttctgtgatattgtcatattggttcccaggtattaaatcctaattcaccaactaacatcattaagcaaatagttcatataccccatggtcatttttctgaagtttttgtaagatgccataaaatgcctcctttagcttgctcatctttctttttaatcgacatattcgaaacttggagtctcgttcatatataattcctcctttaagatcacaaggtattaaagtttccttgacattaaactgataaaatgactagtctagttttgctggaagagaaaggagaacactgatagaattgatacaaatgtctgttaattcatatcttgggctttggtgacatccttggcctttaaccttgctttgtttcaacatctccatctgccttgtatttacaatgtagacttattacatgcagaaaacatgtctgttcatgggagcagatgaacccctttgtgtttcttttccttctctatttgcattggctgtttccaaggatgcttgggttaaggatgtttggaggtgcaatgagggtgggggaagttggagcccgttgttttctagaccgtttaatgattgggagttggaagaggtgtgcagtttttttgtggccttaaataggaagcaaattcagcaaggggtggatgatggggtgatttggagagagactaaatgtgggatgttttcggttaagtctctctacaaatcattagtatcaggacatccaatctcctttccatcgtcggctatttggaaagttacggtgcagcctaaagtgagtttttttgggtgggaagcaacatggggaaaggctctcacattggatcaacttcaaaggagaggttgggctctagcgaacagatgctatctttgtcaaaaacatgaagaatcaattgatcacattcttcttcattgtgaaaaggttagaactctttgggtgctgctctactcaatgttcggggtgcagtgggtgctgcctgccacggttaaggagacgctttcggggtggaatgggtcttttgtggggaagaagaggaagggtgtttggaaagcaagtcctttgtgccttttttggacggtttggaagacaaggaacaaagttgcttttgaggaaaaggagttgtcaatccaaagactcaaggcttcttttgtttattttctttggtcggagacgaagaggtctataaaagatggtccctcgaccttagttgattttgttgggtgggtggcttcccgttaagggtgtggatagggtggctcttcgttccttggcaggctgctagggagcgtggggtgtttttctttctttttcttttctccttcttgtacttttagccactgctttggtggtttttaatacaatctctttatttatctaaaaaaagattcccagttccattcttcttagaagctttgatctactaaagcacggtgcagtttcacttaggttctaatgatgcttctttgacatcccaagaaacagtcatagaggacaactgcattgcaaaggaatgacaagtaggtgatagtgtgatgtaggacaaccctaggatggttgcctacaatctaataggtgggctggggtttttattttttaaggtttaaggagaggaacaaggaataaagtttataatagaaaaatataaaataaaaaatatggagaaagaagatgtagagaagaagaaataggaacctcagagttagactcccaggagaaaataaatggagtctcattattgagaattgcaacacttgaggaaaaactaatatcatataatcattgatcaatactctggtttacattaattagccttatttataggcttctctaagaaatctaaagtctactaggattctaataatccattatgattctaattctaattcttctataacctaattagctactcctaatttgattccaataaatattaatcctaatttaattataactaatactaatccttgttgaagtttatttatgcctttcctttcctttcttgaatatactttaaagttctttctcccattagagtgattgatagcaggattagaaataggatattatgtgtgagcttgaataatgataccgatagcatagaagattagtatcattaaaaaaaatggagctggatgtatcttagaaataaggtgtatggagcaaggagaattagcagatcatctcttctttcattgttctgtgtcgttggagttgtggcacagattattttagctagccaagatggattgggttcctccgagaagcatttcagacatgatgttcatcaattataaaggttttggcaagtccaagagagggttagttttgtggcaaaatgcgtgcatagatttaatttgggttgtgtggcgggaaagaaatgctaggatatttgaggacaaagctaggaattcaaagaatctttgggactccattcatttccttgcttctctttgggctttttgttccgcggtttttaagggcattccccttaacgtattacaactagattggctagcagtgtgtagttccaatgggacggtatagtcaagggtgcttgtgcgtagttgacatagtgtagtgtgttatctttttgtgttgtttagtttcacctttggtaggaggattcctcatcctcctattgtacttctttttctatcaatatattcatgtgtggtttcctatataaaaaaaaatgtatcttagaaataagagaaaatgaaaaaacgctacttggttccaagacaccttcttggctcattaaataaagaaggaatggtactgatttgtctttgagttatatactggggaatccttggtacctctttctgccgttgcttcgaaaaaattatgacaaatcaggaacatgtagagggaattgaacaaacttctagtcattagttgtcttcccttaagagaggtcttccaacttgaaaaggatgttcatttataaagaaaaagtaacatccagaaactcaaatttttagtactaggatgacaacatatgtactattttcagtgggagaataatcagcaaacacatattcaatgccctaggatcatgctttcattgagagcgtccatggatatgaacaaagcacttcaaatacgatgggagagcttatggtccttgcctgcgtcattttcatatattatatctatacccttgtgttcagaatctctctctctctcgctctttttctctccctgtttttgctgataactatgcacaaattttcaactaattttatgagctagaaagaagcctttccttatgttaactatttattgttgctacaatttgcagctaccttgtttgctgt

SEQ ID NO: 13555 - DNA, 7729 bp, Vitis vinifera
  Intron number 4 from transcript GSVIVT01021587001 (locus G SVIVG01021587001) derived from phytozome v7.0 (chr-ID chr1 0; pos 7504462 to 7512190)
cagagaattctgaggttattacaaggtttaagcatgaaacagaaacaacatttactttagtgttcatttcatttatgatgttccgtttgctagtttaccactattttaagttattacattttctatgtagaaggcatgcatcttgttgaaaaatgaggaatagctttgagtctgatttgctgttgaattagatgaaaattaaatcagagaataagtcaaatattttatagattattggtgcacttcaaattttatccagttcctattttttgggcctagattttatcaggacagttgtttgatttcttgtttattccatatactctttaaatacctttgtataccaattcttcattactgaatgaggatgacaaattttctaaaacctatgttcatgttggagctagtttccttactggagttggcttaaattgaaataataataaaaaaaaaattcttttttcttctggacttttattgttggaatcagagaaggaagtttttctttgtttggtttattgagagtttagctaagcaacataggagtggatcaaatgtctggagtgatcaaagaagaagtttttggagagtcaaggttagcgcctcttcaacagctgctgctttagaacaccacccatggaactgacaataatcagtcaattcaaatcaccacccataagctgaatggacagaatttcctttgttggtctcaatcagtgaaactgttcatcaaaggttgtggaaaattttgttggtttgactagtgcaatcaaggcaccaaaggacaatgatccattgcttcctacatgggattcagagaattccatgatcatgtcatgactggttaaggaactaggaattggttggatatatctaattcttttaacaataaaggatttatgggatgcgatgagttaaacatactctgactaatcaaggaattcatgagattaagcaaggaacacatgatgtaactatatgctatgacattttgaatagactctagcaagaattagatttattttacgattttgagtgtgtttgtgctattgatagtgcttgattcctttggcataaggttattgcgagtatttatgggacacatcctaatggatggaacgccaacatggtggttagatggtcacacagatgtccttggaaggctattgctcaagttttccaggatttttccccttttgtccgcctagtggtggggaattgggagagaattcgtttttgggaagatcattggtggggtaaccgatctttgtgctctcaatttgctggtctttatagagttatttctgtgaaaaacctcactgtctttaatgtccttgacaattcctttccagtgtcttggaattttaatttttgccacaatctcactgatttagaaatcgatctccttcagagtttaatgtcttcccttagttcagtgtttttctctcctgctatggcagattcaagaaagtggtctttgtcatcatcaggcctgttttcagtgaaatcttttttcttggccttgtcaaaagtctcaaatcctattttgatcttgttccttctggccaagttcttatggagttcaaaagccccctcaaaggttaaggcccttgcttggttagtagcacatgggaaggtaaacaccaatgacaagttgcaattgagaagaccctacaaatccctctgtcctcaatggtgcattctttgcaaaggaaatggagaatcggtagaccacatttttcttcattgccctattaccattggactttggcacaagttgttcaatctagcaggattggcttgggtccctccaaggagtattaaggacatgttggttattgcttttaaaggcttggggaactctttaagaggcaagacactttggcaaatcgcttgccttactttgttatggatggtatggcaagagagaaacaataggatttttgaggataaggggagaacggaagagatgctatgggacttgattatgttcttttcctctctttgtgcctcgtgtactgtagcttttagaggagttcctctaagtgttttacaactcaactggactgcggtttgcgcttcaaaagtttgagagtgttggttttttttctgtgtttttagttttctttagttgggtgttttctcttttgttcagtttttgttttgtgggaaggacctctcatccttcttttggtttcttctctttctcttgtttctcttctttaatcctgtatcttttcctctattaaaaaaaaaaaaagatagtgcttgattcaagaaaatgttggaaaaggaatgggcatttgaatttcttgctaggcttaacaaggaactggatgaagtgggtggtcgagccactaaccttgattcgagagctgtgctatgaagttaagagaaaggcaagtaggagaaatgctatgatgagaagtcgattcaagaggtgttctatgaagttaggagaaaggcaagcaggagaaaggttatgatgagaagttctattttttctaccacaaataaaaactcagctttatttactattgcaattgagactgtaactggtgctagtggtccaaaaattcagcagagaagtgaaggaaaaagggaaggtgtggtgcaactattgcaacgagctgcagcacaccaaggatacctgttggaaacttaatgggaaacctccaaatttgaaaaacaacaaatttcctgaaagaaatggctgaggaatgtaagctgtagttgaaaaccaagctggaactggcttaaagattaatttggacaaaagtatggtaattccggtaggggaggtggaaggggtgctggaaatggcggctgaaattgggtgtagggtggggcagctgcctactgtttatttggggctgccccttggggcgccaaatagggcctcttccgtttgggatggggtggaggagaaggcttgccctttggaaacgtcaatatttatccaaaggagggagaattactcttataaagagtacgctgtctagcatcccctcatatcaaatgtcggtttttcgtatgcctaagtcagtggtaagaaggattgaaaagcttcaaagagactttttgtggggtggagctaatggggggaacaaggctcatttagtcagatgggaggtggtgtgcgcggataaagaaaagggagggttgggtctaaggaaacttactctcttgaacaaagctctccttggcaaatggatttggagatttgcgtgtgctaaggaggagctttggaaaaaagtgcttgaggctaagtatgggaaagaggagcttgggtggaggacaaggaaggcaaatggggcgtttggagttagagtttggaaggagattctgaaggagtccacttggtgttgggaaaatatggggttcaaggtgggaaaaggcaacagaataaggttttggactgacctttggtgcggtaacaatgtgctgtcccaaggcttctcgaaccttttctccatggctgcccataggaatgtcacagtggaggaatgttgggatcagaatgtgggtcaaggagggtggaatttgaggctgttaagggacttgaatgattgggagttgggcttggtggacaatctcttagttgaactaagggattatagtgtaaatttggaagatgattcgattttttggaagaaaggtgaggacgggctgtttaaagtcaaaaaagtgtatagtgtgttggtaaattctcaaggagtggattttcctcatagcaatgtttgggtggacaaagtcccaaccaaaattgccttttttgcttgggaagctacttgggggaaggtcctcactttggataggctgcagagaagagggtggcaattacctaaccggtgttttttgtgtgggtgcgaagaggaaacgatcaatcatatattaatacattgtacagtggcaaaagggttgtggaacatcattcttgcgttgtgtggtatacagtgggtctttccaaattctgtaaaggaggttcttagtagttggaaaggctcttttgtggggagaaaaaggaaaaaagtgtggaaatccatcccgttattcattttctggactatatggaaggagaggaacaagctagcttttaaggggggtgtgctggcttatcagaaattaaaaacttcgcttgtatacattatttggggttgggctaaagtgtacattgatatggagtcgaaatccctaataggtttcttggagtggttagcctccaaatagggcttgggtcgtgttgttttttgtttgagggggtggtagtctcgtatacttcttgtatgccttgaggcttctttgccttttttatatatatatcgcttgcttatcaaaaaaaaaccaaactggaactattgataaccatttagtaaggaacaactaaagcacttgtacaggttgataaattggtcccaactctctcaaaatccatcaccctcctgctcattggcccagaaagttatctcactgaatgccttacacgcttttttgtcaaatcaagtcccctgaatcattgattctaggcgtccaaccgtatgactagtttagctggtttgttctcaacatattcaccttgttttggtggttttacaagtaaggttgttgatggttctttatccacaattgcagagaatgtttcaatttttttgtcaaagaatcttactttaaattctgttttacatgtgctgaaactttcatgtaatcttttatctgtcaatcaactcacaaaagacctaaactgcattgtcaaattctcacattgtggttgtgaatttcaaaatctatgtttggggaagacaattagcaatgctaggaagattgatggactatactatttggaagggaatgttattggtggtggacaagctcaaggagcgagtagaggtgatatttctttttctgttgacaatcaaataatgttgtggcattataggttagaccaccctagtttttcatattcaaaactgttatttccatctttgtttagaaacaaaaattcttcaatgtttcaatgtgagatctgccaattgtccaaatatcatcaagttttctttcatggtcaacattacaaacaatctaaaccattctctcttgtgcacagtgatatatgaggtccctcacttgtcaaaaatattatgggtacaaaatggttcatcacatttatagtgaccacactcgagtttgcttggtttatttgtcaaaagaaaaattagaagctaagagtgttttaaaaaatttccatattttaagagtattttaaaaaatttccataatatggttaaatcacaattccaaaatcaaatcaagttcttcgaattgacaatggaaaagatcacttttcttcaattcttggaaatttcctgttagggcaaggaatcatccatcattcttcttgtttcgatatccttcaacaaaattggattgcagagagaaagaataggcacctttttaaggttgctagagcactcatattcatgaatggggttccaaaaaattatcaaggagaaagtcagtatttgaggagatggttaccttgaagaagaatggaacttgggaactagttgatttgcttagaggaaagtttctcctgggttgcaaatgggtcctcaccttgaaatataaggcggatggctcaatcaaaagataaaaggccaaacttgtagctaaggggttcacacaaatatatggtattggctaccaagaaacttttgccaattcagctaagataaatacaatctgtgttattttatctcttgcagctaactttaaatgacccttacaccaactagatgggaagagtacgttcttgaattgcgaatcagatgaagaagtcctcatggacttatcacagggcttcgagaaaatttatggaggtaaagaaagtgtgcaaacttaagaggtcactctatggattgaagcaatcttctagagcttggtttaatagatttaccaagtcaattcaaagttatggatacacttaaagtcaagtcgaccatactatgttttttaaacagatagttagctacaagattgctatcctaatagtgtatgtggttgatataatcctaactgacagcaatcttgaagagctagacaaacttaagaagatttcggcaggaaagttttaagatcaaggaccttggaccactcaagactttttcttagcatggagattgttaaatccaaagatgcaatttgtgtatctcaaagaaagtacgatattgatctacttaaggatattgatcttttaggatgcaaaccaattgacactcctataaatcaaaattgtaagttggggacaacaagtaatgcaacaacagtggacacgagttgatatcataggcttgcagggaagccgatttacttgcatatacacagccaaatatttcatttgttgtgagtatacttagttcttgcattcccctagtgaggagcctgtcagagtagtgtttagaatcttcaagcatcttaaagagactcctggtaaaggcctaaattttgggaaggagcatctttgagttgaggtctatactgatactggtaaagcccttcttagatttcttcaaaaatttccatattcttagatttcttccatcccaagctatcctcctcatctcttctaattaagcatgattgcagtcttggaaaaaaaggtcttcacactctttccaattcccaatcatggagttgtctatgaaagtgaggactctgctgcctccccccccaatctgttctcacatctctactatccaagactcttttgcgattgctatataaaataactcccaagggcttttccatggaacttttaccgcatcatctattcttccagaattttatacttttgccattacccatatagaaacaatttatgcttctaaaggcctccccatctgaatctaatagccttccaaacccaccccatagccatccctaaccgccctcgaacaccaacactttcatcatctccactctctagttatgacctatttccaaagggtctcccttagtgtagtaaatctccaattccatttgccacgcaaagccttgttgagggtatgaagatttttttatggcaaaacctacattcttcttattcaaacagatagtagaccgattaagacttcttctcaagtgctcccccgtctaaaggaaatccctctagatctatttcagctttgagctcaccttttgggaatggcaaaaagagacatgctttggtttatgttgtaggatgtacattttgttttgctttcatttggagacatacacttacttttcctttttgatctttttttttttaaaaaaaaaaaatcttggaagaatttatgatcctcccttgtacttaccaagttcaatgcaataaattatgaatctttgtgggatgttccttttaaaatgttggatagttaagaagcaacaagtttgtgattgaagctgtctaattgtggacaaagatgagaaatatgaggttgatataagatgcatctcaggatatggggttagctttaataggaatataagaaagtctattggaattatttgaatatctaatagtaatagatatttggaggtgttggtcaacatattgatattattgttaatactcattgtagttgaagttggcttgattgaaaaccttgacactctaatatgtctatactttatgagaatttatttgtcacattcttgcatcaacaattccatgctcttttcttgtagagca

SEQ ID NO: 13556 - DNA, 5726 bp, Vitis vinifera
  Intron number 1 from transcript GSVIVT01035328001 (locus G SVIVG01035328001) derived from phytozome v7.0 (chr-ID chr4 ; pos 521948 to 527673 reverse strand)
tctggtggcagcatctacatcaaggcttataagatgtaatctctttgccttttggttaattttagctctagatagttgatgatttagtattgctttgaaatgttattgtggtaaccaattaccttttgctgtgatgatcacctgggtttttttggaagtgcaagttaatagactatttatttcttgtgagtttttttttttaatttttatattgattattgaataaagtatgtgagatcattgtttttttccatactgtaatagttctgtccgttgtgcatgtgtacgtggaagaccatgtttctgatgaaacttttccagaaaagcattccatatctagactgaacaaagttaaaataaaaaaaaatcttggataaattggtagataacttgaagcccataatcactaaaaattttcaaaataaacctcttggatagattctgcctcttcctgcaatttccagatgcttcaatgtttgaaccccaaaagtttcctatatacttccgttgactcaacatttggatgttgtgatgttcattgatggcataaaaaatgctatatttatgggttctttcttcattttactaaatgtggatttccatgggaaaaatggacttacaaatgttgtcagtgatgatggtgctttcattaagaggaaatagtatcttatgtggtgtgtttgtcttattgcctcactgattagtttggaatattctcttgtccttatactgtaaacttggaattttacaggtttggtttgtcctaagaaaaggaagatgttagatgacttatcacctaaacagttgtgacattactatggtttaagatatcaaatcgagtcagatcgatgggagggctagaataagaaatattttaccagatgttattcggtccggatacaaaatgaacaattttaccagatgttattcttagaaattggatggtagccttttatcatttttgtcaagcttagggttgttatcaatgttcttgtaaggatttagttctatttatggccctaatccttgatgtagaaatgagttgtgggacttatcttacaaatcatttccttatcctaggttgcccttggtgcaatgaggttgtttttatgtaatatactttaccatgagaggaaattaggaagtataattagtgacagaatggggggatttaacaaactcagttttaggcatgctcaaattttcaagatgttccagcttgctgcagaattgatggattcatgttttagtagacattacttctaaacccaaagtttggaacaagttggtttgttttggagtctctaaagagaatctatgggtggactaattctaccagcacttcttaattcccaaagcgactggttctattggaccttagtgctgtgctgcttgtagtttttatgaaatcactaccagatagcaccttccttttgctgtttgctttggcttggaacatattattgaactatccatgtggctagtgagtgtgttaacaagcataagggtaattcactaattatagcatttcatagatttaggcagagtctgtattttttagttttattttattagaattgattctaattgttatttttagtcaaatttctatttgttctagttttataagtctatacaaacttatgtaagttttcaattttattaatagaattttttgtgaatttagttgctacaaagcttcttaaaggtgtgatttccttccttaagtgtaattgcttaggaaccttcatgtgtcaaatgttcatgtgattgtcaaggatcatcattcctctcccccaccaccccccctcccccccccccctcccacactttaccatctctatgggattgcttattgcctaggaaccatggtatcattgccaaggatctatttttcctttttcttttttcattttcttgtcctttttgatctttcatctcattatataacaaagaaaacttttatagcttatagttctacatcatgttccttgggtgtcacgagttcatagatgttggccacttaagcttgtttgatttcataggttggttgggaacttcttggtgttttgggctttgtgggtcttgttttttcatctattagtgtcctttgtatacctagattaagaacattgtgtagtcttcttcattagagcaaatcgttagcattgaccttcttatttgtcaccagccatgcaaagatgttcacttttgatcgagctttggattttcaaatgaagtttgcaggaataaaataaattaagttggtagaagcagatataacattaaagaagcaactaactgagaataaccttgaggatatcaacaaccaaactctagcattaggaaaagtgagtgacaaatacacatggactaaagcaaacataagaagagctagttcctcaatttcatgcttaaagaggttgccacaaaagtttaaattccaagatggagatgggtaagaggaaactagcatcgaaaaaactcctagttggagctgttcattatttttgcagttctatgtttcaaaaataattaatggtagaagcgtttaataatttcaaatagtagaaaaaattgaacatacatccatgtttatggaaagcaaattgcacatttttttttgtaagagaacaattttggaaagaagtttatttctggaaaatgtcaggaaaagatcttcctttgaagtcactgaaagtaatcaaaatttccttaacagcatcaaccaattgacataactattttccctatattgcatcctactaactaaatgatgcaagaatttggggcaaaaaagaacaagtttcttatatctatgcataaaaaaaataagttaagaacagaaataatcatatcaacgttaaaagcaaacttgttaaaagaagatgaaaaagactaaaattggttgtgcttttgatttcttcagttttggacttatattgcactcttgacatcatcaaaagacttttgtttgtaaaaacagttttttacaagtcatttccagaaaccaaacaagcacaaaaaaagatgagtttttaacaatgaccagctcacaacttttggagtgttaaagggacttccagaagcatgtataaaaaagggagtaactagtttcagtggtaaaaggcattctttttggagaggagtgatgggaaaataaatgtatggtgatttcttgatgtttacctttttcttttcctatattttgatctgctgccagagttaggaaatgaatggtaattgaaacatcaaataacttgtgatcggtcataaagacaaaaacttagaggaagtgtaaggattttgtgcaaggattcctctttttttttttttttttcacttttcatgtaccctgacaacgctaaaaggaatgaagatagaagattaatatacatgaagtatggaatgaatcaaagtccaaataaagaagatagagcattaatggttattgaatagggaactaggtaagttcaacttgtcatcagtttagacgtagtggtgcaatgatactcttgttagaagtctatttccatggttccatattgatgcccattgcaaattgctatcgggcatggaattactatgtttttagctagttgaaactttatgaaaaagaagaaaaagctctaaaaataggtttgaacagtatacatagatataggaacattgattttttttgcccctgctatgtgatttgttgcttctcattcagcttggtagctttacctgggttttaacaatagaaatcatctcattaaggctttatcctaacttggcttgatacacattagtgacccattataaaaaccttaagcttttggattagttggtggtttcacatggtattagaccctccttttttttggaggtcacaagttcaaacctaaatgtttgtttgtttcccatttatgtaacccacccacgagttcagacctagctgttgtttattttccatttattcaatccttggaagtgagtgcccccaacatagaatttttgctgttcaaacatcaccattgtttatttcccatttatttaacctatgtggaagtgagtatctatcttaacccgaattttagggatcagtgaagtgaattctgtttttatgctttctagcttatgttcgggttcagggcagtatttaaggaggtcttagtatatttgattatacgccactattgcactgttttttggatcttggaaagtactataaggaaaaagaaagaaaaaagaaggaagctcaaaatttcttgtttgattcattatgaaataaatggaagaaaattaaatgtacagattgttttaaaacttatatattttcaaattgtttatttttttctaatgtgaaagcgtaataactggaaaagattaaaagcctcttggggtgtagctcaatggtagtgcccgttgctagtgaatcaaagatcctgagttcaagcctcgctgatgattaagtattgtagcgtagtgtggtggacccatatcacctagaggctggcttcaccaatagttggaccattttgagaaaagtggagattaaagaaaatttttttgagtcctagcttctctaggccctttaatgattgggaggtggagagattacttttgacaatctggggtaggaggcttaatcctcttttggaagatagaatgctatggaaagagactaaggatgagattttcttagttaaatctctttatagtactctagcttcaagaagagttgttaagttccctaatagcattatttggagtccttgtgtgcctaccaaagtgtgtttctttgcttgggaagcatcttggggtaaggtgctaactttggatcaacttaaaaagaggggccggtttctagctaacagatgcttcctttgctgtgaggaagaagagtcaattgatcatattcttattcagtgctccagggcaagagtgttatgggagttattgtttgctctttttggtgttatttgggtccttcctttttcggttagatatacccttagtggttggtgtggctttaacttgggcaagaagcgtagaaaggtgtggaagacaacccctttgtttattttttgggcggtttggaaggaaagaaacaggattgcttttgataatgagaagctttcgattcataggttgaaaaattcttttgtatgtaacctttggttgtggactaagtcggttgtaaacgatggtcctcttcctttgctcagtttttttgattggctaggtgctagttgagggctggttttgtatttcctcttcttttttgtgccttatggcgcctcttgtatactccctgtatgcttttgggtcagcctcaaggtgcccttttctaatatgtactttttgtgtgtttgcctatcaaaaaaaataataataataataattttttttgaggtaaaaatttttccttcattttcttcctttttccaaatccttcttcctcttacacttagtgcaagctagatggagccttggagattaagagtggtacctataatagcttttgtttgtgtaagaggtacatccattgttatttaactttgtataatccaaatacttatggatgttggtttgaccttttgattgtgtcctcttcaagttatgtgctcttagatttctgcattaatcaaattgtgcaaatgcatatttaatgtatttttaatttaaatgttctctgaagcgcaggacaggaagtggcaggataagtgcttgtggaggta

SEQ ID NO: 13557 - DNA, 6506 bp, Vitis vinifera
  Intron number 4 from transcript GSVIVT01013488001 (locus G SVIVG01013488001) derived from phytozome v7.0 (chr-ID chr1 3_random; pos 1588794 to 1595299 reverse strand)
tgagtttgtaagaagggttcaagaagcagtaaaaagtaagtttcctgttcatgcccttttttgtatatcttacagttttctgtaccatccacagactcaagggggcatgagatctccaacgaagtcaaagggagatagctcctctctttcccagcctattggcttcagatttgccaaaccaggattctgagaaagcaaacaacaaaccagaagtccatgacctagtgatcatacctccatgaccctgttcacacctgtatcacccaagaaagagctgtctatgatctccctccactgtaatattagaaagaaagcaatcttccctacaattcattttccttctttttaatagtccccatttggagtaatcaactctgttctttctcccccaaatatgtgtgcatgcaattgcaacccctttttgaaacatattatttgctgtcaaaataactcatataaataccatcaagttctatctaaggaataaaataaattgaaacttgttactgtttatggacataggaccttaagaagtgaacctcttacattttagggtagtccccttttttccttgggttatcaaaacgggttaatttcatttcaaactttaattgaaaacccagggaataatattcttggtaggttaattttaccaagccttataatcattcatagggaaaataatagaaaaagtcctctatatatacaactctaaaacctacaaaaataaggaaagtacaaagaaataggaaactgccgaacaagtcctatccaaatagttgattgtggttttaattacaaaaataaactcctaactaattcctaaaaaggttgatcctatctccattagagattcggattcttcaacactccccctcaagttggtgcatggatctcaatcatgcccaacttgctgatcaagccttcaaagttcactcgaggaagtccctttatgagaaaatctgccaattgtctgctggattttatgtatggcattcaggttaatccttctttcaacttctctttgataaaatgttgatcaacttcaatgtgctttgttcgaccatgatgagttggattgtgggcaatgttagttgttgatttgttgtcataatataacaacatggtattctcactttgtagtttcaatttattcatcaacctttgcaaccacatgagctaacatatccttggtgctaaagatctaaactctgcctcgactctacttcttgcgacaacaaattgcttattctaaatgtgcaatagcccagtgttgatcttctatcactaacagaacctaccgaatttgcatttgcgaaggcttcaatcttccttgactcatttcttccaaagaataatcccttcccaggtatacccttgacatgtttgagaatttaatggatggcttctagatgttcttcatatggtttatgcatgaattggttcatgacactaattgcataagcgatgttaggtctagtgtgtaacagatagattagacatttgattagactttggtatattcccttgtaaacaggaactgctcctttcacatacccaatcttatgatttgcttcaattagagtatctattagtttacttccaaggaaataaatttctttgagcaagtcaagggtatacttcctctgggatacaaagatatccttccttttttttttttttttgataggaaatgacaaaggaatatattgataaaaaggaagtacaagagaaggatgaggaatcctcccaccagagaaaaacaagactacaagtaatcaaatataagaaaatacaaataaaaaacaagcgaacactctagttagaccaacccattgggattacacaccgctaactaatcaagatacccttcttgatacccttctttgatcttgcaacttccatttctaggaagttcttcatggggccgagatccttgatttcaaattcttttggtggaaagtgtagaatttgaagaattggaagattaaagaataaatttcttccttgatttttaatctatacagaaacccacatttatatacaaatattcctagcataaaaaataagaactttcctaccctaattacattagatccccttgattatgggattgccctaattctcttccttaattacaaaaatatatggctatggatttcctgcttccatctatctatactcccccttaagttggtgaatagatgttttctattcctatcttgaaaacatttgcttaaaatgttgtattgcttaaatctttggtgagtatatctgcaagttagctgttggtggatacataaagaatatagatcaatccattatctagtttctccttaataaaatgtctatctatctctatgtgtttcattcgatcatgttgcattggattatgtgcaatactgattgcagatttgttgttgcagtgaagtctcattaggccttcccatttaatcttcaaatcctacaaaacgatcttcaatcatagtagtttacacattccttgagccatcgtgctaaattaggcttttacactagacctctccaccaaactctatttttttacttctccatgtcatcggattcccaccaagaaaagtgcaatacttggtggttgatctcctatcaaccatagatctagcataatttgcatgtatatgcttcaagtactagtcccaagcttcgtttaaatagaataccatttcctaaagaccctttaaggtactatagcacttggttagcaatttagcaacttgtagatgaacctcttttggactctgcatgaactaatttatcacactcacaatatatgctatatgcaatcttgtgtgagaaagataaataagtcttcttgtcaaacattgatacatctttctatataccgcaacatcttccttagcttctccaaacttatgattaggatctattggtgtgcttgttggtttacacgccaacttccctatttccttgagaaagcctattacatatttctgctaagaaatcaagattccctatttagaatgtgtaacctcgattcttaggaagtatttcaacattcataactctttaatatcaaattccttggtcaagcattgcctcaaagtctgtctttctttttcatcatttcccgtcatgataatgttgtctacatgtaccaaaaaagctgtaactcctcctgaatccaaatgattgatgaacaacaaatgatctccctaactttgttggtatcccatgtttttcatttttttatttatttatcagaaaccaaagatgtattaatttaaagataataaaacataagaaggacgagaaatcctctccatacaatacaaacttgataaaaaaacttaagaaaaccttcgctttacaaggaaatttgtacaaaaagaataaaaaaactatacaaaaatacaactcgaaacaaaggagtatataccaagagccaactaaaccgaatgacactcaaaggaaaaggtttgaaaacattagtacaataggcctaaaaagaagcaaagaaatgaatcaagtcgcacatcatctcaagtgtcttacaagaatcctaaaaaattctagcatttctcttcacacaatctacatcaaaagtgagataggtgatcttccaaacaatgttgtctcaagcaaagttcccaaaacacataaaggaaacaaccatcatatgacaaatactcttggctatgagaatagcttgtgccataacccaaagtaattagagtaggaaaaatgatcaattgtttctccactcctgctatatagcatgcactaatcatgactaagggttttgaaaggccttctcaattgtagcatgtcattggtatttaccttcataagtgctactaaccaagtgaaggccatgactttagaggggactcttgatttccacaaaaacttagttggatagaaaggaactgaatccgataaattggttaaggctaagaagaaagattttactgagaatactcctgaagaagaaggtacccaagctctcgcatctgtaacaagtggagacatgtacattgaaaagagaagtcattaatctttcaagatcctcaaactctaaataagttaaattacgatgggaaaaaagattccaaggagggctatcactacccaaaatagttgaaacagagaggtttttagttgtgaccactatgaaaagtcttgggagttacgaacacaaaggttgatcctcccaccctagatcttcccaaaaacaaatttttgtcccatcacccaccacaaagcgagtgtgtgtagaaaaaacggagaaaataagcatagtggctttccaagaacaatgatgtgaccatctaattaaattattgacatctcatccattaggatgtgtcccctagtaaaacttgatttctcaaagtaagtttcccaaaccctaaaccatccaactctgtaggcctacagactagatcccaactgactcacacttagggacttaggaaaataacctttttgtgtaatagaataagagggtagataagtagaattcaatagttgcgtcaaattctccaattgttccttagtgagggaaactagattgcagtaaaagcctgaaaagaactcccctgcttgggacaattgttcttcatgtggggtggtcttccatgtgactaatagcaggtctcacaagtatgacctgctcggttgcaatggtcacaccagggccttccattgatccttttgatatttggatcattggcagaagtggaagacttactattttttgcaactaaggcagtgttgactgtagaggcctcggattttgttggggccaatgaaatttccttgccttttatcatgtttctgtggttttcttctcttcaaacttctgagaaaacttcatgggttgatggtagaagttcacaaccaagaattttgctccgaaccttatctaatttattatttagccccaccaggaatgcaaagactcaatcatctttttgaatgttgcactgtcttgtgcacaatgccattcatagtcatagaacatatcaagttcttaccaaagagttttgagtgttatgtagtaatgaattacactcatattaccttgattggtatttctgatctgtgtggctatctcatagacctaagccaagttaccaaggtcggagtaggtctccttagtagcctcctagatctctctagcagtgggcacaaacatgtatgtcttactaatcttgggttccatggagttgatcaaccatgacatagtcatggcattctctacttcccacgtctcaatgagaaccgctccttcttgtggtcttggtattgctccagtcaagtacccaatttttccatgcccatgaatgaagagtttgacaaattgagaccattgaagataagtttctgtgttgagtttgtgagaggtaattggctgagaagagtgaccatgaccactaatcatgaaattctgatgagaggtaggttttccttccacctcattgaagttgttgtcactgttagaagcacttgtcatggctgttttgaccattattccaggtgatcagaggtcggctttgatgctatgaagaaactagcaggttaattttagctagctgcatattcattcatagggaaaagaagagaaaaagtcctctatatatacaactctgggacacctacaaaagtaagtaaagtagaaagaactaggaaactacctaccaaatcctatccaaataattgattgtggttttaattacaaaaataaactcctaactaattcctaaaaaggttgatcctatctccattatagattcgtactcttcaatggttcttaagctgaacaaaataataaagacgttgtattcttcgatagttcttaagctgaacaaaataaagactgaatatttaaggcccaaatgtagcatttttgaagtaaagtttgagatgtagctttataatattgtcaattccttaataactttgtctgtcgctatgatactgatttttgtttgcaagggttttaaaatatttacaaagattatgaagttgagaattctaaactgccaatattaaggataaagcaaaggttgttaatcttagggaaaaaccagtggaactcaattggatgttaaatataagacctgtatgctgccaaaatgagctactcatttttgagacatgaaaactcttaattcctgccaaactacataaccacaatcattcaaagaaagaatcggattgttatgacttatattctgaaaccagtattcaattatttgaacagattttgacatgaattatttttttcaacaaattgtgtatgggaatgttcagtttatagtacattagtaactcatgctgtttgctaccaaagacaaaaagtcatatggctcaaacagagtggtttggcattaatatcccatgttcatatgttttattgaatttaatattcattttttgatgcaattatcaatgcaaacaattttctagataagaaacaaggttcctgggtgttgggtggtgga

SEQ ID NO: 13558 - DNA, 4522 bp, Vitis vinifera
  Intron number 2 from transcript GSVIVT01001639001 (locus G SVIVG01001639001) derived from phytozome v7.0 (chr-ID chr5 ; pos 21647434 to 21651955 reverse strand)
ttttgttccagcttttcctttattggtaaccatcagtcgggattttgcatggaaaaaatttgtgaatctttgacattgatgtaaatcattttaaacatgcttaagtcttacctattgtttatgcttttactaacaagtccgattacaattagcaatcagggaaaaacatgccttttgtttttttacaatgaataaatacattctccagtctccacttttcatcttcaccagccataaaaatattaagcccctgggtgcatttccctaaattaaggagtaactctttgatccaaaggcattattctcacctaatttacgaatccttctaccatactaaatttaccctttcctgtttttttcttctttttcttacactaattgtagaacaccatggagaggtgtgtatatggatgatgtttgaatgatactgctttcacaatgaaatttccttctactagaattttttttgattgtggtgatatcctaggttgcatttagatatatatattttaaaggtaaactacaaataatattttagttatatatattttaaaattttaaaaatatcaaatatctttttaatgattttttaataggtttccacagtttttccaatgttttcacaagagacattgctaatgttgattctatagaaaaaataagatatgagtgaattgtaagttttgtaattattttaaataaatttaggaatgaaaaaaaaatgatacatttactttttaaattttactaccacattaaaataaaagtatgtacatataacttacaaaattacaatcaatattgtacataaaatatctttgaatataaacataatctattcaagatatctatgaatgtgaacctaaattgaaagggactactcatctctacacaaataatggttatgttataatatactttcacttggtgttttaaatcctatgacaaagcttggagcatcttgacaaaggtggtaaggttttaagatatgtttgccactttgatgtggtagataactagtctttatcaacattaatacttgatactgatgtggcagataatagtctttatcaacattaatatttgatattgatttatatttgaaatgccactaattgggtccttacatggaaatcaagttaattagctaatttaaatatgagagaaaagtggaccaattactatttaagaaataaataataattagtgaaattcatttaatagaccaatcaaatagaaaagaaaaagaaaataccaaaaaggaaaaagaagaagaaatatatattcatacattggtttatattatttttagaattagaattataaataattttttaattacatttgttaatttaaaaaaatatttaatatcttccttaattttagttttatttttttaaaaaaaaatagaaaaatatattgatgattattatacaataataaaaggaatttttttaatgattttttgatgatcaatttccaccactttccaatctctatatgtgagacattaggtttcttgatttcttttgtatccactaattaattaattatacgggtttagaggtgtgcaaaggctcatcctcataccttctagatacgtaacttgaccctcaaatccatttttggttaatggacttgtctttttcaaataaagagttatatgtgattttttttcttattttgttttaccttttttaaaaaaaattaataaaataaatgtcaattccaaaactcaaataaaatgagtttttaaaaacatgaaacatttttcataaattctaagttttgctatagagtggggatgcatgtgaaaaatacgggttcacaataatgttcacattatttttgcaagatcaattgtcgagtaacaacttaggacacataaaaaaaaaaactgttggcaagagtatctgatcaaaacattgtataaaattacgggtaaaagtatttgatcattcgtatggttacacaactgtaattctcctagcaattacacttagcatatttcccttgtacagttagtgtaatacccttgtacaatgacacaaatttcatatttcttataagttatatgttcatgtaggtgtattaataatattttcaatggtttggttaagaaaatgatgaatgacttaggatcaactttttttttttcccaaatatcattattagggaaaatattagaattttcatgtgagagttaaataaaatgcatgacataggtgtacaatccttgggtgacaaggaaattaaaaagtggtttagaattgattaaattgattcacaaagggtaatcttgtacacttttgtacaattagtacatttcttgttagtgtaatacccttgtacaatgacacaaattttatatccctcctaagttatgtatccacataatagtgtttaattatattttcaatgatttagttgagaagatggtagatgatttaaggtcaaaattttttttctccaaatattattattaggaaaaatattggaatttccatgcgggaattaaataaagtgtatgacatatgtgtacaattcgtgagtgataaaaaaaataaaggaatgactcataatcgattataatatttcacaaatggtagccttgtacacctttgtacacttagtacatttcccttatacagttagtgtaatacaattgtacagtgatgcaataaatgaataaataaaatttattatttttttattttcatataaaaaaatagtattaaacaaggttttcaattttcattttaaaaaatacttttcattttttaattaaaaatattttcaaaaagagacaatatagaaaataaaaattatttttaaaaataaaaaataaaaactagaaaaatattttaaaaccaaactcaaatataatctatataatttttaactacttgtttttatctaaaataagtaaatatacctttcaaccattttatataagaaaaattcaatctctattatgtattgatataatccacttctaaaattaggtcatatgaaaacatttgaattgagtacttaaataaaaactttccatccatcctctttctttctttttctttttcttattttaataaattttcaattaattcaaatcattaaaataaattcttaataaacgaatttgtaacatttcatataacttattactaaaagtcatgttcaaaaagttattaaaataaggaagaaagaagattaaaaaaaattaaactttttattttataatagtaaaaaaaaatttaaaatactttttaatataaaaaaataaaatagtgaatatatttattttaaatagtattttaatcattaaattatttacttctaaaatataaaagataaaaataaatgtaaaatgtaatttttatttatttaaattaatatttttttagaaagtattttccaaaatagtctttgaatcattaatataatttttgtttatttataatttaaaaataaaaaaataatgttgatttttcaattatttataaaagagtttaaaaaaataatgaaaaatctaaaaatggttaaataagaaagaatagtgacatgtgaaaggtggtagaataaagacaaaaatgagtcaaagggggtatttttgtctattcccatcttatatccttatgatcaattattggtgtttgatggactctttattaattatcaaaaccaagtgggtctaaagcccaattctcccattcttttaaaacacatgctatacttgaaacatagacaatatttgttttctttcacttaattctaaatggcacgacagtttctacgggaactctcaatcttcacttccttcttccgaaactctctcttcccctctcttctctcaagttccccctcaacaaagatccagaaactcaccaccaaaaagaaagatcgttctctctctctcttttatctgtagctttctctaaacagagatcggaatctcaccatacattaaaaaaaaaaaaaaaaaacccaccccccaaaacagaaaatccttccctgattatacaccccctcttcgaagactctccatccccttccttctcacgtgacatgctctctaactccgtgtttcacgcgccctcaaaccgtcccaaatacatgaagttcagttaaccttgcatgcacatgcatcagccaaacataacctagaagaaaaaaagctatccaacttaaacacatgcatgctaatgcacgtgcttgcccatgatacatgagaaagggtgatggtcacaagatggatttaatcaatcggtctactagaattcgaaaacgccgacagttacgagccccttgatcagttgtattactgacttttacatcattgagagagcaaaggaatgcatctggctggcataaaatttccccgtcaaacattgccgaatcaatcgggaatattcttgcaagagatggtgcaacaattccaacaaagccatcacctgaaccttgattgagaagaactacacttgtcgcagccttgccaaaagcccactgccacatacctacttca

SEQ ID NO: 13559 - DNA, 9830 bp, Vitis vinifera
  Intron number 8 from transcript GSVIVT01023401001 (locus G SVIVG01023401001) derived from phytozome v7.0 (chr-ID chr1 4; pos 12526785 to 12536614 reverse strand)
tcaattggagaaattacgtcactagacttaaaaatgtaagtttcttattctttacttggaagagcttccaaagtaggttggtcctatcatttatttacattggtcccctttcttggtagaattttgttatgttgctgacttgttttgattattgaatggaggaatttctagtgctacattatgtggttttccattggccataaagtaatttcttaatagaactgtcaaatatgtgaattttcccaactgattgattgccaaaatgaagtatggcagtgaaaggccaattagttagctacacatgttctctttttgtagtattcattttcgtagtaagaggaggggttacatacgagattacctttctttttcaaaatatcatccaatatatgttaaggaccactaaatgtcatttagctccatttaggtctctctgtttatgcgcattttttgttttattttattttatatattggtgttataggttcttgcagaacatcctatgcaagttagccctggaaaaatctacatactgctgtcttcaatgactccattggtgactatgaggtttaagcaaagattatggactacggcattttgaaatataggaccagtttggagagtaattagttgatggaatccctgacaaaagtcttgttcgtttacaattttgtaatttaacaatccttgtatctgagaagaacttccagattaatagggaggaagattcattggacagaatcagaagttttcttttatgatggattggtataaacatcaacaactctgaattggaccaatttctcctcaacaaataagcgcttgggccaataaaattctacctaattgagagatattggagaggttacaaaaccctctaattttctttacaaaactaataaactgaagatatctttaggtttgctgtcatgagagtgggtatcagtctagacaaataaagaaatgatgacaggatttactagttaaacagagaatatagtagtagcacaaagaactagaaataagtaatagtaagagaaagaagaagaaactacacaatagcggcttcaataattaaaccaaaatactaaaaaaattcctataatcaaatgtagtctccaaaatgatttctggcatgcaagaagcttctagaactcaactaaccaatgaagaaaccaactaggacacaagttccctagaaagtgaagtatctaaaattgctacaagactggtttattgggaaaacattctccttattagactcagatggaaactttagggaaatagaaactccaacataaaggaacaatttaaaaacttcttagaaaatggagcttgcagcaaagttggcttcccaaaatctaataatagctgatcaatccctaataagaataggattgactaatgtcccatagctaaacacccattgttgggggtagacaaacttaatctataagacacttccttttggatcaaaaagactccttggctgttgtggtgttgatattctaaaggtctggattccaaaatggatattttctaaccaagatatacattctgcatcacttccttggctgttgaacccatgacctcaggtatatagttttaaggcttacataaaaatccatagatatacattttattagttttaaggcttacataaaaatccatagttttatggcacaacagcttgcctggagaaaataaatgtatatagttttaaggcttacataaaaatccatagttggggtagttatagttacttagcaaggtgcacctagggtaaatgtgaccaagcttcatgtcttcaatagcaaaagggatgccaaggagcttgacaactattagtgggatatggggcaagggacatatatggaaaacaaaccttaccttcaggagcgcctatttcaaggtaatggcacttacacatcaacatgccaaggtatagactcctacttttattttctaataacactactttatggtgttgtagaaagcatactgatgtggagaaacatttgcatcatagatacttaggatgatttcaaaagagaaatcaagaagtagtagaggatatggcctacatacctcaaaaaagcaagaaaaagctaaagcaaacaaggtctagttgggattatgtggaggagttccccacgcttgcattggattttcaaatgtctaagaaagaaattctcttctacttcatggataacatttaaggcttggataagggggaactatgatgccatggtggtctgatcttgccatgatcatggtagtagcaaaatctttgatggaatatagggagacttctccaaagtcagaccttcaaggagcaaccatgctaaatgtggggggaaaaggggtcttgcaatagagaatgccttagcaaacctactacaagcaatgaaggaaagaggatggacaaaaaggtgttccagcccatggatagttgctttccatgcacaatctgtatgtggatagagacaatcctaaaagctattaagctccctaagtctatcatcaatgagaaggagggaacataagccaggtccttatagctactaagctccatcaagtctaagctagtgcataactcaaagaaagggattcatgtacacaacactcccattaataggaagccaacattagtcattgtagacacgggagcccgccaaaatttttgtctttgtagaggtggctaaatgattcgagctccatgtatcgaaggaatgaggatggcttaaggtggtaaattttgaagccaaacatgtgcatagtatgttccatagtgtagaactatgtatttgcactaggggtatagaaaggtgtggttctgttagtttttagagaaaaaaatagctgaactgacatggttggtttatgcttgaattaaagtgaactgttagtgatggaaaactatactaaaccaagcttgattaagattggttttctttggtttagataattggttggatgcaagttaatttaggctctaatactaatttgtttttaaaactaattgaaaccaacttggatttgaagttcaaaatatatttaaatttttctcccaaaatataatgaatgcatttcaaaattaaattgactgtagtccaagaacattgaattaatcaataaagtctaatataaaaaaaactcattaaagatcgaataattatatgtaagtcttagagtgtgggtttaggtccatttttattagttaggagacaaggaaactaaaaaccgaattgatcagttttcaaaattttcgaattgaaccaacctttatggttattgaaaaccaaactgagatgattggttttggttagtttggatcagtttttttattttactttcacctctaatttgcacgtaggaagtagagtcaaggtagtgccattatctttcctatgcttgatgaccatctttgaggaagaagcaccttgcatagtcccaatgatagctagaggtaagttaaatactgctctacttttttcaatgcaactaaagaaaggattgaagaacagggatgagacctatctagttcattctaggaagaagaagatgttgcttcaaaagggcctatgacttaagaaattgttagcatccttgaggagttcaaggatgtaatgccattagttgcctaaatggctttcattgaagaaggagaaagaccacaagattgaggttcagttgtgagtaaggccttctagcatgggaccatataggattgcactacccaagctagaaaagttgaggaaatagctaaaagagttcctagatatgatattcatccaatcatctaaagctccctatggtgtaccaattctattttacaaaacacacattcaattgatttttaagaatgtgctataatgtgtttttaagaatgtgcatagacactaggtattgaataaggtaaccatcaagaacaagtggctatccttttgttttttgacttatttaatcatcttaatagagctatagctttcacaaagcttgacttgagatctgattagtaccaaacaaggatagaaggggggatgagccaaaaactacttgcatgactcactatggctcttatgggctcttggtaatgacttttttccttaccaatgtccctaccatgtttgcaccttgattaacaagattttccatccattgattaatttgtgtttgtgtacttggatgacattgttatctacaacaatatgctagaggtgcttgtgcaagacttagagaagtgtttgcagtgctgaggaggaatcaactctatgtgaagggggatacatgcttatcttctaaagaagaagtgactttcctcaaagataagggaaaagatggcaaaaactagtaatggatgagaccttagagtctgcttacaaaggtgacatagtgtaagtcttcaccaggcttgacaaactattgcaggaaattcattataggatactttccatgagctattcccttgacaaacatcttgaagaagaattatgtgtgggaatggagaatgaagtgtcaattaaattttgaagatctaaaataaggcatgatagagaaactattgctagccttactaggcaatgacaagccatttaaggtacatattgatgcatcagatttgctatttaaagggtaattatgcaagatgggaatcccataccctaagatagttatggtctaaagggcacaaagcaatgatagtttagaagaaagaaatggcaatggtgaagaaattagaagaaatattatttctctatttttattctgaagaatatatgcagtatttataagaatatgtagcttattgcccaagaagggagagtaaattatctaaaagtttaaaaggaaaacaatcccccaaaattagaaaactaaaaaatcaacaaatacaataaggaaactctgtaaaaaataaacttagaaataaaaaaactcttagaaattacttaggataagctagttaaaaaatatccaacataccaaacttattaatgataaatttaaatgttttttttatagacctttatagtgaagatatttgctagccactttctagtttctccttgatgaagtatttgttgacttcaacatgcttagttgtcattttaaactagattataggtaatgctaatagttggtttattatcataacacagcttcattgtacctccttgagctacactcaattctagcagtaatgatttaagccatattaactcagattcattgtgtcgttgctcaaaactcgacttctgagctagatttagctacaactgattgctttttgcttctccaagtgataagattaccttcaatagaagtgttgtaatgggaggtgaattttttgttagtgaaagaaccaacccaatccacattagtgtaggcttctatatgtaagtggtcattcctttcctagagttccttttaagtatttaaaaatcttgaacataacttccatatggttttcacatggagggtgcatcaattagctcacaacaccgattgcaaaagcaatgcttggttgaggataagacaaatatataaacttcccaaccagtctttgaaactgcttttgttgattggaaccccttctgaaattgttcctagtttgtgatcttttgtataagtgtatccctaggcttgaaacccaactttacgtcttttgtagaagatctagaatatatttcctctatgatacaaagattctcttgcacaacctagctacctcaattccaagaaagtatttgtggaaaataagtgtatcttagagcacttagcttgtagatctcaaactccttaggcaatagcctctttgaattttccatttcaatcatatcatcactggttagaataatatcatcaacaagaccatattctctcattttacctatattaaaaaaaatctgcaacaaggctataagcactgtgatcttaccattctttgcttgtttgaagaacattgtattatcaccttgacttagattgtatccctgcttgatgattgatttggtgaatctctcaaaccatgccttgagagattgcttgaggcatgtccatatggacttcttcctctaattctcaatgaagaaagacattctttacatcaagttgttacaactaccaatccaaattgttagagaggaataagagcactcgaatggagttcaattttaccacaggtgaaaatgtctcttgataattaaccccatagatttaaacgaagccttccgccatgtgcctacctttatatccttcaataatccctccaccttgtatttatccgtgaacacacatttacatcctataggtttcttccctgatggtagatttactagatcccaagtatcattcttctataattgcctcatctctttaagaactgcttcttccaaacttagaacctagtttagtagcaaaggctttgaatgagggcgatagactggtaagaaacaaacttgggtatagtatgcaaagtatgtgacctaacattttttcctagagtaatggaaacatcaagatcagaggaaaacaaattaatggacaaagtagaattaatagactcaagattaccaattccttcacagatgtctgcacccggttcaaaagattgacagtgagaaggccttcagctacctttattcattcttgagtacacctgctgccctctagtatcatcaccacacaaactgttttgtggctctcactcccattttgaagaaactgaattggttcattcatctgtatagctattagtaagaattcctgaaacttttcttctgaagaaactgaagtgaagtttaaggaagatatgtttgatgctcaaaaagattataagtgctttcatccttccacaaaaaatctcttcggatgctttcaattcctataagcaatgccaattaggatttcaagggaagaggtagaatgtgcgaatatgagcgaaattcaccccccaagaatagaaatgctttatcaactacctgacctattagaaatccgatactgcaccaggctgcaaaaatgaggggtcttgagattcttcatgaagggaggtctagtcgggataaggtcaatcactcttcttgcaacctctaaaggatccgatgctggattggtgtgtctagcataatgctggaaacagtggttttgtctaattatatcctatggcccaccatgagagcagaaactatgagaacgagtttaaatttagagatctcatcaacctcagccctagaaaggaagattagcataaaaaaaactgagggtcagtgcccctgaaatgatccctagccccctcaaacttggagaagatgatctcataaaacactttctgaatccatttggagaggactttagtgatgaccctgtaaagaattgtttccaagctaatgggcttgaaattcttagtagtaataacagacacttcttaaggacaagggcaaggacaattaaagcagaattagtggtcttgatggcctcattattgaaaaattcttgaaaatgtaaaggcaaataacaactcttttcaaggtttctgacctgttttgagattattattattattattataaatttgtacctatcaaaaaaaaaaaaatctcaaaacaggtcaacaaccttgaaaagagttgttagaaaatttgtctgtttggagctttctccccatcccgctgaaaattagtaactttatctcttgtttgggaatggggagagaattcgtttttgggaagatcattggtggggtaaccaatctttgtgctctcaatttgctggtctttatagagttatttatgtgaaaaacctcactgtctcaaatgtccttgggaattcctttccactgtcttggaattttaattttcgctgcaatctcactaattcagaaattgatttccttcagagtttaatgtcttcccttagttcagtgcttttctctccttctttggtagattcaagagagtggtctttgtcatcatcaggcttgttttcagtgaatttttttttcttggccttgtcaaaagtctcaaatcctatcttgtttcttccagccaagttcttgtggagttcaaaagccccctcaaaggttaaggctcttgtttggttagtagcacatgggaaggtaaacaccaatgacaagttgcaattgagaagaccctacaaatccctctgtcctcaataatgcattctttgcaaaggaaatggagaatcgatagaccacctttttcttcattgccctgttaccattggactttggcataagttgtttaatctagtagggttggcttgggttcctccaaggagtattgaggacatgttggttattgcttttaaagtctttaagaactctttaagaggcaagacacttcggcaaatcgcttgcgttactttggtttggatggtatggcaagagagaaacaataggatctttgaggataaggggagaacggaagagatgttatgggacgtgattctgttcttttcctctctttgggcctcgtgtactgcagcttttagagaagttcctctaagtgttttacaactcaattggactgcgatttggacctcaaaagtttgagagtgttgggttttttctgtgtttttagttttctttagttgggtgttttctcttttgttcagtttttgttttgtgggaatgacctctcatccttcttttggtttcttctctttctcttgtatctcttctttctcctatatcttttcctctattaatatacttttcttcatttctgataaaaaaaaaaaaaggatgctctacccactgtattatcgtgagatggtgggccaatttctaaccttcaatttgcagtatcccacattttaaaatgactaccaaaaaattttaaaaatattctaaaaaacagtcttggtcttctaatatgggcatgcaagtgagtttgtgacttttagcacataaacgttaatcaggtttatccttgcacctaagctggtcatattaatatgtatatttttttgataagtaggtcatattaatatattcttaactgtttctttgtctttttaaaaatgtcagaaatgtttctgctttcttccaactgaagaaatacaatgaatacaattttatacgttgcttacactgggggaaaaacctctaaaggggagtctcattattatgaaaataattcatgaaatagatggttgaatagcttgtattctctgaatttattacatggcctactagtgcataaatgtattatttagtgtatgaaaccttgttttatatcattctagcaataatatcatgaatgtttctattcataaaactctgctagaaccttctacagcaacatgtgcttccttttttgctcaatcataatttgacttccccagtagagattgattaatccatttctagtttattattgagttcttgttgaatgctgtcttctactctcttgcttctcaacttttcaacagtagttctttaatgattcctgaatttctaattgtttttgatgttcaaataattccggagtccttaatttgtcagtgttctcattcagtaaatatctgaggcctctcttgaatcagttgttgaaatggagttaccattgctttctcttcctagagaaaaatggcccacatgtcttatcttaaataaaagaagggttaatactttatttccttttttccctatctcgaatgccgttctctttcatagcattttgttccttgtacaaatgtagctacaccatgaagtttattaccttttaagttcatttaaactcaaactactaagctaaatggaggctgaattatttgaattatgaacctgaaattttgatgacaggagc

SEQ ID NO: 13560 - DNA, 6568 bp, Vitis vinifera
  Intron number 2 from transcript GSVIVT01013349001 (locus G SVIVG01013349001) derived from phytozome v7.0 (chr-ID chr1 2; pos 12522689 to 12529256 reverse strand)
tttccgaagacaacttattgcacgtaatgttgtgtcatatagcattttttaaatttacaaaagaataaatatgttgcttgcaaattgagaacttttcttttgcacaaataattaatgttttagttttctacgatgcatatgctttgggatcatgatcatttttgtagttgtatcaatattttctagtaaatttattaacttatagcataaaatttgtaactataatcaaagtaaaaagccaagcaaaaatatgcttggaccatcaatcaatggagttaaagtaacattaaaaagtttaatatatataaatagatatagctaatataaaaatcagttagcacaatggacttactaaatattcacacttttatgaatatgtcaaaaatttaatcatgagtaccaaggtacttcaattccacttcttcattatgcatttttttaagaaaatgatatctttttgtcaatgtttttgttttgatcatagaatatcatattttttaccaatgtagatgctaatttatggtccatgtggatcttaattggtttttcttatagcatgttaagctcttttattaaaattttgtcaaattacctaacaaacaattgattgatgtcaaatattgtagggacagcaaagtagaaatcaaattatgtctgatatttgcatcaattgtactctccaatcactcaattttgtgctaccttgcatatgctcaactttcttacattttttctctattttttaatggcttgcaactattttgagtgagtaagtgcatgtaaaggagcttagtcaaagtataaaaatggagtgagaagagtacaagtacatgaaatagaggaaagaacgcacaaagctgttttccattttgggccaatgacccatggtgcacaaaattgcaacctccccattgcttattgccgttttgggtgccataattggtcctacgagccatgcttcctaaaggtggtgtcctctttgttaaaaaaaattgtttatgcttggacacacttttttagcatttttctcttagcctttagatctttgggcttaagatgcctcaacatgtctctacgttaggacaaccttggaatggtataaatatcccattttgcaattgtagagggattggtcttctcctttggaaggcctctttgatatatttctagggtttagatttcttcatgttttagtttagattaatgtagtcccctttttgatgtaagcttgctttggatgttttcctctatctctcgcttctgtgcttggataaattttgataaaaatcaaatatttcatatttttattctctttatgtagagcacatggtcatgaggatatttagtaacaatattatcttgaaaatatctatcaaatactattccatactcttgacccttactactttaagccatacaaagctttttttacaattcaaaactttatttttgtttccttttacgttataagccatgatttgtttcatatataatttttcttcatgatatccattttaaaaaattgatttttcacattttaaataaattttccttgtattttaatctattaaagaaattacaacttatggtttctatagatggtaagtaaataaaattacaacatcatgatcaaggattaaaatatcagaaattatgaaaatctcaaattttaaattttatgaaaatattaggaaatataaaaaatattgaacaaaaatttggaaaaaaagacaaaagtttatgaaaattacataaatatgaaaaaaaaactcaaaaatggtcaaatagataataataatacacattgaagttggttatatatatatatatatcttgattttcatgataagaataatttagaatttcacatggtatcagagcttattctaggttattggtgtgcttggcgaaaactttgagtgccacctatccttattttaagtttttttgtggtgttttgattcctcaggtttcattgttgatttcttttttagtcgtttcatctccatttatcactactattatgtttgaaatattggaccatactcccgctatcagttctattagggcaacattaaaaacactactaagctaaaccatgagggaactatagaacttccaagctgcttaacaccttattgaaaagaaatatcttcaatagtcttagttggtaaggaaaactgagtcatttaattggcataggactaaagcttggatatccaaacttttagagctggaatgaagaggattccatatcatgtcttggttatggaatttagtgtcccttaaaattagtggaacatgttttttacaacaactagggaggtttacaaagtcattcgacaaacctattcaaaggtttgagattgtactcaaaatttttaaatcaaggtgaacatttcaactataaaacaaggaactagatttgtaattaaatttgccaatattatgaagaatttgtgatagaaaattgactactaccataacattcaaaattaaatgtagtgaagatgcaatagtgcaaaaaaaatattatagaaagagaataaatttttgaatttcttgttaggctcaacgtggagtttgaccaagtgcaagtctaagttttgggaaaagaggagcctccatccatgaatgaaatcatctccatcattcgtgctaaagaaaataagagaggtgtgatgctcaaaccgtcttttattcatggttctacaaagccacacaaattcaacccaaatcttattagagaaactagatgttttgatgagttggtaaaaaatctcagttgtgaaggactttggtgtacttactactagaagccctaacacaccaaagagaaatgttggaaacttaatggaaaaccttaaaacttgaattggaatgtgggaaatagagcatggaagaaacataatcaagaaattatggcaaattgtgaagaaagccctcgagaaaaacatagtttcaacaatgaagaatttagaaaactaaacaaagaagagatagaaaggttaagatattttttggtactttgaataaacaatcaagtatgtgttctttgacacaaacaagtaagttttctatttgtcatacttttaagggccttagatttgttcttcattggctcttgggtcattaacttaggagacatagaccacatgacctactcttctcttaataccacaaagctcgatttaaaccaattttcaaacaacaatgaattggaatcattctgctaacactagtctagaaactattgttataaaaccattgcaagtttacttaaggagaaaaataaccaccattaaacccacacatagtcaagagtctaaaccaatgctagacaacagttttatctctcctaatacttcaaatgttgacaatgatcttgatttacccattccgattaggaacattttctaccattatttatgtcatttaataacttctcccaatcccacaaaaatcctcactcatttgtacagcaaaaccactccacaaaacctttttgaggcacttaataatgagaattagagacaagtcatgagggtaagataaaggccttacagaaaaatagaacatgggaaataatagagatgtctaagaggaagaaaccatttgggtgtaaatgagtatatagaatcaagtataactaaaaatatataagtctaggttagtagcgaaaggctaacacaaacctaaggggttgattaccaagcaaccttttctttcatagctattatgaatatcgtaagggtgttattatcattggtgactaatctcagttggagcttacaaaaatttgatataaaacaaaaatgcatttttgcatgaggacttagaagaagagatctatatggaaatttctctaggattttacaaaactcttggtagaaccaatgcgtgaaaattaaagaaaacctcatatgaattaaaacaatctctaagaacatgatttatgagattttctaacgtgatgttggcaatgaaatacaaagtcaaggtgaccatactttgtttattaagcattggacttcaaagggactgataactttgttcgtatctatggatgatattattataattggtaatgatcctagagaaagggaggctcttcgatagtatttaactagagaatttgagattaaagaacttgttagattgaagtatttcctaagaatcaatgtggctcattctaagaagggtatctttgtttcataaaagaaatatgtgattgatattcttaaaaaaaaaaccaagaaacttggatgtaagctagtggacaaccccatagaaccaaaccataaattagtagaggccttggaggatgggattgtagatcatggcatgcactaatgacaaatgtgcagacttatttacttagcacatactagaccaaaagttgcatatgttgtgagcatttttagtttatgcacaatcccaaagacactcatcttcaagtaatctatcggatcatatactacgttaaggaatttttggtaaaaggttgttattcaaacaagctatggagttatgcttgaaagcctacactaatccaaattatgttggattaattttaaatagaagatcaaccttagagtactatacttttcttggggatatcttgttacttagaaaagtaaaaagaagctagtggttacaagatcaagtgtcaaggtggagtttcgagtaatgactcatggaatttgtgaattgttatggcttaagattattttaaatgatcctaaaatcaagtagagataccctatgagattctactgtgataataagcctgcattcaacatcactcataatttggtacagtatgatcaaataaaacatatggaaggagattgacatttcataaagaaataagctagatagtggttttatttggactccatatattgagacatgtgaccaacttatagatgttgtaactaaagattagctaataccaaattatagacatgtgtttgaagtttaggtcctataatttaggatttttctcattttaggactcttcttgtacaactataaattagttaggactttttctccttttaggactcctcttgtataattataaattagttagaacttttttccttaaaacccctttatgtacaattgtaaattagttagtaggagatttgaattaccatgtatgtaaggaatttctaacttttttttgaagaggtttccattctctcctatgcatccttaatggcctcacatgtttcttgagtaaggattaaatggtcatttattgccaaaattttagatgaaatattggctctctgtggcaatgcaaacaatttcacaattttattttcggctattgaattttgccacttttttcagtttttttttttttttaaagtttagattaattgtcgatcaattggtgatttttttatcatgtgtcaccacatcaataacgcctctaaaatataaaatccctcttgtatgaattgatttatatacttcaaactctagtactcactatgactttaatgtagttgttcatgcatacttttagagggaatcaattctactataatttaagtttgcccaaatattaacttattaggcttttaagtttgcccaaatattaacttattaggatttagggttattgacatggaaattcctacataaaagtagattgggaaaacgttgtagagcataacaaaactacattcaaatattacaactttagagaagtggcccaattaagtgtggagatagatcctagaatctataaggtacacaaaataaaaccttagttagcaataataaaatgctaacatagttaatcaatatattggagctatatatagaaattctttagagaccatattgtcatgccaataattaggtgtgacctaaccaagttacttctaccaaggttcttctttgctacactccaatgcacgacaaaactatctaatattttccattctaccatatttagcttacctcaaaaattgataagattttatgaacttttctaaaatactacttttaagattaagaaaattttattttaatagatgaaacacatatttcaatgggtgaaaacatttttatactcttttttatttgctatggtacctttactataaaatatatcatattagttgtgagggtttaaacttgctccaccttttttagccaaataagtctagatattgcaagtcatgtatatgggagagagattgtgatctatatcatataagttaaaaatgtatagttcacattttctttactagcttcatggtagaattttcttttattggtaaattttttttttcctttctcttttttcctagtgggactccaacctataatcatttaactttgctaagtgagtaactctccttaaacatccataagctttaatttcttctaaagcaatcttaaatttagaataatcatttattaataaatatgtcattatttgaattaatacttgaagtggataagaccgcttaacttattaatttgtacttcttatgatgatattttactagggaggtgacaaagatctttgtggaagattttggaa

SEQ ID NO: 13561 - DNA, 13043 bp, Vitis vinifera
  Intron number 6 from transcript GSVIVT01021563001 (locus G SVIVG01021563001) derived from phytozome v7.0 (chr-ID chr1 0; pos 7097968 to 7111010 reverse strand)
gacttctttttttttttttttttttttttttttttgcattagtccattctgcaattatgttggctaagtatgaatttatgataggtagtgcacaaaatttcatggaagaaagcgggactcgaaaagtcgtagagagacattgagtttattataagcttgtttgagtacatgttttatttcccactactatttgattttatttttattggtttatgtaaatatttgtttgtatatatttattgtgtatataattggatatctaacaaatcagaaattttgtttaaataagaggaataattcaataaacatgttttaataaaatattaattttaaaatattcttcttaataaaagaaagttttttattaataaaaattcagaaaaatacttttagaaaaatccaaaaaaaaatgtttttaataataattgttcaaaaatttctttgtttaataaaaattgtccaaaaactgttttgtaaataaagttgtcccaaaaattaatttttaattaaaaattattttaaaaataaagttatatatatatatatatatatatatatatatatatatatatatatattaataatttgtataagttacttttcttaaatgaaaaaaaaaatgaaatacttttgtaaataaaattgtaaaaattcattcttttctagtaaaagcaagtaaaaataatttttgtacccaaattgaaattttataataaattcttttgatacaataagtgtaaataacttttttttaaaaaaattgaatacaagtgaaattgaatcaaatcattaatttaaacttttttttttgtaaataaataaattgaaatcattaatttgaaaatttttttaaactcctttgaaatttcttgaaaaaaaatatttttttaatcaattcaataaatcaatttgcataatcctcttatcatttattttgtgtattcttgtagttagatttcatcattatttttgtgtatattgttttattccttaaatcttggtgttcatgattaattaattaattgtcacaatttccttaattcatttagtagagaccgtatgtatatgggcttagaagggtgctacggctcaccaccgtaccttcctaataggtaacttgatccctaaatccaaattcggtttttgtagacatgtcttttccaaataagcagtcacacatggttttctttcttattttgttttacctttaaaaaaaattaaaataagcggcgaccccaagttttttttaaaaaaatcaaattttcaaaaaaatcaaattttcacaaataaatagaagaacgagtctcgtcattcgagttgggacgcacataaaaaatgcgggtccacagctgtctatatgtttgacctcataatctcataggatacaatgagaacgttgtatcaacatgataattgattgtgatgatatcttacattaaataggtgaaaaaaagttctttgggctatgtaagggacttcgtttaattttataaatgcattttaaagtcatgagagtctttggacccaaagtacacagtatctacacaattgggagtgagtcattacaaatagtatcaaagtcaattccaattctgatgtgagggtttgtttgactttttaaggggtatttgtttatttaaccccacagtcctatgaaatataacaaagacattgtatataaaggaagtgattatgatgtctcacattagatatgagaaaaagtttttgtgactatataagtatggactattcttaaccttgtaaacgtgttttaaagtagtgaatgttgtttaggcttaaaataaacaatatctacatgattgggagcgagttattacataacttacatgaattcaatcaaagttagggagaattgtgttttgggcccagctaggcccaaaaattaataaaagatcctcataagttccatatttaagcccaacacctaaagaaagtttacaaattgaaaagaaggatatgaaacattcaattttccgaaaatgccctttattgtcaaaaagaaaaagaaaacaactaatttcctactctctttcattctttttttccctctctctttcatcattcaccttgtctttttctctcacatattaattggtgggacatgtaaattaattcttttatagaaaagtgttactattttcatcaattatttttctcccaaaaaccatgcctaataaattaaatattggaaatcaatggttgaaaatgattattactatatttttaaagtaaatattttttaaatacctcataattttttttaaacttacaaaatatataataaatatttaaaaaatattattattcttttttatccaatatatatataaatatctttaaggttgtagacaattatttgaatattttctctattttttggacaatacattgatattatcttaatatattattttgtaacatgatcattttttaactaatggtgataattaatttttaattgaataatgtattataacttaataatttgaaaaatattcaaatgcccttttaaatctaaaatagatgtggacttgacatggtttaaattattaaaacatgatgtcattaagttaagtaaatgtatcatattaagagatgtgtatgtaaattatatcataattttctcttttttttatttttttcctcgtacatgatatcttttgtataaagttttgtagatgaaaaataacaaaatcttttgttatgtaaagaggcataacaacacattaaaattgaaaagagaatataatggaacacaaattagatgaaaatcactttaaataaggatataatagaaaacatataaatgtaagaaaaaacaagtttagatgaaatttaaaataaaaaatcaaagaaaataaattaaaagtaataatataaaaatcgtagaatcttcaaaactataattacaacaaaaaaattattttaagttaacttgataatttaaattaatgattttttataataaaaaattacaaatgttacaaagataattttttatcctttttaattctatttaaatatgatttttttaatatctactaacattatgtttataaaggtaaaatagtaaaaatatatattttattcggtttacttgtaataaacactttaattttggaatactcttttatagttagtgtaacacccttatataatagtgcaaatttcataaataatttatgggtaacaaagaaaataaagaaatgattcaaaattaactaaaatctttcacaaatggtaaccttgtacacccttgtacacttagtatatttcccttgtacatttagtacatttcccttgtacagttagtgtaacatcattgtacaatggtgcaatatatccctcttaagttgtgtgtccatgtaggtatattaatcttatttctaatggtttggctaataaaatggtggatgaattaggattaaattttttttccccaaacattattactaagaaaaatatcgaaatttccatgtgaaagttaaataaattgcatgacataggtatgcaatctatgggtgacaaggaaaatgaaaaagtgattcaaaatcgattaaaattttttatagatggtagtcttgtacacccttgtacacttagtacattttccttgtacacttagtacatttcccttgtacaattagtgtaataccattgtacaatacatctatcctaagtaatatgtccatgtaggtatgttaaccatatttctaatggtttaactaataaaaggatggatgaattagggttagtttttttttttttcccaaacatcattattggggaaagtatcggaatttccatatgggagttaaataaagtgcatgacatgagtatgcaatttgtgggtgacaaggaaaataaaggagtggttaaaaatagattgaaatcttttataaatggtaatcttatacactgcttgtacacttagtatatttcccttatacagttagtaaatactcttatatagtgacacaaatttcatattcccgtagtgcatatatgtctatatttgtattaaacatgattctagtagtttgattaaaaaaataatgaaaaacttcaatccaatttttttatgaacatattacatttttgtgaaaaaaaatatacaattgaccaattcctttatttaattgtgaacatattatattttaaaaataaaaaagaataattaataaatgaaatttaattctttttattatcttagtattaaacaaggtcttcaattttcatttttaaaaatatttttcatttttttaattaaatgtattttcaaaaagagacaatatagaaaataaaaataatttttaaaaataaaaaaataataaaaactagaaaaaatattttaaaaccaatctcaaacataatctatataatttttaactacttgtttttatttaaaatgagtaaacatatcatttaacccttttatatgagaaaaaaatcaatctctactatactatgtattgatataattcatttctaaatacgaaaacattttagttggatatttaaaataaaaactcttcatctatcctctttctctctttttcttttttctcatttcaataaattttcaattaattcaaatcattaaaaaaattccttaataaacaaatttggaacattcatataacttattacaaaagtctatgttcaaaaaattattaaactatggaaagaaaaagattaaaaaaaaaactttaaactttttattttataataataaaaaaaataaactttaaaatactttttagtataaaagaaaaaaaatagtaaatatatttattttaaatagtgttttaatcattaaattatttacttgtaaaatgtaaaaaataatttttattcatttaaattaatattttttttcaaaagtatgttccaaaataatttttgaatcattaatataatttttatttatttataatttaaaaatagaaaataatgttcatttttcaattatttttaaaggagtttaaaaaataataaaaaataaaaaaatgattaaataaaggagaattttatggatggtgcatgtaaagagtggtggtataaagacaaaatgatgggtgtaagtaaaaaggggtatttttgtctattccaaccttatatccttacaatcaattataagtgtttggaagatcttttattaatttttgggcccacctgacccaaaacacaattctccctaaaagttaagcattttaaacaaactctaaaattaggatacaattaagtttttaactaaataattaggattttataaacataatgaaagaatttgtcttgatatatctaagagtgagtgaataagcactccaagcaaaaattgctcctaaactaaaaattttatccctacttttatatacttatatgagtaaaggttgattaatttcatgcatatgcaaattcaatttcatgaaaggacacgtgagctaatgtgaaaaaactacctaaaaacttctagatgtaaaaacattacagaaagtctatttaaaacaaatagtccactaaaatatgagaaaatggtacttgtttttgtccaatcaaatgcatgtttatagtttatgtaactacacttctttttcacgttttcaacacaacacacccttatgcttcttaatgaattaagtatcgagacttcaatgtgtcaaatcatcaacttctaaatcacatggtttctttcaataattgtcttgaaacattgaaagataaagtactacaactatagagatgacttatctcatgtgccccaattttcaataaaaaaaatctatttatacgaaaaaccaagggctaacatttcgaacaacatttggaacattttatctttaattttatgaaaatgcccttaaaaattgtaaagacaaaattattttttttacttaaaataaaataccaaagttcaaatgtcccacattaaaaaggtgtttagttttttagatttttactaaaagtaatttactttcaaactttaggttatttgttttttatatttttttcataacttattataaattttttgctaaatagaaaaagtcaaaatatttgactttttttaaaaatggaaaaaataatatgttgattttctttactttttaatgcttaatagaaataaaatataacaaaaacaaaaaatctaatacttaacattattaagcatcatttagttttaatttctatttagaattaagtaaaaaaaacaaacaaacaaacaccatctaagtgtttgaatattggcatagaggttcgaatgttccataagaagcttttgaacatcctatatgacatttgaatgctctctatatgacattcaaattccttgaactttaataattgttagtgcatacacacctcatgttttgtcaattttagaaagtatccaaattgattgaaatcggataagacccttggaaatatggtataatgaactttaataattgttagtgcatacacacctcatgctttatcaattttagaaattatctaatttgattgaaaaatgataagacacttggaaatatggtatacctgttacaataagaaatgaaataaaattgtcaacctaaaactaatacattaacaatctttattttttctttttcttttttgacaactttatgacaaaataaatagtacaataaagggccctaaactccaataacaacgtcaccaaacctaatataacaaagatgcaaatctacaaagttgcaattggtggtggaaaatgatgagaacttggtctaggctatgcaacaacccatgactctaaggtgtcaagtctcttttccaccctctacatccttcaatcaatgaaagtcatggtaactgcagtaccatccacgatgagaacaagcttatgtcgaagatcaaggatggttggatgagtagctggtggtactagtggaattctagaagcattagtagaacccgatcaagttaaagaaaatgctccacaaccacactctctagcacgaccaagtgaaggttgaattggtaagctaaaaggtcatatctcatcaatgccttgcttagcatctcaaatctcaacctcctcatctacctcaatcccatgtggagtgatatgcatgactcacatgtatgaaccaagagaaccaatcaattagggcatgctagtggagaattggaagctcatgctcaaactcagtcaagcccatgctccaaaagaatatgagatatcagaatcaagaaaagtgagccactagtgcaagcattagagttatgcgatcccatgacatccaagataaaatgtctaatgtcaatctctctcatggtcagaacgtaatgaatgaacttcttagtggaaagacaaacctaggtgcatggatgaaattttccataaatttcaacgaaatttcatcgaagtattgcattttgggggttgtggaaatgaaacaagtgtcgaatggtagaaatatccaacaaaatcgttatgtttttacgaaatttcaggttttggcgattaatcgacgaaacgcacaataaattgtcaactgctacaatttttcatcgatttttcaatgaaaaatccttgtgtccttattgtattgatccaacagttgtgagctcccccacgttgatctgacgacctagatcatgtctgacctccaacggtcacttagttgtgcatcttatggcccatattgtagatgtaatctaacaactgtaagggcatcccaacgacgatatgatgatgcaatggtcatgcaacaaataaactgaaacatccactttatgtaataggtatttaattttcataagttgttacttttattttatttaattttctcttacaaaatactaaatctacttaattttattgtagcatacttcttgaatccaaggtttcaatataggtgtggagttggtagtgatccaaatttaattcaagcggcccatgacatatttgctaaattaaacccaaatgctaaatcgattggtcaatttggaaataaggtaaataaaaaattgttattttactcaatttaatcaaacaataatttcattcttcaatttatttgaacgtttactaacaaatatggtattgacaaattaaatgttgaatacatagtttgtgttttttttagatgtgaaaagaggattcggtgattgagtggcagttgagcaaggtcgaccatggtgcccgatgagtactatttcttatttttattatcattattgtaaattgatcacataagtatttatatgattatgaatttgattgcaactgaatggtggttcatgtatggaaatcaaatacctacattgaggaagttagccatcaaagttctctcacaagctaagtcatctcctacatgtgaaagaaattggagcacatttgctctcatccacacaaagcaacgaaatcatctagtttaccctcgattgcaacaattattttattattattctaacatgaagcgaaagttacgggatatgaaggtagaaaatgatcaagttactaagaaagattacattgatcttcttgacatttcaacgtgaaaaaaaaaggttaatcaattgttccaatgggttaggtctttacacttggataatgaagttggaaatcttgtcactcatgctcgtaaatttggagttgatgttgaacgcgtgttgtctaaagaagttcacagtgagagttttagcaagaaactaaggattcattttaggcgacattgaattcccaccaagaagttgactccataagtgtggcccaaagtagtagacctagtgttgttggtacttctaattctagttacgatggttcaagaggtggaattgatgatggatgtgataatgtggaaggagatattgggaacactaacaaagtcaatatctaatgagccaatttacttgtgaaaatgatttcatgcactacgcataggatgaagaccatggctctagaagagttggtcgagacataggagtcattaggaagccctacaaatgaagagaacgaatgatggcaccatatttttttatttttttttactgaaatgatgttaagaatattatatttttataattattttttaaagtaatttttttttgtaaaaaaataatattatttaaataaataaaaatcattcattaaatagatgacacaaacaacattgtcaaaaacaaatacatgaatgaaacgttcttaattttacattaaaaaaaaaaaagttacattcaatagacactaaattgaaaattgaacgtatggacaaagctattgacaccacaagtcacgtcttaatcatttttttattgaatttcaggaaaaaaaatattaaactaaaatttgtgggtcaaattcaatcagcataaaagtaaattttaaatttggtgtcatcagctagtaaacatcttcaaatcgcactctttcatatcttgggatggagacaaagcagaggttaagtacatggaaaatagtcaaatttcattaccaaaattcatgagccgcctccaaggagttctaaacattcagaactttccatgaaagcggtatcaaccatgtgatatatatctctttctccaagttcactaattaattggcaccaaacccaatacctagaaatctccaatttgttttctagttctaggaatttgaattcaaaatagaattgttgccattcaaacgagtcacaagaaagaaggaaattaaaagaggaaaaaaagtagaagggcatacaagtctaatggtttcagtcattcaagcaagcctatccaccaactttaatgtgaaaagcttgatatttcattgcctccctacttgaaacgtgaattcgatttgctaggttttcataatctagagatatacatgcatctcatagatgggtttattaataatagtgtaacaacctatactcaaccatgtagatattgcttactctatgtccaaagagatcctcacgacttttaaaatgtatctacaaggtcaagaggagttcatacttatataatgccaaaaactttctctcttatatgatgtgagatattataatcacccttcatacagacacaacatcattgttatgtcctatgagattatgggactaaatagacagacacccctcgtagagccaaacaaatccccacatcagggtcatggattgattctaatatcattttgtaatgacgtgcacccaaccgtgtagatattatctgctttgaactcaaaggggccctcaaggctttaaaacttgtccacaagatgaagaggagttcatatttatataatgtcaataattttctcctctatctaatgtgggatatcacaggtaggtccaaatattgatggaatacttgaagagaccttgcactagtgaacaagtcaagtgatatgttgacaaaggagatgaggataccagagaactagtaccaagtgcctaacaaggggcttgtgtctaatagtcatagcagatgggataagctagtaaagaccaagaagacataccttctccttttggtgaagctcctaagctttgtttcacaactgagaaaatgtttacatataatcctttacggaattgagattgactccattgactatgtagctcctcaattttgttaaggatgttgtacacttgtaattgatttttatcttaaccaagttgcacacaagggagtgaaagtaaagaaaggataagagatttttaatgtggttcaaaaatcaatatgattgttatgttcatgaagtatcccaacattcaagaatcaaataatcaaacaaaagaaaaaaaagttacaatagtgaaagcttttccactctcctctcaattacactctgttcttaaaaacaaaccctaaaacataagatggttaaatttctaatagagacaaatttgtcattcaataataataataatgataataataataacattctaaaggcattgcccccttaaaccccttcaaattgatcaaatagcttgctccccatgagttcaatggggaactcatccctcagcatccgaatcgtgacaaaattgtttcaaatttcataatccaacatcatctctatcacattaaattgatccctctttccacatgataaactttacagtagttatttgttacttaattaccacagacccagaagaaattttgggtcgtaattccagcaaaaatatttggataattcccggatcttaggtggacaactagaccctatgcagagtaggcaattagggacagataatgccctaaaaaatcatctttgagatgtagaattaactaatagagcctctcattcaccctttacgtctacacctcacaagatgatggtccttcattgccatgttcaactagttgccacaaaaatttcatcacaatgttcaaagatatgaacagatttttgagactagctaactgacacaagtatttctgagttgtggatataatgagaacaagtggcacaatcaatactcagaataggatgaataaggattttcattagtttgatatgtagttttgagttgtctttcatgtggaaaaaaaattgatgagatgctttatctatacactatgataaaacttattatttattacttaataattgaaattgactttaaattaaattatttttaaaaattattatttattttttacattaagtatcgaggttataaggtaaaattaatttaaaattttattttaagttattaaattgatatatttacctcattagttataattaatggttattattgaacattttaattaatatttattttcattaacctttaataataaatttatttattaaacatccatatttaaagtattgtaaatttataaaataatcttaaaatatttatatttattataaaaaaataagtcatgattgtcaagtgatagttgctaaatatattttcattgaatgtaggctaataggacaaaaaaaaaattgggattaaaaataagttaactattttgacataatacttaaaatcatttttaatttaaagttgagatattaagttattttaccaaacatgtttaatctacttaataacttaattcattaagtggatttaccaaatgccctctaagtgaatatttggtaaaatttaatactttaatgagatgcttttatcccatctctggagagttttaaaagggattgtagacaaactatttgctaaatcaatttaataacttaataatatgactttataatctaatttaagttattaagtagagtgaaataacttaaaattacttttaactttttgtattaagtcaaaataatgaatttatttttaatttcaaatcttttttactttatttatccacactaatgagaatatattttagaattataattttatatttatgacattttttaataaaaatatggatgcattatatataaatttattacttaaaattaataacaataaatatgaattaaaattaataagacaaaatattaattaaaattaatagggttatatatgtcaatttggtgattaagattaaatggtaaattaattttatcaaataaccttaatacttaaaagtaaaaaataaataataagttttaaatataagttaaaataaacttaaaatcaataaatattaaacattaaatcatcttaccaaacaccctcttagaggtccacatgcatattgatacgtaatcatccctgttttaaaaaaagggtgaatttagttttatagattttgccactacgtatgcatgtccatgcctgggttccatagcaagaattccatactagcacaaaagagttggtagcttagttgataagagccgagcttagaaataccagcaaactgatcaacaagggacttagtttttgacagttacagaggatgggctaaaccatgcagaaagcaagaagacaacatgataagcgatatcattggaatggtagcagctaagaaaaaaatggccaaaataattctaagaagaaaaactgacatgattccaaccccaatgagaaggaaaaagaaacaagaagaattcagtagctttctag

SEQ ID NO: 13562 - DNA, 6432 bp, Vitis vinifera
  Intron number 4 from transcript GSVIVT01013634001 (locus G SVIVG01013634001) derived from phytozome v7.0 (chr-ID chrU n; pos 1993918 to 2000349 reverse strand)
atttccaccaattcaaaaaggagaacagctaaaaggtaaattaaatatctgtggcctgttggaacttcacactatcttgggtcatgaataaatcatgattcatttagttgttctggttataaaagatgtttcaactgtttttggcccctgaagcgggttgacaaggggtggattagggataacgtaggtgtcaggttcaattccatgtacagaataaacaaaaaataaataactaaaataaaaaataaaaaaggactataaaaacagatgcctctagctttttttggtccaacaatcctagcatgcaaagttttattagaatccatttcttcattgaagtctcccttgaattctccttttggttctatctttcaagcaactctatcatccatttaagcaattcaggtttaaaatttgaaacatctttcatgagtgtagtctgcatttttcaataaattgattgacaagttgggaacctcatgtatctcatgctcgtgcctgtgcctgtgcatttctggtgctaggaacaccatagttatttttcctttctttttctacaggctgaagtatatgtttagggattgtcactgttaggttcagacaataagcttgaatgcataatttttgtcatttctatgaacttgcatgcatagttaatcatttctcatgtgaaaatttgcatttaaattcatgtaaaagaatcactcaaaacctcattcagttttgttaaatcataattatattacacctttctttgatcctaacttatcctgatatagaattagttaagctctagaatgcattactaacactccccctcaagctggggcataaatgtccatcatgtgaagcttgtcactcaatctagtgaagtcatccttcttaagggccttggtgaacatatcagcaacctggtcctttgaaggtgtaaatggagtacaaatctttttactggtgacaacatttcttgcaaagtgacaatcaacttcaatatgctttgtctgttcgtggaagacaaaattactcgcaatatgaattgctgcttgattatcacaatgcataggaataagatctgtatatgtgatactgaaatgttcaagaagtgccttcaaccatatcagttcacatgtggtatgagccatggcacgatattcagcttcagcactagacttagacacaactgtctgcttcttgctcttccaagttactagattacctcttacaaaagtacaataacctgatgtggattttctatcccctttgtcaccaacgtaattggcatttgaaaaaccaactaaattcatatgtttgttctttttgaaccacaacccttttcctagatatttttttttaatatatctcaaaatattataagtagcctcccaatgacacttcttaggtttttccataaactggctaattagtcccacgacatgcacaatatctggtctagtcactattagataaataagcttcccaacaagttgtccgtactgtgcattgtcctcaaagtcttcattctccttccacaagtctaggataggttccattggaacatttgctagttttgcccctaataggcttgtttcttgtagaagatcagtcgcatactttctttgagatagcactacaccctgtttaccacgagcaacctcagtaccaagaaaatacctcaaattaccaaggtcttttgtaacaaatttttgttgtaagtatttcttggtttcttcaatgctagtcacatcactacttaacaagagtatttcattaacatacacaataagtaccacaatgccagatgagctatgtcgcacaaagactgaatgatcagcttgacttcgcataaatcctgccacaaaaactacttggctgaatttgtcaaaccaagctctaagactctgcttcaaaccataaatagccttctttagtttacacaccaaatgagtctccccctgagcaacaaatccaggtggttgctccatataaacctcctcagtcagatctccataaagaaatgcgtttttttatatctagttgatacatcggccaatcttcattgactgccacagatataagtacacgaacagaacttagccgagcaacaggagagaaagtttcaaaaaagtcaataccctgtgtttgtgtgtaccctttggcaaccaaccatgctttatacctctcaatagaaccattgggactctacatgcaactgaatgaaccccctcaagtaatggcaccaaatcccatgtgcctctaataagaagagctgacatctcctcatccatagcctttttccaattatgattctaaataatatcttggtaatacttaggaatagatatagatgacaaagacaaagcaaaacgacaaaaagaagaactaagatgatcaaaggaaacaacactagcaatggaatgctgagtacaagagcgtttaccttttcgaagagcaattggcaaatcagtagaatcaccagtagaatacattggagaaggagatggctctggagcacaaggggtttgcaaagcttttcgcctagtgtaaacctataagggttttgaaggtggaagagatgtatacataggagtaggaagagggaaagacattttgttagtagaaactttgaaaaacgattcagactcaaagaaggtgacatctgcagaaacaagtctctttttagccaccagatcataacacttgtaccctttttgagtttgagaataccctaagaaaatacatcgaatacctctaggagaaatcttattcataccagtctcaaaaagatgagcaaagcacacacacccaaaaatatgaggaagaggaaaaagcggagggtcaggaaaaagacatttaaaaggaatgtcacctccaagagtagaagatggcatcctattaataagaaatcctacagtgagtacaacatcatgccaaaaagatttgggcacagtcatttgaggcataatggtgcgagcaacctcaagaagatgtctgtttttacgctctgccagatttcatatattctaaagcattatcagatcttcacacaaatattagaagaaaattgagtctttatttcactatgaaaggtttgaaatacatcaagaacagatgatctatcttttaacaagtaaatccatgtcatcctagaatgatcatccacaaaggtaataaaatacctataacctgacatggtagaataatgacaaggatcccacacatctgaatgcactaaatcaaaaggatgtaaacttcgactttctttagaaggaaaagacactgtgatgttttccttattgacacacatcacaatttatttcagaaacactcactaaaagacaacttgtttttagagaaaggttaggatgacccaactgacaatgccaataataaggagacacacccccagcagcagtagcaacaaacaaagaatcatgagtaaggtattagactccccctaactcagagtcatgtccaatcactgtattcgtatggagaccctgaaaaatacaatgagtaggaaagaaagtcatggaacaattcaaagattttgtaatttgattaacagaaagaagattaaatgacaattttgggacatgtaagacttggttaagttcaagagatgaagtatgaatagtaccaaaaccagacacattagaaacaaaaccatcagcaacagtaataggtgaaagagactgacaaggtgtaaagttgttgaattgatgctggtcgccagtcacatgatttgatgcacctgaatctattaaccaagaattatgagagaaggcaacaagtgccccagtacctaactggagggcatgggaggcaatagaacttggttgagagtgaagcaacctatcgtactcctccttagagatctgaataacatcctcaggaacaactggagaagaagtagatccattagaagcaattgtaacagctactgctttagggatattggacaacatagcacctttggaagcccaatcgggcttaccatgcttatcccaacatcaatccacagtgtgcccttgtttaccacaaaactcacataacctatcacgatttttgctccttccagtgtcacccacacggccacatgcagccatggcagaatgctcaagatccacaccaggggaggacaaggttagagaaacagattgtaggcgagagaaagcagactgaagagtagacatggtactgtccccaagcaattgactcctatgagtgttacactgctcatttagattcattaaaaaaccacatacgaataggttttcccattgatgcttctgagtctctaaatctgtagaaagaggtagaagcttgcgaaattcattgataatccctctataggcagcaaagaattctggaagggacctctcaccttgtttattatcaacaagttgttgaaacaaagagaatgtatgagaattattaccatcattagaaaacatctctttgatcgcatcccacatctctttagcagttgatgccagaccaacagaggcagcaatctcaggttccaaggaattcaacatccatgtcttcactgcacagtcagattgatgccatgctgcatacttggaatccttaggatccaacattttatcaacaagatgatggtcacgaccttgggaacccaggaaagtacaaaatgcttgggaccaaagagcataatttcttccattaaacttcattgttgtaccaatagaaactcacagatctgaagtagacatgttatccatcatcttgaatcacaaatacaattaccacaaggcacacaacctcaaacacagaggcacaaagtgatcaatcacacaagagggcattgatctaccctcacaacaaacaaactaggagtgaaaaaggaaaagaaaggatcaccaagacaaagaggtggctagggttggagttgaaccttctctgataccatgtttagaatagtgaaacacaacagaaaatttactcatatattctgttggttatcattttaggttacatcctagctgatatatacatgtacaagagtcctatattaggaggttaactatacaaagataattactataaatcagcctataaagaaagcactaatactgcaagcctaacatatcctgatatagaattagttaagctctagaattcattactaatagatgtgttctccccacccggtcttctcagcctcctattggattggtctttagagagaaacgagaagccatcgcattttctacataaaatctgaagctttaaaattctcatcttaatacatattgacattgtatttaatgtgattatagttagaagtaaaagcttgtgagattagggtttagactaggaaaaggaagaggataaagaagtgtaaaatggtttaggtttgtccaacttgactagacttttccttctcacctatttatgttattaatagaattacaaaaatacctcaaataactaatacctaataaatatctcttaacaaaacataacaagataaaataaactcttaacacttccccttaagtaggagcttagaaattaaacatgcctcgcttggaacacaatctatgaaaggtattacgagtgaatcacagttggtcatccaattgaatatatgtgagtgaatgacagtttatcatctgattgaatataaggagtaatgatttgctattgcattaacacaactcaaatgaaatgacaatcaacttctttatgctttggtacacttgtgaaagaggattatttgcagtaaagatagtagcttggttggatcttgttgacaacagtggtggaagtcttcaacagtaaagtgaactaaatagcatactccagcacaaagctctttctctctctcattgtattgagacagggttcccactttgttaggattggagagaaaccagtccttgaccaggagttagttcgccgccaaccaatcacattcaaaaagttgttcccaaacacgaacactagcatgttacatatttgtatcaaggtcttgctgtgtgctattgtagatatgtctactctctctgtgtgtgctaggatggtccttgacttggagttggtaaatcagtccttgaccaggagttagttccctgacaaccaaccacatgcaaaaaattgtatgctagatacatttatcaaggtcttgctgtgtgctattgagtatatggccagaggcttaccatttattattgttgttttcattttatttacatggtcatgttcaccaattttccctatttttagcaaatctagtggaaagtgggtgtggtgccatttttcaagtgatgagatgacatgatagagttaattctgtaaattcataattagagaacatgatgagatgacatgctacggggttagtgtttggatttggactcttatctttcgtttatttgttaatttctttcattgtgtatatagatc

SEQ ID NO: 13563 - DNA, 11923 bp, Vitis vinifera
  Intron number 3 from transcript GSVIVT01028444001 (locus G SVIVG01028444001) derived from phytozome v7.0 (chr-ID chr7 ; pos 7641272 to 7653194 reverse strand)
cagcaacagtttgtcgagttctctcccttgaaagtgtaatgtttttcactctagcatcataggcttgtcttcaattcagtagtatctgtttctttcatctgctctaagtagttctctattaatgaagttcttatcatcataagtaatatcacttgttttatcgtgatcaatttggttaatcatatatttttaggattaactaaatcttgttcaaaggggaacttcataagaaataaaatatggcaacttatacataattgttagaaaaaaaaaagtaagcacaaactataactataattaaattctcatcatgctttctaatttcatcaaagatctatatatatgtgtgtgtgtgtgtgtgtatttgatagaaaatacaagggagtgtattaataaagccttggaaagagtgcaaaaaagtacacacaatgaatacaataagtgccaaaaggaaaaaaaaagtaaagagaaaacaaaaaacaacctccctccccttacatcaagcacaaccaatcaacaaagtctataatgtacaaaaattgatcctatatatacaaattaatccattccaaaaaaatagtcataataaaatgtttaatcttttaacttgaatgttcaacattctcaaacaaccttctgtttcttttcgtgcagagagtctaaaacaaacataaaagggtgatctccccaaatttattttgtttctccctgacaaaagaaccaagtcaacttagaagattctctgtaattgtggaatgcatcacccatatcacactaaatagagagaagatcaattatcacaacatgcttgctttgatatatatatatatatatatatatatatatatatatatatatatatatatatatatagagagagagagagagagagagagagagagagagagagagaggagggaggaaaagataaataccgaaaagtatgaggcataatacttaacctttcttcatgaatatgataggttaatatgactttaataagaaatgagaaacaattatgaatcatgaaataaaataatggatattacctaaatcgttaaagcctaatttttttaagaaggcttgaaatgccatgttgatggtattagttccaaagaaaaagggagcaaaggaattgaaaaactttagacccattagcttgtgagatgggttgtgaagctcatagcaaaaatcttgattaataggctaaaaaaagtggtgggaaaagtggtcttagtttatcagcatgcctttctagaggctaaataaacatgagaggtacttcttagagcaaatgaggccataggtttgaggatgaagagtgctactagtggggttatttgtaaactgaatattaaagtgtgtgatcaagtcaattggggtttcttgcttttgtgttaggataaatggattttgttagaagtggttaaatagattaaatggtgatatccttagttagattccctttctagtcaatggatcccaattagctttgttcaaagttctagggttttgaagtaaggatcctctctttccttacttattcattatcacaatggaggcactcacttgtattgtgaagtgggctagggagtggtgcttatttttagggttctaaggtgggagaaaaaggtgaccaagggatggaggtgtcctatcacttgtttgctagtgatacccttagactatgtttggttagttggatatgataagataagaaatatacattctaagatgttatttccaatagaatctaatatctttgaatattatatccaacagaaatggtaaccttaggctatgttgtaagataagaaaaaatgagaattgtgggttgagtagttggtagcactcaagtgtataactcaatttctatgccaataatattttgaggcactaaaagaactagtaatggaatatttacttgatctgaccaaggagcatgattcgctaggtttatttagtgaggtgaagaaactccgaaggctttcaatttcttcctttttgagtccctcaaactccaagttgtttgaattctcatggtttgatttctactccaaaagtgtcatattggcttggcctccttgttgtcataactgctactggttctagtttccactattcttgctgaggaatcatggtttccaatgtaactgtaattcaacaaaggtatttggagaaattactgtatgtttattagaagaataatacacatatatatacaattgagagtcctaaattaggaaggtattatccctaagaatcagcctacaagaaaggaaacaacttaattatggtaagtacaaatatatacaacttaattatggtaagtataaatatatacagttaacactccccctcaagctggagcatagatgttgatcatgcccagcttgttacaaaagtactcaactcgagttccatttagagcttttgtaaaaatattcccaagttgctctccagtcttcacatagccaatagagactagattttcctcaatcttttcacgaatgaagtgacaatcaatctcaatgtgtttggttctttcatgatagactgggttcgcagcaatatgaaaagcggcttgattgtcacaccaaagcttcgctggcattgtgcacttcattcccacttcacataagggttgatgtatccatatgatttcacaagtagcctgtgccatgcccctatactcagattctgcactcgaatgggatacaacactttgtttcttacttttccaagccactagattcccaccaaagaacacacaataacctgtagtggatcttctatcaaacttagaacctgcctaatccgcatcagaaaaacactcaatgcgagtgtatccctgagtactgtatagtatgcctagactaggagccgtctttagatagcacaaaatctgctctaaagctgcccaatgctttattgtaggcgcagatgtgaactgactaacaacacttactgcatatgcaatatctggtcacgtcacggtgagataattcagcttcccaaccactctccgatacctctcagggttgtagaagggatctccatcatttggcataagctgtacattaggaaccatcggggtagtacatggctttgcttctatcttaccagtctcttcaagcagatcaagcacatacttcctctgtgataagaacatccctttcttgctccttgatacttctattcccaggaaatactttagttcacccaagtcctttgtatgagacttggaatgcatgaatgccttaagatcagagattcctgcatgatcatttcttgtaataactatatcatttacataaacgacaagaagtatgataccagcagttgattttgtgaaaccaaggtttggttaatcttgattttgatgataacaaaacaaggtttagaactaatgactatattttaagtgtgattaggcaagatgacttctaaagtggcaatccaaagacaaatcaagccaaggagaaatcatgaagaagaagaccacctcaaagagaagagtttttcaagaccaaagcttcttaagtctctttgtaaggttgttggtgcactaggatttccatgcattattttccttacttatgcacctaaatcatccaagaattattttgttttaaatatttttaaaattggatgatttcatgttttcaactaaaaccttgtgttaaatgttgtttcaaacttgtttaaaaggttataagttggaaaagttggttgttgagcaaaaaacggctcaattggctaaatcgagtgaaccggatgaacagtaaccggttgacccccagctcaaccggttgaaccggatgaacagtaaccggtcgaccgttcgaaaatgcaaaaattttctctttcttccagaacggttgttcaaccggtcaaggtcgaacctcgtccggtcgaggtccggtcaaggtccggtcgagacccggtcgaggcccaacggtctcctgccaagcattaaatgctaacggctagtcaaacggtcgacccccatctcgaccggtcgaaccccaaacggctagtttggcttttttcttctataaaaaggctccaatcttcattgtttaaagagcttaaccttcccaaatcattcttgattatatttgagccttggaagagtgtttttgagtgcaccattatttcataacttgcatatctttagtgcaccattcaatcctagcttttcttgtatcatttgagcttaaagttcttgtgctaggatttttgtaaacctttgagatcattatttgtaaaccttgagaggaagtttcaagagagggatatctcttgagaattgtaaagggtgcttggagccaaaagtccaagagggtgaattggaaccataatccaattgtaagaagattggaagcttggttgaagcttcaagctagtggaaccctcactcggttaggaggttgaggagagtggatgtaggccgggttgcgccgaaccactataactctcgtgtttgcactctctcttcgctaactcttttaatttatatgcaattgtctttattttgcttatcatatacttgcatataaattgtctcttatttttacttagtttaaattagaaaaagagaccatcaccctattcaccccccctctagggtgattatcataggttggattagcctcaaattcctaacagatttcttatagaaaacgaaatgatctttcttgctcttgttcatgccaaatgttgaatctccttactgaattttccaaaccaagcacggggactctgcttcaatccatagagagctttttctagacaacaaaccttcccatacaccccctgagcaacaaacccaggaggttgctccatatagacttcttcttttaaatcaccatgaagaaaaacattcttgatgtctaactgatgtatcatccactgttgggaagcggcaatagaaataaatagtcgaactgaattcagtttggcaactggaaagaaagtatcagaatagtctactccacatgtctgagcatatcctctagccacaagcctgactttcagtcttgtcacagagccatcaggattaacttttaccgcaaaaacccacttgcagccaacaactttctttccttgaggcaaatcaacaagtttccatgtatgattatcctccaatgcacgaatttattaaagcattgcattcttccaaccaggatgatttagggcctctgtaacagttttaggtgttaaaatagaatctatagaggctacaaaaacacttgaggaagatgacaggtgatcataagacacaaagttagcaatggaataggtagatttgcattgtcatttaccttttcgaaggctaatgggaaggtcgagatcactggaaggatcagatgacgaaggagctggtgcaggacatgtatctgttgtcactgggcgccaagagtacatctgtacaattggtggtttgactggagtaggaggaacatcaacaacagtacccaaatgagcaagagacgcatcaaaatcaaccatacttgattgtccaacagttggtcttgaattaaccacttgatacacaagccattcttcatcctcctcctcacttgcagaacttgtgggtgaagagaaaaatgatgtgtcttttgaaaacacaacatccgttgatactagatacttattgagatcagtcgagaaacatctatagcccttttgcagtcttgagtaccccaagaaaacacactttaacgctttaggatcaagtttagtaacagaaggccttgtatctctaacatagcatgtacatcaaaaaaattcttggttcaattggaaagagtgatttctatggatgtattactttgtacagaatatcacctttaagcactacaatgggcatacgattgatcagaaaacaagctgtagaaactgcatcagcccaaaattgttttggaaccttcatctaaaacatgagtgcacgagccgtctcaagtaaatgcctattttttctttcagcaaccccattttgagagggagtatcaacacaagatgtttgatgaagaatcccattgtgactcatgtagttttgaaatgagttagacacattcttttccattatcacttcttaatattttcacagacacatcatattgggttttaatctcagcagagaatgcacaaaaatgtgaaaattcttttgaacgattcttcttaaaataaatccaagtcattcgagaaaaatcatccacaaaggtaacaaaatatcaaaacccagttttagaaataacaggacaaggaccccaaacatcataatgtattaactcaaacaaagactcattctgtttattaatccttgggcctaaagaactacgatgatgcttcgcaaaatgacatgactcacaatctaatgaaagtaaattatcaaacgaggacataatttcttcaacaccggtagagaaggatgtcctaactgacaatgagcttcaacaggagaggtagtactgacacacacaactggtcgaggtacccactcatcaagaatatagagcccatcagatacatgtcctttaccaaatgtccgtttcgtcataagatcctgaaacacagaataatcagggaaaaatgagacactacaattcagatttttggtaagtttactgacaaagattaagttaaaggccaaatttggtaagtttaacacagaaaataaagtaatagaagatgttggtttcacagtcccagaccctttaatctcataagtagaaccatcaatgacagtaataggaggagtagaatgtgttctgaaggtagagaaagttttatgattacctgtcatatgatctgtggcacctaaatcaattatccatttgtttgaggaggagacaagacatgttttacctaactttgccagagcactaacaggagtagatgcttttagtgcttcctgatactgtgaatatttagcaaactcttctgttgtcattgtgacaatcttatctgaggagtctgaagatgtagcagtatcagatgtagcaacattggcagtttgatttctccgattccgattctgcaatttcttgcagttcttcttggcatggccagcctcatggcagtaaaaacgcacaatggtacttgaatcattgccacgattttcaaatgccctgtttccgcccttgttattcaccctccttgcattctctgcatttcctccttttgcagcaagaacattggtgtgctgagaagacgggacattctcagttcgtagaactctactgaacacttcctgaagggaaccaatgtcagaactagaaagaatatgagattttgcagtctcaaactctgatgggagaccggataagaaactcataacaaccatctgttccttttgagcttgttgtactctaacatccggactgaaaggcataagtgcattcaattcctcatataccttcttgaagtccataaagtatgcagtgagggatttagctcccttcttaggacaatggaaggcattccatacatcatacatccgagatacatttccttttccaaagtaaagaaaatctagataatccattagctctttaacaaattcacaatgactcagcagaccaacaatatcactattaatagagtttttaatctgcagaaataaccgtgcatcatcttgcatccaaagttttctagtgttgtcattaggaggttcctcagtcaagtggtcatctttagcaacacttctcagataaaatttgatcgtcttgctccattcaatataattagacccatttaatttgtgtttagttatttttgacacaacaggcactatatcaggaatagaattcttattctcttccatgggaataaaattcaatctccaaagtaattttacacccagataagagcagcctagaccaaaaattgcaattcaccatagcaagaagaaagaaagagaaaagtacctcttgtagaccaaacataaatagtaatagaaacacctgaaatcccaagaacagaatctcacaatccaagaacgagatcaccgcaccacacattggccggaaaacgggattgcgacgccaatggaactagttggaggtcaaaagaagctaccacgctcctccacgcaccggcgtgtgagttgaggcgtcctatttctcagggcgtgtgagcttcacgggttagcttctggtcgctggacttcgggtaccggccgatcctgacatcacgcttcctcctccaaaggcagtgacactaccaggtcacttttattctgtgacccaagaagaacagaaaatggtagaatgtcactggaaattagtgactcagaaataacaaacccagaatttgagccaaaggctatgataccatgtaattcaacaaaggtatttggagaaattattgtatgtttattagaagaataatacacatatatatacaatatagagtcctaaattaggaaggtattatccctaagaatcaacctacaagaaaggaaacaacttaattatggtaagtacaaatatatacaacttaattatggtaagtacagatatatatagctaacagtaacttttagcacatctcttttgtatgtcttgatttcttgcattgagtacaccaagggttatctttattacttggctgcttggatacccctcctctactagaatttgtgctagggagtagaccactttgagatcctaaaacagcaagggtagatctttcatttgctagaatgtccaatgttatgctccttttcctttcttcagcctttctgatttagaatacatcattaaggatgctaatggttctgtcctaagtatttaaatacatacttgatcatattccacagtaagtcaagtcaagaatttgaatatttgctctctttcaataagcttaagaagtgtagcagcatcctcactatccttcattataagattttgataatagtccagttcaaacataatcccttcataacattattatactcaattacaaagaaagtaccttgctttgtagatcaaatcttagcctttatcatataaatttgagctacatcttggtctttggaatacatgctccactaattttaagttaaaatgtgtttcataaccaagacatgatcattaaggctacgtttggttggtgggataagataagatatgatatgtatatcctaagatattatatcccattgtataggaaatacatatcctaggatataattttcaatgagatatgatatccttagatatacatatcctatgaaaatgatattttaaggtaatatatctaatagaatatattatatttatatttaatttgcgaaatgaataaaaatataatatggaatatatattattttcaatgtttaaaataaaaaattatattacattccaatattttctattttaaaaaataaaatctcttatatttaacaatattcatgattaaaatatttaaactttataaataaattttgttatattatgttattcaatatataaaaataattcatatatcatatattaatattattttataaatatttttttagtttttattttttagccataaatttaatttataatattttttattttttatttgtaaaatgatatgaaaaaataaattaatgatacatgggatatgcatatcccatgtaaaagggataaaaaaacatggtggataatatatcccactgcttatcctatcccatgtttggttgaacataggataggataagtgataagatgacttatcgtatcccattatcaaccaaacatgggatggtatatagcatctcctcttttatcctatctcatgctatgtccaaccaaccaaacatgacctaaatccttatcctaagcaacaaacttcggattatcttccctcaatactagtctaatcaagtgattaagcttcctttttccctttaagaatgtgcgcacttattaaaaccatatcagatagttttggccattaagtttgaatgagagttgaaggttttgatagtcactggtaagtggttggtttttgaatgtagtgttggaggttggattttttgagattttgatgcagtaaatagtaaaatacatataggttaatggaaaataaagttgttaagaaggaaaagaaaatggtaatgacaataaaggccacttgaggtagaggatagcgacaataaaggccattggaaatcagtagtaaagaagattgctaagaaaaaattagaagagaacttagagaccttgaacctagctatgataccatgtgaaaaaagaatgattttattcatttcatttccaatgaaatgatacaatatttatagtgtacaatcctacaaaattgggaaactaaattacataaagaaagtcaatgaaaacactacccaaaaagttaagaaaaataagacaagaaatatacagatatgcaatcttggaattcaaggaattttacaaccatacaatccaagaaatcaaggaattaattcgttgatattttcaatcaaatcatgaaaattaaagagttaattccttggtatcgtcaatataataacaaattcctacttacatttcaaacatttccaaataatagaatgagaataaatgattttggatattagttcttggaatttataccttaaggtggtcctattcacattatgtgaattaaatgggcctcatgggtggtgcttttggaggttttttacataaaataatttgttctgacatactaccaattaggagaatttatggattgctgtctactctaatgggtaggatgcctcaattgttattcttagagatttgcttggcaatgtccatttcattattagtgatggattgagaaactcatttctaggaaggtttatggcgaggggaccttcctctttctttcatcacccttacctcttatctttctttatctagtacaagaggttccccatatcccttgttttcacatctgcacaataaatccccaaaatggaaactgaattttgggttaaaatgattgactgacatggcaaaacattataaggacatgtttagatatatgcatatattttttattcatataataatacaaaatcaagtatgcatataggtgcatgtttgcatgtttgtatgtttgtgtacacatacatttctatgtatgcttgtgcatatgaatttatgtatttatgtatgctaaatatatatttgtttgtgtacaatataaagctatatttctatttagtatgaaatccccttcctctgatatcatacactttcttattcatagttagattccttctccatattaaaacaaaacaacaggggcctgattaaacaaccaggtcttaacccccagctttatgcctgcaaatagcagtaaaaagtttttcatctggaaacatcctggcattctaagcatgtacattggcatattaaggagtgttgtatgccacaagaatggttcttatttgtaaatatctctgttaattgtcttcaatcacaaccaagaacttggatgtcaagaaagaaaaaagttcttttatgatggtggagctcctttttttttttttttttttaatgataaactatgttaataagtaaaagaatgtggatggtgcttaatctctggccaatatgactagcaaaacttgttatggagagatacaagtaaatttcttatttagaaaaaaaaaaaaaaaaaaatcaatgaacaattctattgcttgtcaattatgtggtgtggtatacatttatgggtaatgcatgaacttctatttttatcattcgcttaagcttttgttacttgtctggaaaatggtttctatacaagtactttgagcatttcgagtttattagctacaaactaatgctatggattgtaatagtgaacatgaatatggcaatttgcttttctaggttttggcattgcttgaaggagtattgctggaaaa

SEQ ID NO: 13564 - DNA, 5122 bp, Vitis vinifera
  Intron number 22 from transcript GSVIVT01008230001 (locus GSVIVG01008230001) derived from phytozome v7.0 (chr-ID chr 17; pos 4405925 to 4411046 reverse strand)
actttcctgagtattttgttcttgaggtaatgcaatgaggtaggatatgtaataagtcagaattgatctagtttctatgttcaatttttcctgtaatgttttagattgagtttaaattctttgttttgttttatttttggttacaaagacattatttgggttactggtagtttaaactgtagatgcttctgaatgcaggttgcacatagtgtagacaatatctggcgaagacctgcaaagcccaaaataaatgggttattgcccaagttgttctcaggcaagcctgagatgaacatgatcacagatgtattagggttgactccatgtggtcctgccctgcttgaattttctgcagttagaatatgcttaggtgcctcttgcccaatcttaatccaattgcactgttattacctacatgattggactcctataattagctactaattaatttagaaactcttgggcatcctttgtgagaatagtttagtacctaatacaggctccaaacatggtcatttcttttcaggggtttggtagaagccccagaaggagggctttgtggggagggttattttggaagccttatgtggtatttggtaaaaaagaaatgcagggtctttgaggatattagaaaaccaacaattaaattgtttaggggctgatttttgtactttttggggtgtcttgggtgctttcttcatcagttaaagatactttgctggattggcatggttcttttgtaggcaaaaagagaaaaaaggtttggaaaagcaagccatttgtgtttgttttggatggtgtagaaggccaggaacaacattgctttttgtaatgatgttttttctattcaaaagctgaaaagggaatttgttttttgtggcctgaatctaagttgtttgtagctttagtaggttttttttgaatggttgggtacttgttgagattgttgaggttctttttgtactcttttggttgagccttggtggcgaagggaggtttattttcttgtacaccttgggccattcttttggcagctctttttctttaatttaattatttatttatcaaaaaaaaattgtttgggaaaatttttgctttctcacttctctttggatgtcagtacactaagtaaattgtttaaggtctttggaagcctttcaagagggaagattctttcgcaggtggttgtattatccttgatatggtttataaaggttagagaggaatgcagggattttcaaggacatatgagatctgtggatgccatttgggatttgatttacatttttctcttccctttgggcctcaaatcaccaaacctttttgtagatgtttctttgtttcttttaatgttgaattggaaaagtgcttgcttctcaaacagtttgaggaagaaagttgtgactggttggtctcctcctctagtaggttcagtaaagttaaaactttgatagacgttccttggtagtaccttgatcaaatgggtatttatatttgctaaagatcaactcttccatttgatttgcctagaatgagttcataatgtgaaatttgaatgagaatgaggatgagaaagggatattaatggcctgtttggcaacattttcgaaaacattttttaaaaaatattttttgagagtagttctcaattgttttcagaaacaaaattcggtttgggaatttcaataagataaacaattttctcagcttattcttcatggaggaactgtgcatttatatgcagtataaaagttcccaaagtattctccaaaatttcaattgtttcttagaatacttcacaaatatacctgaaaagactgtagatttgttttaaaaaactatctatttttaagattaattctcaaaaaactgttttctgttaaaaatttaccaagcttttttctaagttagaaaatttaccaatctttgggattctatttttttccttgcttctctttgggctttttgttccaaggtttttaagggaaccctccttattgtgttacaacttgattggttagcggcgtgtaattccgatgggttggtttagccttgagaagttgttcgttattacagtgtattttcttgttttcggtttcttgtagactagttttctttggtgggaggattcctcatccttctcttgtacttcttttttctattaatatattcctttgtcgtttcctatcaaaaaaaaaataaaaaaattgttttcaagaagagttttcaaacatacctaaacaacccattctcctattcaaaaagatatccaatgcatattgggatcattttggttgtttttttgcatccatttggacatgttatgccactataggtgccgttaaggttccgtgttggtcaaaactgaatgatcctgtggctggtgtgcacatgaaggatcctttgtctggaacacaggtttcaaagctaaaaaggaaacccattgggtttttatgtttctaaacccattttgagggcagtattaagaggggcttattagtggcttcagggctagtggtaggggaagaggtgactgattttctttcacagatgatgccatgctattttgtgaggcttgtgcagagcagctgagatatattaggtgggttctgacttgctttgagctagtgtcagaattgaaaattaatttatctgggtggtggtatgtgaaaggggtggaaagattaactttgtcgcttggttctaaggtggcaactttccttctacatatctagggctgcctttgggccgcttcctttaaatccttctcaggatgggtctagtggaggagccttttaagaagaggttggcttcttggaagagtcaatatttgccaagggaggtagattaacacattaaaagtatgcctttgagcttgccttctttttttcgtttttccatgtcactgatggtcattctgtgggcggtcataagcagattggagaagatttagtctaactgctttcaggggaatcaagcagaggggagaaagctcttcatcttgtgaggtggttaaccgtgtgtttgggtaaaaaggatgcagatttggaaattgaaaggctctttactttaaattgggtattggttgctgatttattgtggagatttggcgaatgagatagataaaatgtggaggaggatcattaggggcatgtttggggagttagatgggggttggagtgctcaggaggcaaatggggcttttgggctgggtctatggaaagccattagaaggtgatggcaggagttgaagaacaagggttctatcttgatggattgtggatttagaacaaggttttgattggatacatggatagggagtgctcccctagaggaagcttttctacctcttaatagtattgcagtggccaagaatgcaagagtggcagatgtatgggtagtggattcgataaaggtcattagaaccactgtttttgtaggccatttcaagattgagagctggagatgatgggttgttttatggagggatggcacctcttgcaagattcatattcttcctagcctcttggataaaaacttgatctgtgatcggcctgcttaagatctgcggccaacctcccctttgctagtaggaaatataggcaagaggttgctcaaacccatgttttttgcttgaaaagggctgacattcattccatgggagtgctagggatggtagtgggcaagatggtttgaggggagtcaaggagggacattttttattaagtcttgttacaattttttgtacactgcaagagtgaatgcctttcttgaaaaagagatgtggggctctaatgcacccaagaagagtcatcaaataacatttttatttattgtgagaaaactaggttggtatgggatctgttattcatgatccttaggtttcagtgggcttttactaggaaagttaaagatctccttctaagtggcaggtgaaaagcttagagaaaaagaaggaaaaaggtgtgaagatttgctctgatttgcttgttttggtgcttgtggaaagagaggaatgggagtttgtttaaagatgattatctaccatatcagagattgaaagagttctttatcgagccattgagagtggtctaaagctcctacagggttggagtcttgctctttgttggaattttttgatgttatcagctaggactattctgttacttctttgtttgctctattcttagcaagaagctttttgtatacttcctatatccagcgctatgtttgcctatattaaaaaaggaaaaaaaaaaaaaaaactatgttgcattccatgatttaatcatcacatactcatagagggagtgagggtggtgaattaactttgcatttgcaaggatttctagggaggaataagtgaatacttaaataactatttgtggaaagcagaagaaaaaacatttgatcacatcttccttcactgtattcctttactgcatatgctcaaaagtagtcatcttgtggaaagtcatttatgctttatttggaatagatcaagtgatgcattcctcattgagagatgcccttttgacctgacatggatttttgttgggaagaagagcatgaactcttgaagtgtaggttatttgtgcttattttggaccatatggggggagaaaaataagagagctttgataattctgaaaaagtggatcgagaaatcaaacaatccttttataactttttggagttggttagagtgtacataggagacaactctttcttcataatggacattgttgagtgagactaagctttaactaaggcgagggtgtcattttttgtgtatccctttatcttgttttggccttttggcatccttgtatctactgcatatgcctttgtgcacctttttgtgagggctgttaatataattgatttttacttcgtgtgagcaagcaaaggaaactgatgttaagctaaaaaagtaatttttgagttgcataataactatgtcaatgtatgcacttgctctcttatatatttctaagtttcttccaacttttttttttttcttttttcctttcacgattagtttaaaagaaatacttcattattcttatagcattttttaaaaccattttagttttattgtttttctttcaggccattccgc

SEQ ID NO: 13565 - DNA, 7111 bp, Vitis vinifera
  Intron number 1 from transcript GSVIVT01037661001 (locus G SVIVG01037661001) derived from phytozome v7.0 (chr-ID chr1 9; pos 6634291 to 6641401)
gactattccgacgtgttgctatctggcatcaccaagtcgaggctcccgcctttcctttcaaaacccaattttctttctcaaccctctttttccctccgtttctttcccgcctcccaaacacacctcttcatatattcccatcttctttctcttcccaaaactctctctctaatttgctttctttctatctgaacctctttctgtctctatactctgtagtacttgctcttcacgatgtaccagaggctccaaagcttctccagatcgtcttcagggagagtcgaaggcttcaacagatacttaaaaccaggtcaactcgcgcaactcagggactccaagatcaatgctagatctcacaagctcacttcacggactggagtcaattcggtcacatcaacccacagtgaaagcgcccagatccagatcttgatgaacgagcatttgccttgtttcacgaagattatcgaggggccgcattgcctaaggaggaagaagcttgtggcctccaaatctgtattccttctgaatttgaatccttctactcctatttcaggccctatcgattctcttatgaatgtgttgggcactgaccttcttgtagctcattgaataaagtagttgaatatgtggaacgggtttcatttgtctgtgtctattacgccattttttcacgtgtgatacgaaagtaaattatagaaatgtgaatctgaagttactaatcttgttactgaacgtggttcaaattctactatttttggttgaattttgttttggtaagttgcattttctttattaagtaatttctgtaacccagttagttctatgaacatcaacttctagtagttcgttgaatatatgaaatgggtttcacttgtttgtctagattcattcctattttgtgatatttgatattgattgtgctgttttgtacgttatgtggaaggattgggagaattaagtatctgaatccaataatcctctgattgatggaaatttaaggtctaccattttcaattgaattctgattggtaggttactcttttctttcagtagttttgtaacttcattaattttgtaaacactggtctttttgttgtttgatggatattgtagtttaaaatgtgaaatggtctctatttgtttgtgtagatttgtttcagttatgacaattcagcttgatggcgctaacttcatgggtcatatgaagtgaattgtaggattatgtactcgagtaacactaacgattgaaacagaggtttgaggactatgatttttattgaattggattttgatatgtcatattttcttttatagctatttttgtaaccatatcaatgttggggccactgatcttgttgtttgttgaataaagtagttgactgtgtggaatccatttcatttgtttgtgtagctttgtttctgcttgtgaggtttgatctttaatccaccttgttttacatgtgttatctggaagtaatcatagaaccatgagtcttaagttaataatctaatgattgacaacatggttcaaggtctatgttttttttttttgttaacttgggtttggcaggtctcattttgctttttaagtaatcttggtaactccatgagcatcatccattgattttgttgttcattgaataaagtagttgaatatgtgaaaagggttcaatttgtttgtgaacaacttattcaatgtattattgcattatgttgatgctttcattgaaggaaatggtaaaattaaaaatgtctaggttttgtttttcttgttttttacttttaaaaatagaaaataatagtaaaaacactttgagacctacttcgaaaagataatgattttcaaaatctgtttaaagaaaattaagacatcagaaaatttttatcatctcaaatttaaaatattttgaaagtaatttttaaagtcataaggtaatttcgtactttttatataagacttattataagttactattattttttatttttaaaaacaaaaataggaaatgtatccaaataagcacttagttaaatgtggtgttttagatctattggtttgtttatttatatatatatatatatatatatatatatatagagagagagagagagagagagagagagagagagagagagagagtaaattattggtttgcattggctaatgaagtacctaaggtaaaatatctttggttagagatgatcaaagcataattgaaaattttccccttttgtatatgtattataagggtttggttaatttcatagatctgattttgattataattagttgacaattaaatagccttcttttcaaatatattaggtattatagagtgtttgatttggcttcatttttttttttaagtgattaaacttttgatatccaaataaaaatgtgatgcctatcacaaataaagccatagattctaggttgaagggctccaaggggctccaaatggctagtctacaattagatatcaggatgacttacaaccacatcaactaggattttctttggcaagtgcttgagaaaatgggttttggtgagaagtggattcgttccttttatccctagttggtgccctttgcatacttgtgtactttgggatgccctttttggttagcgctgtaaataacatatattttttttaattctatcaaagaataaaaaagcaaatgctgtactgattgctgatccctcttaaagtagcatactcattgaacaactttatttgcatgtttttgcttaccaagatgtcattatcacatcttagtgcttctctttttatcacatctgagtgcttctctcttcatggcccaattttttactttcttttaaagccagttaattttgttactttttggccccatttattctaggtccttttgctcaaagctcaacattgcctctaccatcctactttttgatgggattgatgtcattctagttgtctactcaatttgatttggttgatctttgggacttgtagtaaatgaaggtttaataggaaactttgttgcaattttgatgatcatcgtcaatcatttgaaaatcttgcccttattggaatttgtttagtactctaactcattccaagaaattagaggtattatggttttatcttccaatcacattttcaatctacctaagctgatctttttatttatggttatgccaaaattggtgacactctttagtagaatgaatccagctaaactctttgcttgttgataagcttcttttgcttgtatgcccactggctatctaacatatcttgactaattttctaaagattttgactgtcaatatgatcatgtccttagtgttcttaatatcctgttattggatgaataaacttaatccattatttcaatgccacctgaacataatttcataagttcctttccattgatcttctttgacatattaggatagccacctttgtatggcaagtttcagtagagttgatatagaattaagacatggctagaatgtgtagatataggtttaagatttcatattttacaaaatatcttgactggtaatagatctaaacatttcattatgttgttgctatgaaatactactgtttttagttttggatcctccattgaagcattttgcaagggtacacagatcttcgaatccatgatcaatagccttagcaaaactaggtacttgaacttgttcactctgtctaacagctgtttagtacacttgtagtagttccttgaggttccaatttcaaaaatttcagatggtttgtggagttctttctgaatctttagggtttccttgaagaattttacagacatgatgtctgtaagctgcagcagatgacaaaagtgagatgtgtggaaggaccttttcaggtcaatagtatgtggaactaggaaactaggaaactaagaaagtgaagaaacacaagagtgatgtatccatgtggttcttatcatcttaagaaaaggcatgttaagttaataaggttattttgttcaaagggaatttgggaggaatgaatttatggtgtatttgagacttgtattaataattagtgtttactttgtggaattgataaactaggtttgtgcagttaggatgatgaatattagaattagcaacctttgcagaagatcttagtttgggacagtcagtcagtcagattctcaccaaaacctttcatctttaaaacctgttcggggcataagaattcagttgtcaatagatttgaaattgttatcttttgatggttgtggcagtctctttcatgatcttgtagtaaaggaaggcttaatggcaaccttgtagccatgatgctaaattttatcagcattgacattttctctctgtggggattgagaaactcaacagctcgctttctacaaagtgggatcaattgcccatgtcttatttgcctctctccacatgcaagatactccaatagcactggataccaacatcacaactcaatcaaagccctcatcttcaaagatctcattttctaatgcgacaaatgaggagtttgaaaccatgctaagttaggatgcctgagtacgtctcttttagtacagaactttattagttttcttgttttatttcagactctgtagtatctgtaaaggagtatgagccattaaaggcttataaaccccaataatggcttatattactgattttaggttcacattactaagcatattaatcccaataagcatgatgacttctgggacttctgggctcaatcttaatgatgggtgttcatatttattaggtggcccactttatgataataccggactgatggtttggtgggtgacttcatgattctacctgttcaatgtgtcaaatggggatgatttttcccaacccagggtgggtatgccgtatgcataatttccgcgcgtgtcggtcagataatagaaggcccccacatggcacaatgttgcggccgccactcttctgattgtacctgtccataaacagccaaaggaatcaactcagggaatgaatctagccgacgtaccaatgaaaaaataaaaatatttaaaacactctgcaagattctcgtcttttctctcaagtaatctcagagggttaaatgggttgggcaacacaatttgctatcgtttgtctctactgttgctagttagccaaatacattgaatgacggctaccagaatgcagcatgtgggtcacattcgcataaaaaccaatgaaagtgacgatgtcactttcaaaggacaatcttatttcatgccgattcattattttactttgtaaatcccttctttcattgcaaaagtttcctcagaactttgaaaattttcggcaagttgtattgggattcctactttccattatcatcttgaccttttcttttctttttttattttttccccctggttgtcttgatctgcttggttttggacttatatcatatggttcacgtgcaatgcaacttcgctgttgaatgatatacgcatatactacaaatgtagacgccttctcttaccttcttggcttcaactaactgtatatacctgtatctagagattataatacattctcatacttgtatttgtcgtctttttttgtttttcatctatagcttcttacagtattgttatagtttggtgacccgaatttttttgggataattgtgttttggatccagctggacccaaaaaattaagttttagcccatataagttgcataattgatgaaaaggatatgaaatatgaaaagaccaatatattctttaaaaccattttctatcataatatttgacaaacttttttatcttaattttttttaataattattctgaaaatttattattttttaaaaactaatttttttttaaatatatcatttaaaaaaaaataaatttgacatatttttagttattttttatatacacaattttaaatatatatatatatttttcaagatgtttgatttttaaataataataataataatttatttttatttttttggaaaagggtgtatttttttccaaatcattaaattatattaaattttattgaggtttacaaaaggaataaaatttaaattaatgcttttcttttctttctttttttcatagtgagtaaatgtcatttttgaaaagataacaaattcatatccttctcaattttcatattttctctaggtcttggacttaaatggtgaatttatatggatcaaagcttaattttgggtccaattgggtccaaaagacaattatcccaattttttttgtctaacttgaaaagtttgtggtgtgacatatgtactgaaaaacttataggttttttgggttatgcaataaccacttgatacacttcctttttataccaattttcttttcatctgcctgtgatgtttcccgtttgggattttctacgtaaatctatgtgttcctattttcttgttgcctattacgtatttaagagcataaggaaggttaaatactagttgcccaaacctatatcattctctatatgattcgatttatatttcactctctaaaggaggtctaataatgcacaccatgggatccgccgtctcagatttataatgttatttgatttccttcaacgcacgttcaagttgaaaagcgaaccattaaataacattatgccatagttgtgcatcgcgctgtccccagtggacatcctgaggtgggttaagaaagaaagaaaacaaataaaaaaggaagagtgtttgccattaaaaatgcacaaaaggaacctagttaatataatatgataaaaaagagcatcaagtcctattaagctaacagccataggtatagctgcatttttctagttctaggttcagggaattgagatctgaagctcatttctgttttccttttgggttgtgtgtagagatcattttttggtagatgtttgggaagtcagtaaaaatagaacagctactgcccttccacttgtgcccaccttctgcctttccctgtcaaaggtggaacttttataggggaccaaaagtgagatacatcacttggaaatttttgactacaaagagggcggtgtgtgttatgagctgtcctcctctgttcttcagaattctcaccattg

SEQ ID NO: 13566 - DNA, 12958 bp, Vitis vinifera
  Intron number 6 from transcript GSVIVT01033131001 (locus G SVIVG01033131001) derived from phytozome v7.0 (chr-ID chr4 ; pos 8153919 to 8166876)
ttgctaatataaatcacgagcaaacaagaccgcttgtaattgaatgactgatcgatcaattcgtttttcctgtgttatttatgccgatggcaccattaaccacaaatatgaatttcaaaaaaagaaaaaaaaaagaaaaaacaaaaatgtagttgtgctatagccataggcatttcagttaaatgccatctatttgctatgaacaataattcatcactaagaaattattttgctatgaaataaatgttattgcaaaaagtcattgcttaccataaaaatattgtcttagctaaaagcgttataaaaaatggagaaatttgttgtaatgaattttccaaaagcttgccagccggattagtttaatccaagatgggattgaaaaggatgatcgaagtggaacagactggaccttccgtttatggtaggactaggacagggaggtccagttttcaaaccatggcagatatgacgcataacattgttataaaatctatatcaaccaatggttcctacattttttacaggacatagatgacccgttactcagccattacttgcacatgctttttcatttttctctctttttttttttttttttgacttttttaaatgaaaatcaaatttaaccttcccacattgataattgccttaaattccgtcaaattcacgaatttattgccgcctaacacaacagctcaacttcctgtgccttatcggcataaaaataaataaataaagattgtccttgcactacatggttgacattgcttcgccacacccaagatcgtttatatatatatatatatatatatatatatatatatatatatatatatatatatatggagttttaaaactacccacaactgccactattaaaataaaatttaaaaaaacataattcctaattttttttaaaaaaaaaaaggataaaaatgattctggatactgttccaaataataataaaataaaataaaaaaggaaaaggataagagccatatggaaaataggtgcaaagtgcacccacctctgtaggaacttttggactcaattgaaatggacaaaaataaataaataaataaaataaaaaatggaaaagatgagtggaatagaggagccacaattttctagttatggtttcaaaaaagcccttttccaagacaaataaagtggaatattattctaagatttttttttttaagtaataataatacagaaaagttaaatatgttttaatctacttattaacatcaaagttgaattactcttgttactttttgaaataataataaatgagtatcttctcgaattttttttttgaagtaacaataatacaaaaaatttaaatatgttttaatctacttattaacatcaaagttgaattactcttgttggttagaacttctcttatgctcacttgaagcccaaattcaagttttgatgccctcctttgtattacaagtatctgttactcataaaaaaaaataataataaatgagtatcatgccctcatttgtattacaagattaaaaaaatgagggtcttaaataaaataataataataaatgcgtatcatgccctcattcttattacaagatttaaaaaatgagggtcttaaatatgagtatctattactcattgaaaaaaaataaaaagagatgagggattgtccatgaagaggcttgatcctttgactataggtataagagtcttgtactctaccacctaagctagatgttttttgttttcataaaagactggttattgaaaacaacatctagagttatggaagacattgtgcataatcctaatattgttgtttcttttagttttaagagtgaagattagttctttttctacatgttacttttttatgttttgtacatgaaatgtaaatatcttatatgcaagatatgacatgaatatttattgtttgataaacgagtatgtcttttatttacatgcatgtcttcagttcttttttatatgttattgatacatgaaagttgtataatatttttttatggagtggaaggttttaggctaaaaaaaattaattaacttcttgcctaaaattagaaatacttgcatagattgtttctaatttgtaataattaaaattgtatatgggagttaattaagaacatagtgaactttcgtttctattgcaatttaaggttattacatattagaagatgattagagcaagtaaaagtatcaatatccctaaaagtactaattaataaaattatgcaatatctctaagtagttgaatatattgactacaattaggaacatcatagcaaaattaaataaggatgagaaactaaatggcgataactatgaggtttgacatcacaaagttcagtatatccttatagagcaagaggctcttgaaatactgaatcatgtcatgtaagaccctaaataaggaaactctgctcaatatagaaaagatcaagaggcttatatggcttagaagaaatagagttgtcttcctctcaaatcataatatcatattatattttattattatattaaaaaaaaatcttataaacaaggttttgtaccgtgtttgattgctgacagtagagtagaaatttattcattcatttaaatgcttgttgatcgtttgagcctacctactcttgaacttagttgtagacctcttaaaaaatgaagaagtggaagccacaatagggtcgagatcattgacgtaggccaacttcatgatcaaccttggaagcaaagctcgagtgtccatcatttcattttcttcaacaagtccctttctttctccgcttcagagtcaatattttatccaagctaccctatatgactcaactcaagtaccggtaataagggcattagtctaggcctttggatggagagaagttgtgcttatctatgaggacaacgagtatgggaatggagttatactatctctgactattgccatgcaggaggtggacacacatgtgacttatcgaagcttcattcatccgttggcaactaatgatcaaatcgttaaagaactttacaagttaatgatgatgtcaactagggtttccattatgcatatgcttaagcctcttggctcccaacttttacctaagcaaatgaggttggaatgatggaaaaaggctatgtttggatactaactgatgggataactaacttcttgagtaccttggatgattcagccattgattcgatgcaaggggtgttgggtgtcatgtgacgccccaagacccactccaagggctgacggtcattttacacctcaaacccgaaggcttacagtgtaacctaacccaaacaattatcttgtaattggaagttaccaattaccaaatatctgttcagagtagtggaacaaaatctaaaatcctcaaaattcaatttcaaaactaaaacattcactatccaaaatccattgtccaaatatttgcaaacttaaacaattcaagtactaaaacaaatttcaaaatctccaacactcaactttgatctaacataaaatttgaaggatcaatatccaaataacttccaaataccaaggatccaaatgaacataactaacagttaaacaaaatccaacataaaatcctaagtcaaatcctaatgatgaccattcctcagcctagccatcactcctcacccgaactaaggatacctgaaaatttttcaacaattgggaatgagctcacaacccaataaggaatattaatgcagttcatggatcaaatattttcatttcaaataggagatatcatttttttttctcatcaaatatcagagtttcaaaaataccaatatattcaaaattcaaccaaccattttcatatcaaattcaaacactttcacataagattcaatcaaatccattcaattttcattactctggttatcaaatatcaaatgcccagttaggtgggacttttcaaatgggtggctagcctcaaattgttcctggtggacggaaccaagcactactagtactagtaacctctaaccaaacccctagaggctggggtccaaatcaattacattcccaccatgaaatgtaaaggtcaactattatatcccgttaacatggccgaatagtcaactattatatcccgttgacaagggccaaataaactagagtgatgtttttgttcaagtattcaaatttacacaacataatatctccatattttgtgtcataaataaaacaaaatattccaacataatatttagtgcaaaacagtttgatccatgcatggtaacaaaatatcattttcttttccacaattcaaaataacatataaaataatttaaattttataaatattgcattaacttcccttacctcaaaagaagtccttgaaagcttgagagaagaataattctgaaaaaaaaatctactcttcacctaatataacataagagaaacaattattactatttatttataatttaactaatctatttcttatttaaataaaactaataaattcccaatttgtttctaataacacattactaatttaattaaattacaattttatttcattataaaattctatatatatatatatatatatatatatatatattgctaaatctctcattctatttattacaaaaaaaagactattattactattatcttaattattaatctaaaactaaatattattattttaattaaccaattcaaaagccactcaaccattacctagttgtctcaggtacaccaaacccaaaagcaagtttttttttttcattgccatcatcatgattcattttatatatatatatatatatatatatatatattccttccatttggcacacgcccccttttcttttctttttttttctccttgcttccagtaacacagtacacgcgtacaaccctttttttttttttccttccttccttccttccagtgttgtgcacacgcgttctttttttttttttttttttacattttctaatcccttcaaccacaaataataatatatttatttactccttttttttttcttttttcttttttttttttaaattaaccctaacctaaaatcgaaaccttctaagggattttttttttttcatctaataaaacttaagatctcccaaattccaataataaaatcaaaatcttaaatttttttattattttgattttaaaacaaattaaaaataaaataaactaaccctaatctagatttgggttttccaaaagatatctaatgtgtttgaaattaatcaataaatctaaaatattaaactaggggttagaatcttacctatagagacctgttcttcaaccctgaaatctgacttcaacctacgttctctgaaattctgcgaataggaactctattcagaaaagaataggaagaaatagaatttctaatttatacctagggtatttattcataaaattacacttttacccctcttccgctttattaaattaattaattaattaattaactaattgaattattattagtaatttcctaaattacccttaaaaaaaatacttgggcgttacatcctcccctccttaacaaaagtttagtcctctaaacttgacatacctgagtcttgaaataattgaggatgtttttctctcatctcttcttctaactcccaagtggcctctcggatactatgattgctccattggacctttaccaacttgacaacagcatgtcgcaataccttatccatcacatccacaatttgaacgggtacctcttcatacgtcaagtcctccgaaatttgaatagactccaactccacaacatgagatggatcataaatatacttcctcaaggttgaaacatggaaaacattatgaatcttagatagacttgggggcaaggctactttatatgccaaagtgcctactctttctaatatttcaaacggacccacaaaatgaggactaagttttccttttctcccaaatctcatcacagacttcataggtgaaactttcaagaacacatgatcacccacctcaaactccaaatctcgcctacaatgatcagcataactcttatgtctactttgagctgcttttaatctttctttaatcaaagcaactttttcaacagtcaactgcacaagtttaggccccaaaagtttcctatctccaacatcattccaacagataggagatcgacatttcctaccatacaatgcctcaaaaggtgccatcccaatgctagcttgaaaactactgttataggcaaactctgctaaaggtaaatgatcatcccaattaccttgcaggtccaaaatacaatctctcaataagtcttctaaaacctgaattaccctttttgattggccatcagtttgaggatggaaagtagtactaaaactcaacttagtgcccaaagctttttgtagactatgccagaatctagaagtgaaacgaggatctctgtcagacactatagaaactggtactccatgcattctcacaatctccttcacataaagagaagctaaacgatctaaagaaaagttgactttcataggcaaaaagtgagcagactttgtcaaccgattaacaatcacccaaatagcattattaccccctaaggttcttagcaatcctatcacaaaatccatggtaatatgctcctacttccactcaggaatagcaagtggctgcaaagaccctactggtcgttgatgctcagccttcacctattgacacactaaacactgagccacaaattgtgcaatatcacgcttcatacctgaccaccaatagttttgcctcaaatccttgtacatctttgtccctcctgggtggattgcaaacttggaacgatgagcttcctctaaaagctccctccttaagtcttcatcatttgggacacaaagtctagtcccaaatctcaagatctcatcatctgacaaaacaaaatcaggcttactgcccctcttaacttcctccataacttgcactaattgggaatcattcttttgtagggtcttaattctcccaactaagtctggttgtactctgaaatttgctacaagtgctcctaagcccataactcgaaagtggactggtaaactcctcaactcgtcaagtaaactgcctttgacagcctctaatagctgctagagaactaactgacttcctactcaaggcatcaactacaacattcgccttcccagaatgatactgaataatacaatcatagtccttaagtagttctatccatcttctctgtctcatgttcaactccttttgggaaaatagatacttcaaactcttatgatctgtgaatatctcacaagtttcaccaaaaaaaaaaatgtctccaaatcttaagtgcaaaaaccacaacagctaactccaaatcatgagtagggtaattcctttcataaggcttcaactgtctagaagcataagctacaactctcccatgctgcataagaacacaacctaaaccctgatgaaaggcatcactatacaccacaaatcctcctgaacctgaaaggatagtcaaaataggagctaacactaatctattcttcaactcttggaagctacattcacaatcatcagaccactcaaacttaactcccttctgtgtcaacttagttaaaggtagggcaatcttagagaacccttctataaaccgcctatagtaaccagcaagtcccaagaaatttcgaatctcagtcacagtactaggtcttctccaattggctacaacatctaccttgccagggtcaactgagatgccatcattgcttaccacatgcccaaggaaagaaattcggtctaaccaaaactctcacttctttagtttagcatacaactgcttatctctgagggtctgtaatacaatactcaaatgaccctcatgctcctctctacttcttgagtataccaagatgtcatctataaaaaccaccacaaactaatctaaatagggtttgaataccttattcatcaagtccataaaagcagcaggtgcattagtcaaaccaaaaggcataacaagaaactcatagtgcccatacctagttcgaaaagtagtcttgggtacatcttcccctctaaccctcaactggtgataacccgattgaagatctatcttagagaacacacaagcaccttgtagctaatcaaacaaatcatcaatccgaggaaggggatgcttgttcctcattgtcaccttattcaactccctatagtcaatgcaaagtctcattgagccatccttcttttttacaaatagaacaggagctccccaaggtgaaacactaggcctgataaaacccttgtctaataactcctgaagctgaactttcaactccttaagctccacaggtgccatcctatatggggccttagacataagacctgttcctggtaccagatcgatggagaactccacctctctctctggtggcaagccaggcaaatcctctggaaagacatcaggatactcccttactatgggtatgtcttccaacttcaaatcactttcattactcatcacactagccaaaaatccttggcaacccttcttgagcaagctactagctcgcaaggctgagatcatacgcagtagtctgtccacatgcttcccttcaaagctaaacttaggctgaccaggaatactaaacgtcacccttttctcaaaacagtcaacagaggcatggtaggaagctaaccaatccatccccaaaatcacatcaaaatcctgaaagtcaaggaatactaagtcaactggcatttccctataaccaatcatcacaatataatttctaagcattctactggccacaatagaatctcccacaggagtagcaacaatcaaatcaaagttcatgctagcaacaggcaaacccaacaaaccagcaaaagatactcaaacaaaagagtgtgttgatccaggatcaatcaagactctagcaaataaggtgtggattcagaaagtacctgtcaccacatcagaagtggcctgagcatttcgatgactcatagcaaacacccgtccttgggctttgggtttctgtttatcctccttattttcctctttatgcttcccaatgatgaacttcctattctctggacaatctctgatcaaatgtccttgcttcccacaaccaaagcaagctccagtctctctatagcatggcctacccccatgcttcttaccacaagtaggacaagccccatctaaattttgtgctgccttccctttattctgatttcttcctgatgtagactttcgctgtgcttgattaccatgagccctttgttgttccctatactaatgaagctcctcattatctttttctgctttaagggctctgtcaacaacctctgaatagacaccaagcttcagaatagatatattgttcttcaaataaggcttcaatccatcctgaaactttaatgccttttcctcctctgtagcaatcaactatggggaaaaacgtgataactctgtaaatttggcctcatactgagccacagtcatatccccatgttccaaacgaataaactctcccaccttctgccgcctaacactgtcagggaaatacttcttgtagaaagcctccctaaattgtctccatgttatgggtccctgatcctccaaaagtctcctagtcatacgccaccaatgatctacctctttatctaacataaaacctgcataagaggcttcctcagagcaatctatgacaccaaagaatttctccatcttaaggatccaagtctttgcctttgtgggatctgtagcaccagaaaagtaaggaggacccaatttcttgaagtcatcaaaaaagctacccctagaagatgaagactgtacctgaacattagtcccaacagctcgagcttggcgttcaactaaaccagctagtgtcccaagatacctatagatcccttctgcactcacgggaggcaaaccctcaactggaggtacatcatcattagcctgactgttttgtgaagaatttgctcttcttggtggcatgatgtcctcaaattataaggcataactaaattagtcactaaagaaccaattagaaaatttacaaataaagaaagaattggaatttatactaaatgaaactaaaacttaaacaaatgtgtcactcatctatccccaatctaaaccaattcaaattcccatcaagatcaaaacctagtgctctgataccactctgtcacaccccaagacccactctaagggcgtgacggtcattttacacctcaaacctgaaggcttacagtgtaacctaacccaaataattatcttgtaattggaagttaccaattaccaaatatctgttcagagtagcagaacaaaatctaaaatcctcaaaattcaatttcaaaactaaaacattcattatccaaaatccattgtccaaatatttgcaaacttaaacaattcaagtactaaaacaaatttcaaaatctccaacactcaactttgatctaacataaaatttgaaggatcaatatccaaataacttccaaataccaaaagatccaaatgaacataactaacagttacacaaaatccaacataaaatcctaagtcaaatcctaatgatgaccattcctcagcctagccatcactcctcacccgaactaaggatacctgaaaaattttcaacaattgggaatgagttcatagcccaataaggaatattaatgcaattcatggatcaaatattttcatttcaaataggagatatcattttttttttctcatcaaatatcagagtttcaaaaataccaatatattcaaaattcaaccaaccattttcatatcaaattcaaacactttcacataagattcaatcaaatccattcaattttcattactctggttatcaaatatcaaatgcccagttaggtgggacttttcaaatgggtggctagccttaaattgttcctggtggacggaaccaaacactactagtactagtaacctctaaccaaacccctagaggctggggtccaaatcaattacattcccaccatgaaatgtaaaggtcaactattatatcccgttgacaaaagccaaataaaccagagtgatgtttttgttcaagtattcaaatttacacaacataatatctccatattttgtgtcataaataaaacaaaatattccaacataatatttagtgcaaaacagtttgatccatgcatggtaacaaaatatcattttcttttccacaattcaaaataacatataaaataatttaaattttataaatattgcattaacttcccttacctcaaaagaagtccttgaaagcttgagagaagaataattctgaaaaaaaaaatctactcttcacctaatataacataagagaaacaattattactatttatttataatttaactaatctattccttatttaaataaaactaataaattcccaatttgtttctaataacacattactaatttaattaaattacaattttatttcattataaaattctatatatatatatatatatatatatatatattttgctaaatctctcattctatttattaaaaaaaaaaactattattactattatcttaattattaatctaaaactaaatattattattttaattaaccaattcaaaagccactcaaccattacctagttgtctcgggtacaccaaacccaaaagcaagttttttttttccattgccatcatcatgattcattttatatatatatatatatatataaaaggcttccttccatttggcacacgccccttttcttttttttctttttttctccttgcttccagtagcacagtacacgcgtacgcctctttttttttttttttttcctcttccttccttccttccagtacaggcacacgcgttcttttttttttttttttttttttttttttttacattttctaatcccttcaaccacaaaaaaaaaaaaatttatttactcttttttttctttttttctttttttctttttcttttttcttttaaattaactctaacctaaaatcgaaaccttccaagggaattttttttttttcatctaataaaacttaagatctcccaaattccaataataaaatcaaaatcttaaaattttttattattttgattttaaaacgaattaaaaataaaataaactaaccctaatctagatttgggttttccaaaagatatctaatgtgtttgaaattaatcaataaatctaaaatattaaactaggggttagaatcttacctatagagatctgttcttcaaccctgaaatctgattccaacctacattttctgaaattttgcgaacaggaactctattcagaaaagaataggaagaaatagaatttctaatttatacctagggtatttattagtaaaattacacttttacccctttccactttattaaattaattaattaactaattgaattattattagtaatttcctaaattacccttaaaaaaaatacttgggcgttacatgtcaagccccatgttccaagaaccaaagagcttgaatgttttaaaatcaaatggaaaaaaaaaatccaagaagaatatccaaccaatgaaatctttgagctaaatatttttaaactttaggcttacgatgttgcttctgcactagccatggcaattgaaaaacttggcacgggaaactttagcctccaaaagactaacattttcagagattcaactggttttgagaggtccaaatattctccattcactattaagtacttgatttaaaggccttagtggagattttcaaattggagatgagcaactacacacatcaggtttgcagatagttaatgtgattggtgaagaggaaagaggggttggattttagacaccagagaatggaattttaggaagatcgaattctacttctaagtccaatctaagagccattac

SEQ ID NO: 13567 - DNA, 1565 bp, Vitis vinifera
  Intron number 5 from transcript GSVIVT01012146001 (locus G SVIVG01012146001) derived from phytozome v7.0 (chr-ID chr1 ; pos 1064621 to 1066185 reverse strand)
gagcaggcatgttccctcttaaagatacctctgtctttgtttacccattcgaagtcatatctttttatgtggcattagagaaaaatgttctttctgaatattttatttcatgatgtgtttcttagtgaatgttatattgccgatgataagaatattgaagacaaacatattttgcagtttatgattatgctgttaacagaaaaatacttttttctttatttgtgtttcatttgattaatttttatattttccaggtaagcaaatgagggttttgtttaaaacaactacaaatagcatatgctaaacaaagttgaatcttgaataaaataaactcttccttgctatgttatttaatttgatctcctcaacagtggatttttcttggcccatcaatatagtgtaaggatttagagaggaaacgagggtgccatgagatggatggattcttaggagttgggcgtcagtcttgagttatgacttgttataaaagcaagattaggcagtggagatgggcacttcaccggaaaggtctggattctttgagccctaactaaggttgcattctcaaatgggaggctggcttggcaatgatttttaatgttgattaactgggtattgtggaaggaaaggaactgtagagcacttggaaatgaggagcaatccgagactaagttgaaatggttgttccttagcagtttgttagcttggcttgggatgtgcataaaagaagactcaatgccgtttattttgtagactggttaggaacatgtttgagacaaagagtggttttttgtctgtcttttgtggatttgctgcttagtgcctgttgtacatggcccacatatttctttgcttataatatttgaaaataaataaaattcattgattaactgggagaagaggtttttcttttcattcctaatcggtgttgcatctgcaaaagggataagaagacagttaatcacctctgatgcattagagacgttgcctggaagttatggttgttagtctttgccatctctggggtccattggtgttgctggactgagttagagacctgctgctagggtggcagggatagttcatgggcaagaggagaaaacatgttttcatgtatggtttcacatagtgttatgtggtgtgtttagaggagcagtagacaaagctctgaatggttggagcttctaaaccacagaataaaatcctttctttttaattcttgattctgttggtgtgatgaggagtgtaggaggtgtgagcatggattttttaggtgtttgagttgtagacaatgttggatatgattcttagattttctgcttgctttatttttttattttttgtgtgcatgtgtgtgtctaggagagagagggaataggttttgtatacttgacgtttactgtgttttgtgcccatgttcccactccatttaatgcattttatttacctgtgaagagaaaggtttttgcgattactggctttgtgcttgtactttttgccaggtaatgcacctaattctggctcttcaatggttttttatgcttaggcagttaaaaggccttggg

SEQ ID NO: 13568 - DNA, 7067 bp, Vitis vinifera
  Intron number 19 from transcript GSVIVT01009573001 (locus GSVIVG01009573001) derived from phytozome v7.0 (chr-ID chr 18; pos 9525576 to 9532642 reverse strand)
gacagagtaagctctttccattgttttaaaacaccattgtgataatctcaagaaataactagcaaataataatatacacaacaacgacaataatgattattactatcattttgtgaacttagctgctattcatggttcatgagctgtggcaattgctgtactgggtttgaaatgacacaacaatgtctacgggttatttatttttatttttcataatatttgaccatgaatttttttctatttctttttttgatgagaaataatgatttcattggattgaagtagtaagtagaaaaaaggattagaaatcattccaagaaatacaaaatcctctatacaaagtgtaacaaaaaggatagataagtgtttactagttcaaaaaggtgaatctatatgcatatatcaaaatgattagggtaatgctagcagaggttaaaatctcctatgaaagaaaccaaatgtctagttccccactttgctagtgcattcttgcatgattgcctaagcaaggagtctacgagaaggaacatcctaactttgaaaaaatatcaataatttggtctaaccacctatcaaacttccacaatcctttttctttttgttgcccatgatatacattgtgggccaaaatcttataagcttaaacttttatgaagattggttgtccaacatggtattagagccttgtttggtaagaggtcaagtgtttgaatttcaccaccgcatatttatttgcccaatttattaagcctacatataagcccaaaaaagaggctacatgtaagggagggtgttggagagcaggatatacattgtaacccgtattctataaacttaagcatttaagaaaattggttgtccaacaatgacaatagtgaaatctgcttctactaagagattagcgatgcccaaagctttcatttgcaaaactcttccaaaagggttaggatctctatcttgatgtctaaaacttgatttgcaagtttaaagaatggtcttgcttctataccaaagtggtccttaagcaatccttccatctctagctatcatggttgtccaaagaacaaccattaaaatttagctaaacaaaacccattggagttagtaaccatgcagtaagtgtctccttagtcaaccttgtaattttgcagactagcttccaatatagtagattttggctcaaagagatacctaaaaaagcttcattggtagaagttgaaagggaagaagaaaagtaaaacaagtcccaaatggcttctagagactttcatccaaaaaataaaattcttgcactcttttctcgccaatgagtccatatcaagtgaggctagtaatgtgccaatgaatcctacctcaagaaattccccttaaacttctaaaggatatatttaacatctcttccacccttatgggtggagctcaatcaatccttgcaagtttgactagcctataccatattgtagacttcatacttcccctgcacatgacgtactattataggttaagagcattataaggtcttatccattggggcaagtcattagtattgacttatttactacaagccatacaaaggcctttacttttggtgggccttcagatttccaaatgaagtttggtaggataaaagatattaagttggtagaagtagaaataacattaaaggggctaactaagaacaatcttgaggatattaaggaccaaattctcaattgagaaaagtgggtgatagacacgcaaggccttgagcaaacataagaaaagataggtccttacttttttttactcttaagaggttatgatgaaagttgaaattccaagatatagacaaggagaagggaactaccactaagaaaataacacagtctcttaacctcattacttcatagatgtttgggaattgctcactaagtggtttattaccccattaaagatcatattagatacaaatttttgcatcatcacccatagaataacaattgaaacaaaaaaaaaatctaaggaagttcaatagctttccaagagtatttatatgattaactaactacaaagttgacatcccatctattagaatttaacctatagatactcaagatgaccttaggctataaagcatagctttccttaaggaccctcaaccacttccataaaagggctcattttcaaagatatcctaccgatgcctaatcccctttccctcttaggcttataaacctaattccaactcataagatgatttttttccccttttcgaatactcgaccaaataaaatctctttgcaatctctcaatcttggaggctactttaattggagctttgaacaaagatagaaaatacaaggggtgagtgataaacatgtttgcacaagagtaattttaccacctagggacaaataagctttcttctaaccatctaaatattgtgaagtcctctctataattgggtcttattcctaaaggaaatcctaagtaaggagtggggtcaatccaacattgtacaatctaaatatgtggccagcttaaggacacaagtctgagtaatattgatatgtgacatgatactctaatccaaatttatcttgagcttaaaaatgtgttcaaaaaccaacaagattagcttaaggctctatagctactcctcttagacttcaagactagtattgtgttaccatcaacaaactttaagcaagtcacccttgtcttttctttacctaaaaagccctttaagattcccctatcatttgctctcaatatctatttactcaatacgtctgacacaatggtaatagaagaggagaaaggggatcagcttactttaaactcctagatgccttcactaaccctttggcacacccatttattattgcaaaactgattgatgaaatacaaccacaaattcatgatcttcatctccacttgttggagaataagatatacgttatgaaaccaaatcctaccaacttaagcttttaagaaaattgattgtttaacattgtattaaagccttgtttggtgggaggtcatgtgtttgaaactcactaccatttgtttattccccaatttatttagcccatgtgtaagcaaaaaaaaaaaaaaaagaggttatatgtgaggggggtgttggagagtgagatatacattgtgaacccaaattatacaagcttaagtttttaagaaaattggttgtttaacattgcctaaaatgtttcttctctaatgcatgatccaaaaaacccgacttcacatgatgataagctttttcaaaatcaatcctaaagacaatccctttttttttggaattttttttttcatccaccatttcattgatgaccaatagtgcatttaaaatccaactactcttaacaaaagctccctaagaaatatgaattgtctcatgtcaaacccttcataaacgttggaacaacatcttagctatgattttgtatgggttagtcaccaaactaatgggtctaaagtcatatattctattggtttggctcctctgagacactagggcgatgaaagtggcatttgtgttctttgtcatgaaacttaaatgttcaacaaatcccttttaatgatattccaacaatcttaataaaatgggagtgtgaagcaatataagcttggtgccttgtccttgtctatgtgaaatattgtttcttgaattccctcctctaagaagggtcactccaaatttctagcactcccttccaaaatagttggccaatttaaacattctaatcccacaaatcctcttctactctactatatggttaaccaaaaaggcttaaaaccgcctatgagatacttgactatccaatttcacgctttcctcatgcactaaagatttgatgagctctttttccttcttccattaactatcttatggaagtacattgagttgtagtctccctccttgtttcatttaactcttaactttttgcctccaatgaacttcttttcttaccagaagtgcttctaaatccactttcttggtatttgaggttattaattcatttgaaagcgcaccttcccttcatgaaagtctttcatggaaatgtactcaatgatgagttttaaatgtcttgcctttctggaagaagtaagggtatatactccttgtgcctattgcttatctgctcgactttttttatttatatataggtaagtaaagattgtattaaacataaaaacaagatggtatacatgatgtatacaaaacaaccaaaagaccaaaaaaggcacaaagacacaaaaaccagtaaccatgccctacaaatagcctaaccaatccacaaagtctaatagagtcaaagaaccatccttaacatataatcaacccaatcccaaaaaagataattgtttagtccatgttttcacaattattaaaagttattctatttttctctctctgtatggtccaaaacaagcacaacagagcaacctttcaagccttttttcttcttgttcccacaaaagaccagtgcttgcctaggagaacccttccaactgaagagtgtatcatcccttggacaccaaaaagagcataaatcaattgccacaaaatacgtgttttcgaacaatgaaggaggatatagtcgcctatatcttcttttgcattgctcatatagcatctatttccaatccctccttttgagttgatttggagtcaaaatcttttggcccaagttgcttcccaagcaaagaagctaattctcaagggcatctaagaattccatactgcgtcataaggaacaacttcgctctcctatttgccaaagagaaatagaagggcttaatcgaaaaaatatcgttctttgtagccaaccacaccataatatccttaatccccaaagtaaagagtgttcatacaacctcccaaaagacttctactctaacccttaatcatgcaactgtgttgtaaacctaggactttagctatcaccatcccaaagatcacccacttaagcattttttaaagaagctataaaataaagcttcaaaaatgattctcttaaaggtgtgtcctcagaccatttgtccttccagaacttcaccatattcccaaaaccaacctgaaaacttgttttatccttgaaaaccttctaactacctttgattgcctttcacactcccagtccatacctttatctcacttctttagtgcattatcccccctccttcttacctatactttcctacaattacacaaatctccaagaccattttaccaaatgagccttattaaagatggataaatttatgatgcccaagccttctttttgtttctccaattaaacaatagaccaattcaccaaatacaacttttgttccaaagcctccctccccacaaaaagtccctttgaatctttttgaaatctaacaactaccctcttagggatgacaaaaagagatataaaataaatcggcaaattggactgagtactctttaccggaggtcgtcttccaccttttgataaatactgcctcttccacataacaagccttttttggaatcttacacctcttcccaaaccttagcagacttgtagagggctcccaacaggaggcctaaataggtggttggaagaacactcaccttgcaacctaaaaccccaacaagatcctccaaatttgagacatcctcaatagggatcaactcacttttctctaggttgttagctctaataaagcctcaaatcacatgaagacctaactcaggtactttaggttcttcttattagcatcacacagaatgagggtatcgtctgcaaataacaaatgagatatctccgcccttgcttcatatcttccccttactaaaaagccatccccccctcttcacctcctcctcctttgtccataaaaggatatgggaaagagcctccattgccaagataaacaaataaggggacaaaggatctctttgtctcaagcccttagatctttggaagaaacctgatagagacccatttaccaagacaaagaaatgaactgtagagatgcaccacctaatccaactaatccaatcaccgccaaaacccatttttttccaaaactgcatgagcaaaactctaatttacatggtcataagccttttcaatatcaaacttacaaatgatccctctcaagttgcctttaagtctagaatcagtggccttatttgctatcaaaatagcatccaaaatttgtctttccaccacaaaagcatgctgaaaatcctagactaagttgcccaccgctttcttaaatctattctgcatctttatttattcaggatactgtacctatgctttgtctgctcttcatctttatttattcagggtacactttctttgctccttggaatagataatcaaaaggtggagttaaattggatctcgtctccctatatttttaaaattccttttcttgtccaaaaagtggttgagatcatatggttaaaacttcccacatggttatctctatatctttttacacaattggtgagtgacaattatctatttgtataaaataagcaagttgggaattacactcctgcaagtccaagtcattcaagttcaaactagaactgtttttttatctgggttagtttaggtcaaattaaagactgcaatattgccttgttaaatctcaattttcatctgaagatcatcaacttgattgcttactgctcattattggggttttccactgctcaagaatttgattgatagtaaatatctctaagtggacctttttgttcacttatatcattcactgataatgatgactccttattgttgacttagttacttttgttttgaaagacaaaagtaattaagttcttactgatgaaagagtttgagcaattggggttcttttgtagttattgctaatagtccttccttgtatttgctttactttttattgttattttggtttagaaattgtttgagaaggataacgcatccttcttttttaaatatttgtgcagttctatcaattgagttgtttatttatgataaaaaagaagagctccctttgtctctaactggacttcgtgagcaggtatatcacagtgc

SEQ ID NO: 13569 - DNA, 10448 bp, Vitis vinifera
  Intron number 2 from transcript GSVIVT01027215001 (locus G SVIVG01027215001) derived from phytozome v7.0 (chr-ID chr1 3; pos 18091096 to 18101543)
aagtcacaggtagccttctgcaagttctaacgaccattttttttttttaatttttttatttacacaatagcataattatatccatctcattcatggtttgagtatactatcattttcgtcttgattgtgagcatgcctagtatcattttgtggacccatctattaagtgctttcagagtgagggttgttttttgatgcccgctcaaaaacttggttgttgttagttttaaacaacatagaaccactaagccacctagtgtataagaaccttaagaccttatttgagatacaaggtaaaaggttcctgagtaaagcatgttatctagtatcactgccaggaagattttacaagtcaacagaaaaagcattgatatctctcccttttcatgatttaataatattgagtcctcaagtgtagattctaagtgtgctatctactactggtataaggaatgatttaacaagcctgcaaaacaaaaggtattagtatctatcttttttgtgctttaacaatatcaagttctcaagtataggatgatatttggtggtcatcaacaattagcatggtaaagtatagcatgatgtgttataaaatttataatcaacaattatcaggttctatatccccaaaaagaattttaacatgatgactggattctttgtgaagtataaccgctttttcccaaaagattctccttgaaatatccaatatatatgtgtgaactctaccaaattctcaagtagagaatgatatatagttgtcaatatgtgataaacaattagcatgataaagcaataagtaagcggggtggtggtcttgtgaggtgatagactcttatggggttgatttgtggaaagctataagtaaggagtgagatttctttaactcaaaagtttcctatatagtaggggatgtgagcagagtgaagttttggaaaaatcgttggtgtagtgaggagcctttaagcaagatgtcccccactttgtttgccttatttgatgcaaaagaggcataagaagcagatttatgggagcaaagggagggatggaggagattagaacttccgtgctgcaaggaatctaaataattgggagttggatatcatggagcatttaccacttaaactccaaggtcagttagtgaatagggaggaggagaatagagtggtttggaagggtgatagtaaaaggaaggttttctgtaagagccctttactctttgctggaacctgattgtgtcattctttttcctttagtgattatttagaattcttggattccttctaaagtgagttttttcgcttagggagcttgttaggggaaggtgttgattttggattagctccaaagaagaggttggtcgttattcaacaagtgtactctttgcaatgacgaggcataatccattgatcacattcttcctcattatgctaacgcaaggattttatggctattggtgttctctttctttggcatcctttggattatttctaccttgataaaggacactctactaaggtggtatggttcctttgtgggtagaaggtgtaagaaggcttggagagtggctcccttatatgttttttggactatttggaaggaaagaaaccaataaatatttgaaaacgaggaaacatcagatcaaaatcttaaaagttctttccttaacaacctttctttgtggatttgtgtgtacatggatgggaaaactttgttcttaattgattttgtagattggttgggttcttgttgagggagggaatagtttttgtttttcctttttgttttgcttatttggttcattgtatatgtcctttgtactctcgtgcattgttttatgcacttttaacacattctcttatttttcaggaaaaaaaaaacaattagcatgataaagtactatgtagcttaatgtgctgaaaatataaggttctataaccctaaaaggaaattaacatgatgatggatgctttgtgaagtataacgcctttttccaaaagattctccttgagctgttgtgttagttgtgtggacacttccgccatttcatttctttaatctatgtttaattaaatgtgatttcctgttgatcttcttaaacttttttttttcttgtgcataactgcatatcagctaatatctagtcgcacactgatattggactgtatgatgatgtatcaatactttatgactaagattgttgattaaacttaaggttcgcaagtctaaagtaagaatgaaattgcaagtcaaatcattaaagttaaaaccatcaattttaaaactaacttgaggtctagagtgttatcagggtgtccatgcagtggtgtagccagtaaggtggttcagaaggggcaccccaatattaacaggaatgctgaagaaaaatttcaaattaatagtaaatgaaaatgttaaattgattaatgatacttccattcaataaatttaccattgttgtcagtaattttttatatcttaaataatcacatttatttggatgcgctttttctcaatatatgtataactaactattgtttgttgattgatctttatttggttgcatatgaactttaagaaatttaataattttgttaataaatttaagtatgacatttaaaagatttcttatttggaagccaatggagagaatgcagtgtgatcagaagtttcaaaattttatttctaaatttaggaaaaagaacaccaatagcaacgacataaaaaattgggggaatgagtgagatggataagcacaatacctcccaatcaagcaaaaaaagagggtaggagataggagagggtatgagagcaaggggtgaaactggtggtttaaggggaggaagaagttgtttcgttgtggaggccaaatctttcgaaatcttgattgatgagttgggaggcaagctgagaggttgcatttgggagagaagcaaaggggtctcctcatggattagatttggggaggctagcttaagatgtttacttgatggagtggaagtttgctgcagagaggtaaacaatagtgtttgggctactagctgggaggaggggaatagaaagtataggttggagcgccgttcgaatggggcaggtaggttcatcttctgctcagttcgcgacattgattcaaaaaagtatagcattattgtcccagagggaaagggtcagtcttttggttggaactccttggctgagaggctgagagctcttggggtgattccctcaggtggcttgcagggtcctaaagggtcagaggacttgttgaggtcgaaaggggcctcgaaggtccaatggagggagaaaggggtggagctgaaaacatatgctgatgctgtaaggaaaagcccgggaagggtaggccagtcagtttggatagaggtgggggaaggagaagtgcgtggaagaatagaacaaatgagtcagtgtctggtaggctggtggggaactagttcagctctttgccctgagatggagtacgttagaagctgggcaccgaagcattgggctttgaaggggaatctgagggtggccatgctaggcagaggattattgctttttgacttcgagttaccagacgaggctgagcgtgttttagccagaggtctgagaagcttcaaggagaatgttttagtcttggagagatggaaccctgaggtggggtgtcttcgcaaggagcccatggcaaaagatgtttgggtaagggtaattggtctccctcttcatttaagaagctcggaggtgtttaaaagaattggagatgaatgtggaggattcatagctgcggataaatcatctttgcatgagatgcaatgggctcggctattggtgaggtgcgtggacagggagatgcccagcactgcccatattgttgtggggtcgggttgttattcccttcaactttggtgggagtcttctccctggttcttgcaggtggtgccggcgggaagcttcagcggggaaggtagttcaagggaaggagaagaggctggtggaactgttcgtgatctcagtcgtggaagtcaaagggagaaggtggagcagttgaggttgcagcagggagagagtgccgtgtcagcctgtggaggtgattctaccctctgtcccgctgtgctctatgaggcaggggttgcagtggagggtagagtagggtcagctgatggacaggttagagagggagacgggtcctttttgaataagctggaaagcccagcttttgggccaagtttcgggccaaaagggccagcccatggggtgtcgctgggccttcctcatttaagtgggttaaggcaggggccttttaaagaaacccaggaggatttgggctgtgtcttaaggcccaatgtctctttcggggagaaaggagagggttttgggcctgtagggcctgttgcagcggaaggaggagatttaaatgggaaaataatctcgagtcctcgagctagggcacaatcgcctggcgtggagaaaggctctggagatgctgtctctcttgtccgtggggaagcacctttggcctcttgtccttcggctcagatatttagctcggagagtcaagcttttatagtggaggaccccatcgtcgatattttgagagctgcgtcgcagtcggaagcctttgcagtgccgaaaatgactgatcaagcgctgcgtgatgaagcttccaggtatgtcggattacctttgccttctgtggggggtcgggaaatttctccttcttctattttttctgggatcgatcgggcggggacaaatgagggggtctcatcgggcttgatttcggagattgagggagaggagcagctccctcttagcattattctggcagatggctgcaatggggagatgggccctgagggggagagaccctcgggtgatgtaggaaggggggatgagttcgagttattattacaagacttggaaggaagaggaagccgatgggatgatagttgcctggcgagatttagcaagttcctgggcttttcaacggaaggatttgaaggagaaattctgaacttgcttctaaggaacaagagaagaagggagcagaacattaagaaagacatttcggggtccactaagtttgatcgtgagttgaagaaattagagtggtccatcaattacaaaggggcgaggaaggagaaatctctggttagagatggtggggacagaatctcgaaccttagatgaagacaaaaatcatatcttggaatataagaggggccaatgatagggataaaaggaaagttattaaggctttgatcaggtcgcaaagagcggatttggtgtgtcttcaggagaccaaaattcaagatatatccagagggattgttcacagtcttggagtgggaagattcttaggttggggtgctatgagtgcaaggggggcagccggtggggtagttgtgttttgggataacagggttctggagttaatgggcatggaggtgggtcttttctcagtttcctgtcgctttaaaaattgtgaagatggcttcttgtggaccttcacgggtgtatatggacccaatatgaaacggcatagagagttgttttgggaagagctaggagccattcgagggttgtggtctgacccttggtgtatcggcggggattttaacgtggtcagatttcctagcgatcgcagtagagaaggaagactgactggttctatgagaagattctcggaggtgattgaggagttggctttaaaagatttgcctctccatggggggttaattcacgtggagtggaggactgaatggtctttcaaggtccaggctggaccgttttctgatttcggaggattgggagaatcatttcagtggggcgtctcagtgttctctcccaagaccggtatccgatcacttcccaatcctgttagatgggggtgggacgagaagaggtccaactccattccggttcgagaatatgtggttgaaggaggaggggtttaaggagctgttgaagggctggtggcaaggatttaattatggtgggtcctatagtttcatcttgacagaaaaattgaaggccctgaaaataaagctgaaggaatggaactcggaagtctttggcaaagtgggggtgaacaaagggttggctctagataaagtatcctactgggataatcaggagcaacttagagctttaaatgagcaggagctagaggcgagaaaggaggctagggaggaatttaagaaatgggttctaatggaggagacttcatggagacaaaaatcgagagaaatttggctgaaggaaggcgataagaacatgggattcttccacaagatggcaaattcgaacagaaggaggaactgtttgaaaaatcaaaatcaatggaacctggctgtcagaagagcatgacattcaaaggggagtggtgagggcctttaaggaccttttatcagatcctggaggatggcgtccttgctgcaacaatattgagtttgacagcattggggatgaagaggcagccaggctggaggtgagcttttctggggatgaggtgttcttggccctttcagatctgaatggggacaaggcccctggtccggacgggttttcccttgcattttggcaattctgttgggattttgtcaaagatgaggtcttgggtttctttaaggagttttatgagaggggaaaattcgttagaagcctgaacaccaccttcttagttttaatcccaaagaagtgtggggccgaagacttgagtgatttcagacccatcagtttggtggggggtctctacaagctgcttgctaaggtcttagccaatagattgaaaaaggtggtgggaaaagtggtgtcctcttcccaaaatgcctttgttgaaggtaggcaaattcttgatgctgcattagttgctaatgacatagactccgtgctgaaaagaaaggaaagtggggtcttgtgtaaattggacttagagaaggcctatgatcggattaattgggattttctactatcagtgatgcaaagaatgggttttggggagaaatggattgggtggattagatggtgcatatccacagcctcgttttcggttttggtcaatggttctcctaccggtttttttcggagctccagggggttaaggcaaggagatccactctctccttagcttttcgtcttaggaatggaggccttaagtagtctcatcaatagagcagtgagagggggctttctttcaggttgcaggatagggggaagggaaggtgtcgggatccaagttacgcacctgctgtttgccgatgatactttggtcttctgtgatgactctcaagagcaattggcttttctaagttggttattaatgtggtttgaagccacttccggactgcgcattaatttgaacaaaagtgagattttgccagtgggttgtgtggtggatgctgagttactggcagctgagctgggctgcaaggtgggatctctcccttccacctatttggggctccctttgggagcttcgcataagtctgtgaaggtttgggacggagtggaagagcggatgaggaagaaacttgccttgtggaagaggcaattcatttctaagggaggaagactcactctcatccggagtactttggcgagtatgccaacttaccttatttcattattgcgcatgccaagagtggttagattaagacttgagaaaatacaaagggactttctttggggagggggggagcattggagaagaggccccatcttgttaagtgggctgttgtttgtactcacaaaaagatgggtggattggggattagaaatctctccattcttaatagagccctcttgtgcaaatggagttggcgttatgcggttgaaagagactcatattggaagcttattattagtacgaagtatggggttgaaagaggagggtggagcacgtgtggggctagggagggccatggggttgggctttggaaggaaatcagcaaggaaggtttgctactgctcaataatgtatctttctcggtgggggatggtaaaagggtgaggttttggaaagacatttggtgcgggaacacccccctttgtgaggcttttccctctgtttgatttagcgggttctaaagatgcatgggttgcggactattgggatccaatgggggaagtgggagggtggactccacttttccttagacctttcaacgattggggggtggaggaggtggagagactcctatcgtccattcaagggaagaggttggatgctgatggggaggataggatgctgtggagagggacgaaaaatgagattttcactgtaaaatctctttacaagtctcttgatcatagctgtgcagtctcgtttccgggtaatattatttggagtccgtatgttccttcaaaggtgagtttttttgcttgggaagcttcttgggagaaggtccttactcaaagatcagtttaagaggaggggctggattctagccaatagatgttgcttgtgttgcgttgaagaggaaacgataaatcatatccttgttcattgttctaagacgaagattttgtgggatcttttgctttctctttttggggtcaattgggtgttgccgttttcggtgagagacactttatcaagttggcatgtcccttttaaggacaagaatcatagaaaggcttggcgggcagctcctctctgtttattttggacaatttggaaggaaaggaataggatagtcttcgataacgaggttttgtcgactcaaagattgaaaaactcatttgtttgtaatctcttatcctgggctaattcttctatagttgtaggccctttatctttgtttaactttgtggattggttgggttcttgttgagggccggtgagtgtttctgtttttgttgcttgttttaggtgtctcttgtatactccctgtatgctatgggttgcctttcaagctccctttctctaatatatctttgtgcttttgcctattaaaaaattgggggaatgagatttcccatttgaaagttgatgtgttgttttgtgatgccttttccttgtttttttttttttaaaaatttttttaagtgaaaaattattaacattgccaaccaaatgtcaccaaagtatacaaatggtgccaaaagacaataaaaggaggatggggaaaaaaaaaactttaaacatggtcttttctttttccttctgttacctgaattttactcttaaagcataatttaaataactttaaaatttttgttttaagcgaaagctttattttaaggttggttattcattaaattaattttaaaggatagaaataaccactaattaaactctagaacatggtttactgatgtaatataagttctatcatttatttatttatttacactaattgaactatacagattgatttttttttgataaaccaagagaagaaatcatattaaaacacgccaaaacaggggccgctccctaactatacagattgatgaagcagcaaaatatctttagtccactttccatgatggggctgaattttgatgaaaataagaaagaagcaatagcatctgcaaaggatgaaagctgggtttgatatctaatatcatagcttgctgccacatatttttgtattaattatgcgatttcactttgaaggccatgatgagttgtgtttattgtttctaccctcaatcccaggattaccattgaaacaacacctttggcataatacacatcaatggtttttgaaaaacctcaatttctgaagctcattatgagttaggttcattatttctagcttgttcccagccccagggttcattattggaagtatgcctttggaatacatctacatgggttttgaactacctcaagtgctcctcaagtttgtggagcaagcttctagatttgtggtctctgctctctcaagtcctattccataagcatctctatctcaggtctcagcattaaatggaggctttagcattcacaccacttggctatgcgaaatcttaagtagaaatttgggaggtcataaattggataacctttttaacctatcacaaaaaataaattggataaccttattttgtattctcaatatgtaaattcttgtatctgtaatttgtgttcagcttacagatgcctggtggatcacctcgttatttgatggtttccttagtctcaagttttagcttgtaaaaggaaaagattgttttagtacattactctggtcaaaagtcacagaatttgattctgttccaaaatacactgatatttacctcccaaatttgattggatttctatctattatacttttctctatccctctctctctttctttctctcttttttttttcttctttttgcatctctttttccagatttttctcctcgacactatttgttgctgcttattgaatgggtaactagatttattttattaaagaatatcattggttgcagggaaattttgttaaag

SEQ ID NO: 13570 - DNA, 14594 bp, Vitis vinifera
  Intron number 3 from transcript GSVIVT01001869001 (locus G SVIVG01001869001) derived from phytozome v7.0 (chr-ID chr5 _random; pos 342184 to 356777)
aatttgtatgtttcttgtctttgatcttttcctcattaattattttcattgatataatagcatgtttgatatatcactatgtctatttatttatgtcacaccctggattttagacttactaattaatactccactacaaaattagtgctctcaaaacctaggagacaaaaataaatgttgagttttaggtagatttttatccaaaatgaggatatagaaacttgttataaaaaagtaataccttataataaacctttggaaccattaattaacaaaatataatttgtttcacataaagaaaacatatacaatgttactttgtacataccaaaacataatgtttcactaagggtagctgtcacacacgcaatttctgggttaagtttttgcgtctaggcacaccctagaccagcctttcctcaagccacaaagtacacacacaatatttatgaggctctccccaacttgaatctcattgatttccaatagattacaagaactctctacaaagactcccataatctcattgagtagttcacttgcctttaggaggcacgaggctcttcttttatagaggctgcaacaagcagtcctaatcccaccagggaactaacatttgagtcctagtctaactctgattccaagctcaatagacgccaccttaagtaggactcaaagtcctactcaatctcaaactcccaagctacagcctactgcatgaagacttagtcttccaatctgattaggagtctttacgtgtcagaagtcccttccctcctgcatcgggtccctgtctcccactctgactagaagtcccatgccaatgggagtttcccatgctcagcccacagtgcttgctactgcagatgatcacacctttcttgggctcatcccaatgccaagatgtgcttgactcagtctgcctgctcaagactcgtgttgctgtatcagtgcgtgctggggtcacgcatcaagacccttgctactaaggtcgtgctcgtccttgttgcagcaaggcttccttcatccgaggcatccatctaagttcccttcaataactgtgtcattgcatccataggccgcaccaccttgtggcaccaagcctgcgcctgtgtgcttgtcttagcatgctgccacatcaaccatgttgtgcattgctgctactcaagcctgccagcagccaacctaccattctgaggtaaccttcccacacttttgcaccttactttgctcatgggtcactcaggggcaaagttgttgcccgcctaaagccctagtgccaccaagcctgttggtttacttcaagtaagataactatcataaccccccacttaaacttctgatgatttgttgatagaccatattcatatgctatgcatcaggagtccaacttttgcaccatcatatgtaataatagcacaaggagacaatatatcaatactggtcttgaccgaaaagtacttctaggctatcttgcccttttttttttcccccctgtccctcttaatttcagaaaaatgacacttttgccatgaaaatgacaaattaacaagataaaattttaattgtaaaagatatcatggaaaacacagctcttgaaatgtgagaaaaagtaaataaaattgatctcatattttcctttgcaagcataaaacaggagtaaatttcatacaacagagtatagataacaaaaaacccactaaaaaaaatgatctcatgaataggaagatatgggaggcatgaggtttctgtcaggagataaacttaaaatggagccacaggagggaggttattgccttaaaaaaatcaaaatttaaagccttactatgaaagcaacttgaaaatttcaaggactctcaattacctcattgtaaacttcagcaaatcttttgtttccaactctaggagatccaaagttatacatagtcacagaaattaccccagcttgcttcactcttaggtgttctcttccagtgaataaaaaactcggtccatttaactttccaatttcccattttcctatcctgtaggatgctcgctgttgaatataatgtatttatagtgtacaatctttctttcctttcttaatataggtcacatatatggtagttagttcaacctagccttgtatatatatttctctattgtaaaaagttaatcctatgaatgagaattaaggttttctctctctctctttcaacatggtatcagagccaagggagaaaactttattctttctggtttacccgcgtaattaattccgggaatccgtccagtgaccgtgtttcattccgatcaccttttccatctcccaaagctttccggtcaaccatatggtggtcagaaaaccctcatcaccgccaacatttttccggcgatattttccgacgactttttttttttctggcgatatttttcgacaccgaccacatcatcaggagtgcaaaaaggagatctgcaacttttctcaaagcaccggagccaaaaaccaatccatgcgcctcccatgcgccggcgcgtgaggatgcatgagggcgcatggcccactttctagtgccgagtttctaccagtaggctcgtttggcgccatcttgcacttctaagcctccgtcagtcctctccaaaccctgcttctccatttttttggcatttcaacctccgcgggtcttcttttagcctcctccagcctccgacgacaactcccttccttggtcaagacctgtgtgtgccttgggaaggtctcttcttcatctccagtcacttttctcctttgtttgggtctcgacataccaggttcttcttccacaactgtgatccgacctccctttagggctctcttcgatccaaacgtgattcaatcttaggtgaagtggatatggcgactaaaaatcctatttttacatccgtcatctctggatctcctactatcacatcggaaaaattgattggtagtgagaaaagtggatatggcgactaaaaatcctatacttgtgtctcgtttctaaagcgtttgaataatcgggcaaagtctccttttgaacttgtccacactgatgtttggggtgtgtgtcggaccgcgtctactttaggattttagtattttgtcactttcattgatgactattcaagatgtacttggttattttaaatgaaaaatcgagctgagttattctctattttccagaaattttatgctgaaatccaaacacaattcaatgtttctattcgagtgttacgcagtgacaatgctcgggaatatttttctacaccctttacttcttttgtgtcccaacataggatcctccataagtcgtcttgtgctcatacttctcaacaaaatggggttgctgaacgtaaaaatcgacatcttgttgagacaactcgtaccctccttcttcatagtcatgttctttttcgtttttagggggatgctgttcttacagtctgttacttgattaatcgtatacccttatctatattacatgaccaaatccctcattccctcctttttcctacccaacctctttatttccttcctcctcgtgtctttggttgtacttgttttgttcatactctcacacctggataggacaagctctccaccaaggctacgaaatgcatcttcttgggatactttcaacttcagaaaggctatcgttgttattcccctaacactcatccttattttctctccgctgatgtcaccttctttgaggactctccattcttctcatcctctgaatctcttcccatttctgaagtattgccacttccctatatatcccccccttcagatgcactctcttgtcctcttcaggtttatcatcgtcgacattgtgttgttgctcctcctctctcttcagctgaggtacctgatgactcacctcctgtcccaccgatttctcctaccccgaccctttcatctacttaccatttgcctattgctcttcggaaaggtaatcgatctactcgtaatcctcatcctatttataattttttgagctaccatcgattattttcatcctattctgcctttgtctcaactttatcctctatttatcttcctaagagcactagtgaggcactttctcatcctgggtggcgacaatcaatggttgatgaaatggctgctctgcactccaatggcacatgggatcttgtttctttacctcttggtaaatctacagttggttgtcgttgggtctacactgttcaagttggtcctgatggttaggttgatcgccttaaggcccgcttggttgctaaagtttatactcagatttatggttgtgactatagtgacaccttctctcctattgccaagattgcttctgttcgtttatttctctccatggcaactatatgtcattggcctctttatcagttggatattaagaatgctttccttcatggtgaatttctcgaggaagtgtatatggagcaaccacctggttttgttgctcagggggagtctggtttagtatgcaagttacgccggtctctatatggcttgaaacagtctcctcgggcatggtttgggcattttagttcagttgttcaagagtttggaatgcttcggagtgaagcagatcattcaattttctatcatcataactcttcgagccagtgcatctatttggtagtttatgtggatgacattgtcattaaaggcagtgatcaggagggtatccaaagactaaagcaacaccttttcaaccattttcaaaccaaagacttgggcaaactcaagtactttctgggacttgaaatagctcaatccaattcaggtgtggttatgtcacaaaggaagtatgccttagacatcttggaagaaacaggtatgttagaatgtaaacctgttgacactcttatggatccaaatgtcaaacttgtaccaggacagggggagcctctaagagatcctgggagatatcgatgacttgtaggcaaactgaactacctcaccatcactcggccagacatctcttttcctgtgagtgtggttagttaatttctacagtcaccatgtgacaaccattaggatgttgtgatccgcattcttcgatatattaaaggaacaccaggccaaggtatgttgtatgaagagaagggccatacccaaattgttggttacacagatgcagactgggctagttcaccctcagataggtgttccacctcagggtattgtgtttttgttggaggtaacttaatatcctggaagagtaagaaacaagatgtagtggccagattaagcaccgaagttgagtatcgagctatggctttggcaacatgtgaagtcatatggttgaggcaactccttcaggaattgagatttggaaaagatgaatagataaagctagtctgtgacaatcaggccgcattatatattgcatccaatccagtctttcatgaaaagaccaagcatattgaagttgactgtcacttcattagagataagatcgcatcaaggtgtgtacaagtttttttaattcaaatgatcaactagtagacatcttcactaaatctctgagaggtcctaggattaaatacatttgtaacaagtttggtgcatatgacatatatgctccaacttgagggggagtgttaaatataatgtatttatagtgtacaatctttcttttctttcttaatataggtcacatatatggtagttagttcaacctagccttgtatatatatttctctattgtaagaagttaatcatatgaatgagaattaaggttttctctctctctctttcaacactcgctatgtccttgctgaactccttgcgaatgttaggaggcggcctcttagcttgcactcggtctggattaggatcctcatgataaggctttagaaagcttacatggaatgatgggtgaagctgtagtctctctggaagcttcagcttgtaagcaacaggaccaattctcttcaaaatttcaaaaggaccatcatacctcgagatcaagcccttctgatactgcctgctcttgattttcttccaaatatcaggagtgagctcgagcatcactctatctcccacctgatattctagtggtctcttccctccatcaacatacttcttcatgcgccggttcgctttctataaactctcctgggcttcatcaagtaattcttgtcgggtcttagcatacttctgtatgctgcaagacttaagcactgccttggctaataattggctagcacatccataggcatacgaggttggaacccaattaccacctcaaatgggctcttccctgttacagaactctgatgcaggttatacgacaactgagctacatccataagctccagccagttctgctgcgttgccgacacaaagtgccttaggtattcttttaacaaggcattcaccctctcagcttgcccatccgtctgagggtagttagtagtggaaaacttgcactcagttcccatcatcttgaatagctctacccaaaatttgcctataaaccgtgagtctctatcactcactatatcctcaggtatcccaaagtattttaccacattgctgaaaaaaagtcttgcagcttcctcaacagggcattcatgctgcactggaatgaatacaacatacttagagaatgtgtcaactaccacgagaatagaccgatacccctgtaccttaaggaatcttgtaatgaagtccattgaaagacaccgccatggtctttcagggaaggcagaggatgcaacaaacttggttccttcttcctctctgtcttatccatctgacacaccagacatgatttcacataatcctacacgacatccttcctctttggctagtgaaaggatcgtgaaatcaaagaaaatgtcctctcttctccagggtgacctgcccacttagtatcatgtgtttccttcagaaactcccgtctcaattttctggagggaacatacaacttcctgcccacatagtatagcaacccatcatccaaccagtagtgtctagtggtgtcttcctttacttgatccactagtttgttgtatatggagtcttgtggagcttcctgcctcacccttgcactgaagtctgccacaacttgggatagggatcccacaaattccgttaccttcttgcgactcagggcatctgcaacttgattatgcctgcctgctctatgcacccacaaaaagtcaaagtctgccaagaacccctgccatcgagcttgcttagcagtcaacttcttctgagtcgtaaagaacgtgttagccacattgtttgttaccaccatgaacctagtgcccatcaagtaatgcttccaagtgtcaaggtagtagatgactgcaatcatctctttctcatgcatggagtacctctgctccgatgcatctagctttcggctctcaaatgccaccaggtgcccttcttgtaccagcacaccccttaaagccttgtctgaggcatcagtttgcacctcaaatgggagctcaaggtcgggcagtctcaacactggttcagaggttatagcatctttgagtctttaaaaagcatcctgacactccagttcccacttccactccctctctttcttcatcaaatcagtgagggaatggctgtcttggagtagccctgaataaaccgcctgtaatagtgttagctaacccgagaaaagaacgcaattcaattacctttgtaggtgtaggccaatcccggattgctgccaccttggatccatccatgcatatttgtcccttggacaccaagtgcctttgaaatttgatctcagtttgtacgaacttgcatttctccttcacatacaacttgttcccccttagtctctaaaataccttctcgaggtggactaggtgatcttgtagagtctggctgtagatcacaatgtcatccaagtataccaccacaaacgagtctaggaagtcgaatagaacgtcgttcatgaggttacaaaatgtggcaggagcattagttagcctgaaaggcataactaagaactcatagctcccatatcgagtcacacaagttgtcttggattcatctcccttagctgtgtgaacctaccaatatcccgatcataaatccagctttgtgaagtactcaaccttagtcaacctatcaaacaagtctgtagctaacggaatcagatacttgttcttgatgatgaccctgttcagtgcccaataatcaacacatattcacagcaacccatcctgcttcttttagaagagtaccggtgccccatacggtgcccttgaaggttggatcagtcctgcatccaacaactcagtcaactgtcccctcagttctaccaactctgaaggagtcatgtgataggggacttgtacggggggcttagcccctggcactaactcaaactaatgatcagtaggcctcctgggtggaagcttcttaggtaactccgaaggcatcacgtttgcatactcttgcaggattggcacaatctcgttaggaacttccaccatcttttctggcttgatctctatcaaggcagcaacataagtaagttgctccttcctcaatcccttctctacctgtagggcagagacggtctcttccttggatggtttcttaggtggcttgctcagtccacgcacgtagcaaggctgtgtctctcatccataatgaagatcccgttcaaatgtggcagcagtgctacctttgccctctagaaaaagtcattgcctaatatgaagtcgaaatcaaccaacggcacactcaggaagttgatggtacctttccagtcccccaactgtaccatcatgttctttgctaagccatgggtctcctgtgtctggctatttacggctttcagcttactatcatccttgctaagcttcaagcctagcctggttgcttcccgcgtcaaaacaaagttgtgagttgtcccactatccaccgaagccacaactttctgtccacccatagccatctcaacatacatcagtcccctgtgagtctctgctcggattgcattcaggagctgaagagggttcattctcgtgggggtccctgactcactattgtcctcttcagcagcaataagagcattcagtttctccttctttggcagtcccttgctctatgtggcccattgcatatgaaacaaccagatggcttggttgcttgtgaggaatttgccttctcccccaccttggcctgtgaagactcaagctttttgttcagtctactgccattcttcttggacaatcctttttacctggttgttgctgttggttcttccctttctgggtcgtagtggaaggagaacttaacttctagtctatcaagcaatcatcagccaccatagctgtaggcaagtcttgcaccccttgcctcctcaattccgtttgagcccacccctgcaagccagacatgaagttgaacagtttgtcttcttcggacatgtttctgatgtcaaggatcaatgagctaaattccttgacatagtctctaatagaacccgtttgctttagtttcttcaaagactcccgagccacccacgccttgttcgtgggaaggaactaatccttcaattccttcttcaacatctcccaaatacagcatcatcactggttctcgtttgccaccaaagtttagcatctccagagagatacatggatgtgaacattacttgttcgtccgtgggaatatgagcagcactgaaatactgctctatgtcccaaaggaagttctccaagtccttgccatttcgggcaccaccaaagggcttgggttcaggcactcacacctttgtaggggttggttttgaaatggatggtgtgccctgcaacacagctcgcttcagcaatgcgatccccccctcaagagatccaacccgtccacgaaattcctctactgccgttttaatcattgttgcaagggattccatcatctctacatatttgtcccgattttctgcaagtccgcgctgcacaccgagttcctcaaccgtttctgctactcttgctgacagagtagtgtctccatcaagagaatcccccacatatgcctccaggcgtgtgatctgttcacaaattgcatccatagcactgcttcttgcggccatcaagctctgataccaactgtcacacacgcaatttctgggctaagtttttgcatctgtccggtgtctaggcactccctaaaccagccattcctcaagccacaaagcgcgcacacaatatttacaggactctccccaacttgaatctcattgatttccaacaaattacaagaactctttgcaaggattcccacaatctcaccgggtagttcacttgcctttaggaggcacaaggctctccttttatagaggctgcaacaagcaatcctaatcccactagggaactaacattcgagtcctagtctgactctaattccaagctcaacagacgccaccttgagtaggattccgagttctactcaatctcaaactcccaagccacagcctgctgcatgaagactcaatcttccaatctgattaggagtcccttccctcctacattgggtctctgtctcccactctgattagaagtcccatgccaatgggagtctcccatgctcagcccacagtgcttgctgttgtagatgatcacaccttgcccgggctcatcccaatgccaagacgtgtctgactcagtctgcctactcaagactcatgttgctgtatcagtgcgtgctagggtcacatatcaagacccttgttgctgaggtcgtgcttgtccttgttgtagcaaggcttccttcattcaaggcatcaatctaagttcccttcagtacctgtgtcattgagcccacaggctgcatcacctcaaggctccaagcctgtgcctgtgtgctagtctcagcatgctgccgcgtcaaccatgttgtgcgttgctgctgctcaagcatgccagcaactagcctaccattctgaggtaatcttcccacacttttgcaccttgctttgctcatgggtcactcaggggccaaggtgctgtctgcctgaagccctagtgccgccaagcctagtttgaggggctgatagtagcccatactacaaatgaacaaaaacaaacatatattacatcatttcttcaaaatgatttagtcttcctataatacaaaggcaaaagcctcaaaatactctcaacatgaatgaagcagcatccaatcaacaggacatgcaaagttcaagcattaactctagcaagtgtcttatgacttgcatctaaaagtggaaaggataaggtgagttcacaactcagttagaaagtttataatcatcttacgcatatttttaaaaaccttgaattaaacatatcgcaacatgcatgataaacattttataaccattaacaaatatgtaataatgtcagatatgcatgttgttaatggtttcattaaagctttgcctcacccattctctcacacatgataaattgctaatccccaccaatgtacatatcaaccatcaatgctctaaaaggtgctttgttataaataatgactattctgggactataagttatatcccatatcttttaggactcatacccaagggcaggaccaacttcgtgtcttttgggacttctacccaaggacaagaccaaccttgtgacttttaagactataatccaagggcaaggccaaccccatgtctttaggaactaaaacctaggggcaggatcaaccttatacacccacatcggagtgtcttcatcaaaggctttagggattttcacccaaggacacagtcccacataaataatatatctaagtataatactacaacttctcatagatactttctgttgtcaatttgtcctctggatattattggatactgttccataccattcttgcaatgtaaccacatcattaaccatgcccacaatactgacatcatgattccttatccaatacatttccaaacatcatggcaagatctaaaattttcctttctccgtgttttattttcttgcactttcttagctaccaaacatgggactcaaagttgaattccctatgatcaatggctagatcttcatttattcaaaggaggattgcatctaagaggaatttggtgaggagttcatctcttgtgataaaattccatctctattctctaaaatctcagctattatgggacaaaattctctgcaagtctatctagactagatatctttgatgcttacattggctcaatgaatgcttatctttattattttatttattgatgataaagtttgatcagggatgtgtcaaatcttagattatattttgagatgaattaaggatcaaaagttacaaagattagaattccaatccaattcttagctgagatttaattttagatgtaagactttctctagatagttttaccatttgactaatcaattcactaccattgttatgttttcgtgaagattttacttctaaaaatcaattcaattgacaattcaccacattgatatgattttaagacattagataatcacaattctaatttgcatgtcaatctttttgttaaaagttacttgtaatcccagataagacgaccaaaccgttgtaaaacaagttgtttgtccttttttagtttttcttgcttttttttttgtttggaggataaatggttcagcaatacttttgcttatcaaaatcataagtgagcaagacaaaacaaaccatttcaacaatttccttctttgataagaatcttgaaagtaactctcaagaaacaagtcataaccatgaaaggaagaatgtgaacattccaaggaaccaggtgcaagaaaaagtgggggagagcttgaacattccaagctactaagatcaagaaaagaagttaaaggtttgctttagaaggaataaagaaactaaacatcttactcacttcctaccctcttaaccaaacatggtaaatctagaaattttaaatgagtcttcaaaatcaaataagtctcctaaattgtcttctattcaaggacctcaatctaatctttgatgtttcaattgcttgtcttaggtcatgtacttaatatcctatcttcaacattgtctcatgtagtagacttaaatccttttaacttctactactaatttttcttgtgagactactactagatttatacagaaggctttagaaaatccaatgtggaaagaagcaattcaagaggaaatgagagctttgtataggaatgagacatgggaacttgtggaattttctcccaagaaggcggggggttataaatgggtatttatatgcaaaatttaaagctaatgggacaattggcaaatataaagccaagctagtaatcaaatgattcactcaaacatatgacattgactattgagagatgttcaccctagttgccaaaatgaacaaatgcaggttctacacttcttcgtcgccaacctagatggtcaccacatcaactagatgtcaaaaatgtatttcttgatgaaaatctagatgaggaagtatacatagatttgctccctagttttgaagcaaaacttggaaagaagaaggttttcaagtcaaaaaaatccctatttagtttaaagcaatctccaagggattggtttgaaaattctaagtcagttggtgatatggaatatatgcaaagttaagctgagcacaccatgttttataagcatactaagggagttaaaatcaccattctcattatttaggttaatgaaataataatgactggtactgatgtgacaaaatggaaagattgaagaaatcccttgccaaagaatttgagattaaagaattgggaaacttatgataatttcttggtcctaaagttgccatatcaaaacggggaatatttctgtcatgatagaaatactctttggaccttctataagaaacgggtatgttggggttaagtcaggggacatacctattgatgccaaccaaacaattggggcacctacaacaagcattactatggatgaggagagctaccagaggttagtagtactagactaggcattgctttctctatggggattgttatacattctccaaatgatgattatatgaatgtagttattagaatttcaggatacttgaatggaaggaacattggccaaaaaggactttttattttcaaagaatgataatttagaaatagaagcctgtaccaatgttgaccaggtaggttcaataagtgatagaagatctacttctagatactgcacctttgttgggggtaacctggtgacctgaagacgcaaaaaaccatctgttgttgaatgataaagtgcagttgattgagtcaaaattcccaatttgggagcatgtaactaaatctttggagtatgtaaatctgcttgacacatgaagtgcaatcactacgaggctaaagaagttacatgagtgatttcatgatcacagacgatagatgatcatgaaataatcaaatgcacagtgcactcgtttactggtattttctaaataatttcattttcttcaatctccactctccactttgtggacatctttctctattcctgagtttatattcatgtcagatgtgttattctgatttctgaactctgttcaattgaatttatatag

SEQ ID NO: 13571 - DNA, 18528 bp, Vitis vinifera
  Intron number 2 from transcript GSVIVT01018506001 (locus G SVIVG01018506001) derived from phytozome v7.0 (chr-ID chr1 6; pos 14107228 to 14125755)
ggcttcgtacaaggtgagatggaagtattcaaaagagttggcaaaacttctttttttgataactggggaaccctccatggccaaaattggtgaagtttctttcttactagtgggtccttttttgttgaatgggcttttgttttagttgataaatttttgcaagggtcatgcatgaacaaacaaactttttgatagatgacttttgttgattgtaagtgaatatgcacattgatttagaccatccaatttatggcctaattataggatgcattgttggcttgtttttatttttgtggcctatcttgatttttgaatgtaaatgcaaataaaaatatgtaaatttcatgaaatcatatatttttcaattgcaaagttcatcagatctcttgcatttatatggctaggactattaattggataattagggatcccgagctgctatcttaattgagctagaacgcatccttacacattctttaaattgtcttgatagcattgtgggttggcatatatttcttaaaccttttttattgttttatggatttagaaaatgttttatttcttaaaacatgtgtatgctttaaatcttcttgttagcatcatgggttggcatatgcttcttcttttttttttttttttttgatagataaacacacaaaatatgtattagaaaaagggcgcttaagaggcaacccgaagcatatagggagtatacaagagtcaccaaaaggcaaagacaaaaaaggcaaacactcaccagccctcaacaagaacccaaccaatcaacaaagtaaattaaagataagggtcctacatctaaacaaggcatatgtttcttaaactgtatagttttatgaatatagaaaaagttttatttcttaaaacatggaatattggcatctagtttatttccttttcactcttttatgtgccatattttttcctacgcaactagttgagggaaaaatgagaaatacaatgaggagatatccttattgtggaagattaaagataggagaaaaaagattaagagtaatcttaataaaagtatccttttggagttaatatctacccttaccattttaactactgaactccctcaaggccaaagcaatgcctaagatgtcttaagacaaagggttggtgtttgttgacgtagtagccaataagaagaagcatatgtatgccctgattggcactataccattaataagtttgtctcaaagaaagatgcgaagtgattagaggtacaaacaatcaaggaactgagatggtttaaggctgttaactttagaggcgaaatggtataggttgagggataaaactatgcttgaaattgtggagcaggaatgttgacatgaccattggtcttatgaatgaccacaatgtacctatttggcttagacttcttagggaagaccaaaatggtgcttatgcccttgctatacattgtggccaccttagagaaggattttctatgcatggctctagtggttataggaaaaaagttggatattgtagtcttatatagcatgaaactaaggatgagaactaaggcatgacctatctagttgtacttgaggattagaaaactagctgcttctaaatgaagccttgacctaaggtttgattggtggaatgagttagaactgaagccaaggcactagtcatgacaatgagagatatgggaagggccttaaggtgtccaccatcacgatttgaagaggaaaaagtgaaggaactctataaaagcacttagaaggaaagagacattgtataagcccaaggtcaaggagttattggctcgacatgtgatttgatgattcatgatagagagtttcttctacaatagagttcttgattaagtggtcgagacttccaaagaacaaagtcacttaggagctaattgaagttggagatggttgaagcattgtagtggtattaggaactaattcaaatgttccactttaagacattgagaatggcgtcaatggattaagtggagagtaattttgtgcaaatttgtgggttttccatgtctatcaaaaataaaagaaaaaaaacagtgcaccaaggtatataggatgtattcaacaatgtagaaaaaaacgatgtccccaaaaaacaacacactaaggtacataagccgtaggtgtccccaaaaaacaacacattaaggtacataagaagtctacaacacgtgtcaaaggagtcaaaaaaaaaaaaaaaaagagaacaaaaatcaattttctcttaagcaggaatccaaccaatcaacaaaatcaattagagacattaaaccttcacctatatacaatttgacccacaaaaagagattattaaggaataggctcttcagaatatggatagatcgctccttgttctcaaacaatctttgattcctcttttttccaaattgttcaaaaagtttcataaaggagtaatttgccaaaccttcatacgtctttttcttatgaaggatccattccaccctaaaagagtttctttaactatggggaataaaacccaaggaacaccaaacaaagagtaagactaactaccaaagaatttgtcttggtgcaataaagaagaatgtggccaattgattttattttattttttatttttatttttttttacttatgtaggatgcatctattaaccaacacccaccatcttctctgaagttgatcaagagttaatactattcctagacaagcttccctcacaaagaaacttgctttagattgaaccaagggattctaaatgacgttcactggaaaaggagttgaactcccttactttaagttagcatgaagagattttgcgaagaaggtatgattcctttcattcattggcgctactctatgcttttcctctctattcaccaccttaccttgtagtctagagaaaaatttctctacattatccaactcctaatcatttagatatctagaaaaataagggttctgttgagagagagagaaagaagaaaaaaccttaaatctcattcatataatgtctacttacaattgagaaatatatatatacaaggctaggagtcctaactaccatacatgtgacctatgttaacaaggaaagattgtacactataaatacattatattcaacactccccctcaagctggagcatatatgtcatatgcaccaaacttgttacaaatgtatttaatcctaggacctctgagagatttagtgaagatgtttgatagttgatcatttgaattaacaaaacttgtagcaacacatcctgatgcgatcttctctctaatgaagtgacagtcaacttcaatatgcttggtcctttcatgaaagactggattggatgcaatatgtaatgcggcctggttatcacagatgagtttcatctgttcatcctttccaaatctcaactctcgaagaagatgtctcaaccatatgagttcacatgttgccaaagccatagctcgatactcggcttcagcgttagatctggccactacatcttgtttcttactcttccaagatattagattatctccaataaaaacacagtaccctgaagtggaacgtctatctgtgggtgagccagcccaatctgcatctatgtaaccaacaacctgagtatgacctttgttctcgtacaacacaccttggtctggtgtacttttgatatatcgaagaatgcggattacggcatcccaacggctatcacatggtgactgtaggaattgactaacaacactcacaagaaaagaaatgtctggacaagtaatggtgagatagttcaatttacctacgagccgtcgatatctcccagggtctcctaaaggctctccctgtcctggtacaagtttgacattcgaattcataggtgtgtctaccggtttacagtctaacataccggtttcttccaggatgtctaaagcatacttcctttgggaaatgaccacaccggaattggattgagctatctcaattcccaagaaatacttgagtttccccaagtctttggtctgaaagtgggtaaaaagatgttgctttagtttctgaataccatcctgatcactgcctgtaatgacgatgtcgtccacataaacaaccagataaatacactgccccaaggagttatgatgatagaaaactgaatggtttgctgtattgcgaagcatgccaaactcttgaacaatagaactaaaacagccaaaccatgctcgaggagattgtttcaagccatatagagaacggcgtaacctgcacactaaaccagactccccttgagcaacaaaaccaggaggttgctccatataaacttcctcggcaagatcaccatgaaggaagacatttttaatatccaactgataaagaggccaagaacacatagcagccatggagagaagtagacggacagaagcaatcttggcaacaggggagaatgtgtcaccataatcagaaccataaacttgagtatagcctttagcaactaagcgggccttaaggcgatcaacctgaccatcaggaccagccttaactgcgtagacccaacgacagccaacggtagatttaccaaagggtaaaacaacaagatcccaagtgccattagagtgcagagcagccatttcatccaccattgcctgtcgccagcctggatgggaaagagcttcatgggtgctctttggaagagaaacagaggatatagcagaaacaaaagcagaatagggtgaagataatcgatgataactcaaaaaattgtaaataggatgaggattacgagtagagcgagtacctttccgaacaacaatgggtaagtcattaggagaaggcagagccggggcaggtgaagtcgaaggaataagaagtgagtcagcaggtgcctcagcaaaagggagaggaacagcgacacgagggcgacgatgataaacctgaagtggtcgaggaggcacaacatcaggtggggagacaatgggaatgggcaagacttcagaaacaggaagagactcagaagtggtggaaaagaatggtgagtcctcaaagaaggtgacatcagcggagataaagtatcgatgagtctcaagggaataacaacgataacccttctgaagtctggaatatcccaaaaagaggcacttcatggctttggcggaaagcttgtcctgtccaggagtgagaatatgaacaaaacaagtacaaccaaagacacgaggaggaaggaaataaagtggttggtcagggaagagaagggagtgaggaatctgatcgtgtaagatagaggagggcatacgattaatcaaataacaagcggtaagaacagcgtccccccaaaaacgaaaaggaacattattatgaaggaggatagtacgagctgtctcaaccatatgtcgattcttgcgttcagctaccccattttgttgaggagtatgagcataagaagactgatgaagaatcccatgatgagacataaacaaagtaaatggggctgaaaaatattccctgacattatcactgcgtaacacacgaatagaaatattgaactgggtttggatttcagcataaaatttttggaaaatagagaataactcagtttgatttttcattaaaaataaccaagtacatcgagaatagtcatcaatgaaagtgacaaaatactgaaatcctaaagtagacgcagtccgacaaggaccccaaacattagtgtggacaagctcaaaaggagactttgcccgattattcaaacgctttgggaacgagacacgagtatgtttcccaagctgacatgactcacacggaagcggcgacaaagtggaaaaacaagggaccatcttctggaacttggagagactagggtggcccagacgattgtgaatgaggagaggagcatcagtggaaatgcaaactgcaggagatgaattcgaggtgaggtgatagaggccttgagactcacgtcctatgccaatcgtcttccccgtactccggtcctacaaggtcacaaatttatcataaaaggtaatagagcaattaagagtacgagtgattttgctgatggaaataagattaaaaggacatttaggagtataaaggacagaagtgagaggtagagaaggcagaggaagggccaaaccaatacctttagccacagtttgagaaccattagctaaggtaacagtaggtaaagcaaaggtagtagtaatagaggaaaaaagatccttattaccagatatgtgatcagaagctccaaaatctagaatccagggtctaagagaagatgtgtgggtaaggcaggcagaggcattaccaggctgggcaacagaggcaacagaagcctgagatgcggaagagctcggaggctgaggcagcggagaatcagaggactgggccacatgggcagtgcgaggaggccgtccatgtaactgatagcaacgatcgcgagtgtggccaagtttattacaataggtgcaatgaggacgttggcctctacctcgggtaccactgcggcctcctcgagatctagtttgagaaactaacacaaaagaatctgaagtgctatcaaatgacaaagtttgagtggaggagatacggaggaggcaaacaaacacatcatccaaggacggaactgatgagctaccaagaatctgatcgcgcacaggctcaagatccggacggaggccaataagagtaagaaccatgaagaacttgtcaagttgtgtttgttgagccctaacatcaggagtaagaggtatcacagtcaagaactcctccttaagagaggcaatctggccaatataagtagatagatccaagtcttgttggctgatatggacaatagcagaagccaccttataaagacgctggatatcattcatgtataatcctttggtctgagtccaaaatttaaagcaagttttgtaggctcgaagatgaagaagaatcttgggatgaaccgattgccataatacactacataactgtgcatctatcttcctccactgtacgcggtcaacctcagggatatctgtctcttgtgtaatcagttgatcctcatatccttgacccataaaccaaagttcaacagaggcagaccaggaaagataattgtcactgccaaccaatttctccgaagtaatcataggagatccagatataacagaggaaaaaatggaagttttaatagccatatctacttatctggagaatgaagtatatttggatcgaagagagccctaatacggctgcagatcgcggcgtggcaccactggaaagggagacggcttcagatcgcggcgtggcaccacaggaaaggtagaagaacacttccttaggcacgtgcagggattgggatggagaaaaattagccgaagcccgtcggaaaaattgtttggagggccggcagaggcaaaaaaccccaaaagaggtacgtgcagggctcggatggcagaaccagggatgaaggaaggctagtcggcgtcaggtgaggttggaggaggaggcgcttggccgggaaagtcctcacgtgccctcacgtgttggcgcgtgagatgtagttgccgaccgaaaaattgcgcgtggccggtacgtggatgatcttttggttccggtgccttcacaaaagttggagatctcctccaggcgctccttctggtttggtcggtgttggaaaaagacgtcgccggaaagttcgccggaaaagttcgccggcgatgaatgttttctgacgacgatccgactgaccagaaagtattgggagatggggaaggtgatcggaatgatacacggtcatcggaaggtttcccggagttgatgacacgggaaactggaaagaattaggttttctctcttggctctgataacatgttgagagagagagaaagaagaaaaaaccttaaatctcattcatataatgtctacttacaattgagaaatatatatatacaaggttaggaatcctaactaccatacatgtgacctatgttaacaaggaaagattgtacactataaatacattatattcaacaggttccaatgaccccttttaccagtttagtcccacaaatctgccacctaaactttttttgataaagctaaagcatatagagatggaaagaaacatacaagggctcatccctatgccacctatacttgcaaaattttaccctcctcccatgtcccacaaaaaggaaattctactattaaaggtgtaacctttcttcctgatagctttccataacctaacatcatacccatcttttacatcacaagaaggccgatctccttcgtcctccctatattataacttatctctagatagcttccctttagatgtgtatcactaacttcacttacaaaaagagcctttttaagcaaagaaaaaattctaatgcataaactctctttcttttctccatgcagatggttgatcacattgccctatgaaattttctctctaccacccctgaggaactccctttgcatcttctcaagcttcattatgactttctagaaacataaaacaatgacataaaatagatgggcaatttcggttaagttgaagccctttgaaatcactattgaggaggtcgaggggggcttgtgaggaatcattttggtgaggagtagaggttcctctagttggattagattcagaaatgtgagcttgtctcaattgctagaggggttggaagcttgtagcaataaagtagatgggaaggagttttgtaaggtttggaaggaaggagggagggctttcaagatggaaagccgttcaaatggagctagaaggtttattcaatgttcggttaaatccgtggaggccaagaggttcatattgatattccctgaaggtaggggagtggtgggagggtggtccattctagccaagaagttgaaggatcttgttgtggcctctttctcttactttcaaaggggtagagaagatgcaccaaagattagaggagggaagtagagggcaaatagtgcttgaaaaaggtcttttctctaaagtggtggaaagggaaaatggtgttagggttgtggcttcagttagacttgttagaggtgcaacaaagggaggtgatgttgaagagttgtttggtggggggatgggaggagttttctgattccgttcttgattcacattcaccaaagaggtgggttaaggtttggagctgttttttttttttttttttgcgggggggagggggcggttgataatcgtcatcttgttagttttaatgggcttggcttcagattgagggaattgcccttttaaactttcaggggcttgaggcttcttttttcgtcgagaccttacttgttaaaggtatggagaacaaaagttatggagctaccatggaggaggatacaatggttttaccggtggagaatagtcattcaagctctgatgtgaccctcttaggtgaggcgacaaggtttccaggttcttttcttctccttgtatcttctttggggatggaggcctctctttcttcttctttctttgagggtggcttggttcttgagggttatgagggagtttgtaatatagttttgcacaaggtggtagtggctcgctgaggatggttttggtggaaggaattgtggtggagtttactaggaaggaggtagggccacttgatgttttagtgggtgagaggttggggaagatggagaggttcactatttagcttttaggggggatgtcttgttggaggactggtgtctcaacaacttcgttgctttcactaattggcttggaatgttgacggaagggtatgaaatagagacattgacacttctttaaaagatgaagactagaaaggaggtgaagggctgagttggtgggaagaggagaaagaactttgtttcttctaaattcgaaagggaattgaagaagctcaatgatttgtgaagtacaagggagtagaaggttgtctttaagaggagctaaagatagggatgagaaaaaaatcgaaaagtcaatgcttaaagttcaaaaagcatatttagtttgtacctagtttgttttaaggatcaaaggtgcttctgctattggtccactggtgaggagccaaggaatgtaaagtttcttgggtttaggagtagagaaggtaagagggttagtcgggggctttctattttactaggttattagggctttgtttttgtatcaggtggtggctgttgttgttattttccttttgcttgtcttttggcgccaattgtatactctctgtgtgccttgactttgatgtgcctttttcaagcacttttaatttaattgcttattttacctatttaaaaaaatagatgggcaagttggataatttccttgaaataatatattgtattagtatgttttagagatattattaaaatattgtaatgttagcatcccacattggaaatttacaaaatgtggacccttcttagctatctattgtagcaatcttagaagttgagaggtagcctctagagtaaatctttttggtgttattgcactatcatttcttcaagtgttgtcttcctattggcccttagcattatatgtcctcctcgatagtgtttaaggttgcttgaatccatatgagttggcaatcataagtcttgaggttgcttgagggttttatgaattttttgaggagatttcagtttgtgatacatgtatagttaggatgagaattcaatacagaatatttgtgagacaacaaaaagcaagaaataaaagaggatagaacatgtctaacccaagaaagtctagaatccaccagagaaactctgaagaagagatttccattgattgaaaattcaaaacaaaaggcaaaattcttttcatcacttttccctcctatttgccccaataacccttcaatgtcttcacaacttccaacacttaggaaatgaaaactcataaatatctaccataagtaaccaagtactacaagtctcaagtttcctaggtaatttaaatattattttaaaaacaagttaacttgactattttcttgggactagttgtcctgtgtcaatttgatttttattattagaattattattatggttattgttattattattattattttttattttattttattggaaacgacacaaagatatattgaaagaaaaagaagtacaagaagaaggatgaaaaatcctcccgccaaagacaactaaattacaggaaaatacacataaaacaaacgaactccctctaaggaccaatccttatggagtacacaccgctatccaatcaagttgaatcacattaaggggattccccttaaatgccttggaacagaaagcccaaagagaagcaaggaaaacaatagagtcccaaaggaactctgaattccttgctttatcctggaaaatcctcgcgtttctttcccaccacacaactcgaattagagcgatactcgcagcttgccacaaaactatccccctcttagaagtaccaaagcctttaaatttgatggacatcatgtcagatatgctcctcgggggaacccaatccatcttagctaactgaaataacttgtaccacaacccaattgttaaggaacaatgaagaaaaagatgatctgttgattccccatgcttcatgcacagaatacaaatatcaggactaagggctttatagggtcttctcacttgaagcatgtcattagtattcaccttcttgtgtgccactaaccagacaaaggacttcactttgaaaggaacttgagaattccaaacgaactttgaaggaaagtcctgaggagatccagaagattgagataatgctagaaaaaaggatttgactgaaaaaagccttgaagaggataatggccagaatctggcatctaggaccgaaggagatagatgcaattcatcaagtgaccgcatgaggccttctaagtcctctatctcagaatctgacaggttacggcggaaattgaaattccaagagaaaggacgagtaggaccgagaactgaagaaatagaaatgtttttatccacgactactctaaatagtcttggatattgggtttccaaaggttggtcctcccaccacaaatcttcctagaatcgaattcttttcccgtttcctaccacatatcgagtaaacaaggaaaactcttgaaagacttgtgcaatagccttccaaggacagcgatgtgaccatctgactaaagtgttagcatcccaaccattggagtgtgaaccataaatgcttaaaatgacctgatgccagagagctaaaccctctctaggatacctctacaaccatttccctagaagagcgagattcctccaagaaatattcccaaaacccaaaccccctattgccttcggtttgcacacaacctcctacctcactaaatgatctcttttgccttccccaatccctgaccataaaaaatccctttgcaacctctcgatttttgcagccactgaagcgggaatcttaaataaggaaatgaagtaacatggcaaatgggtaaggcaagattggataagagttatcctccccccgaaggataagtaggccttttgccacccatctaatctacttgagattctctcaatcgctggatcccaaaagctacacgccttagggttcccacccaaagggagacctagatagagtataggccagccggatgccttgcaatcaagcatcacagccaatcttgaaagatgagcctaatcaagattgatgccataaatactactcttgtcaaggttgaccttgagcccagaaatgtgcctaaatactaacaaaagactcttgagagtctgcagctcttcctctgtgttagaaaagaatatggtatcatcaacaaattgcaaatgggacatcctagttctatttctacccaccttgaaacccttcaacatatttctttcctctgctctcataagcatcctactcagtacatctgcgactaaagtaaacaaaaaaggggataaagggtcgccttgtcttaatcctcttgatgccttaacccaccctttagcgctaccattcaccaagattgcataagatactgaggataaagatccactcatccatttcctccatctaggactgaacccctttttttctaacacatgatccaaaaaatcccacttcacgtgattgtaggccttttcaaagtctattttgaatacgacgcctttcttccctgaccgtcttctctcgtccactatctcattcgctataagaaccgcgtctaatatttgtctcccttgaacaaaaacgccttgagtatagtggatggtctcatgtagaacccctcttagacgccctaagagcactttggctattattttgtagagactagtgatcaaactaatgggtctaaagtctgatattctctttgtcaaattctttttgggtaatagaacaatgaaagaggcattagtgctttgattgataatttcactcctatgaaattctgcgaacactctcaccaactcctccttaatcacatcccaacaatcttggaatactgtaatagtaaagtcatcaggcctcggagccttgtccctatccatctgaaaaatggccttagaaatctcttcttcagtgaaaggggagtccaaccttaacacgctctcttccgaaataggggaccaatctaatccttcaacatcccaagactctcctgtagggctcgtgtaaagcttttcaaagtaaagtaagatctcctctgtgatactctcggcattcttcagcactaagcccctttcattctccaactccttgatatatttcctatttcgcctgccattagccactttatgataaaacttagagttgcaatcccattccttgacccatttcaccctaactttttgtctccaatggatttcctccctcaaaattaattcctctagctccccttttcttgaggctctttgacttaacatatcagaagtgagaccccctacctgctcaatgacatcaaagttagctaaatcattgatgatactttttttcttttcttttcttttctttaagctctccaaaagaatacttattccactccttcaatttggctttaacatattgtagtctcctcatgaacttgtggccttcccatctgtttccttgaaacccgctccaccaatttctaaagttctccttaaaattagggtgttgtaaccacatattctcaaacctaaaaggtgttggcccccacatgaacgggttggtatccataacaattggccagtgatccgaggtccttctaattaaggcttcttgaaggccttggggaaagagcagcccccactcatttgagtagagaaaacggtccagtctcttacacacgggagactcttgcatatttgaccaagtgaatgaagcattccgaagaggtgggtcaagcaattcacattctctaataaaactatcaaagtccctcatgcttgatgttagactagaaccccccaatttttctgagcttctccttatgacattaaaatcactgcccacacaccataacggataagttagtccatatatgtcaagaagttccacccaaaaatccttcctaagtgagggactgtttggaccataaacaacaaaaatccaaagaggtccacaaccgtccaaagcgaacttgaccgagaccgagaaagatcctattaccacctcctcactacgcagattttttgaatcccaaatgatcaaaatcccacctgatgccccagacgccggaagagcaacccagtccttatttctgatattaatattatggttattgttattgttattattattattattaatgatatcattattcttattcttattattgttattgtcataattatttttctatatggctttccctttgcaccaaggaatgtcctcgaatagatgttttgttccttattttaaatatgttgatttgtatgttaacaacattttaggtgtcttaaagatgagtttaggtcttatgggtaccttccctgcaatcaatatcatgcaaaagtttcgtcaagatgattggttagaaatatattcattactaggggataatcaaggttgatgcatgggaccggttgtacatggtagagcatcacctaaaaaactaaatctaaatctaaagctctatggtagtgcactcaatatttgcaataatatttaaacggtatcattattctaggaaatttaaaaatatttgttaacaatcacatcaattgcgcaggggggggggggggggggaaccacattggctcatacaccaattggatggagaactttaaactctagtgtgtaacagacaagaggtacaatctcttatgtctttcgacagtttggtggttttgcaatattttccttgtggctagatttcatcttaaggataactcatccttattatacgtttgatttatggatcaatgaattatttgttgtttctaacttaaaaaaatggattgcaagcaacaagcaagcacaatagatgtcttgatgaacaagaaaagaaactaggtgttaattaggaaactaatcaaccactcatctatctttttgatccttctttgtaaagataggtggtgtgggaatgagccgttatgtgattcattcccttattttccttagctagctcaaaggaggcgtgggtggtggatttgtggaattagtctaatggtagtggtttttggactcttaatttctctaggaatctaaatgattgggagattggtattgtggagcgttttttgtgttcaaactttaggataagacggtgaataggggaataaaagataaggtgttttggttggagataaagaatgattttttctttgtgaagtccctttactcttcttacctatagcctgcaagttctacccccttcccaaaagttgtagtttggaactattgggtttcacctagggcgagtctctttatcgggagactttgtggggtaaagttttgactttagattgtctccaaagaagagtcgattgaccacattttacttcattgtagtgtagtaagggctttgccacagcttttgttctctttctttggcatttcttaggtgttttttttcttagtaagagagaccttgttgagttggcgtgggtcatgtgttaggaggaaacagaaaaaagtgtgggggggagctcctttgtctcttttggacaatttgaaaggagagaaatagaagatcgtttgaaaatgatgagcacctttgtcctaagactaaaaaacttgttcctctgtaacttttttttcttggaccaagttgtacattgctgtaggcccaatgcctttatgtgattttattgattggttgggtccttattaagggaggaagtattttttttgttttccctttcccttttttggccatctcttggtggtcgttgtatacgtcctgtatactatggtgcactctttttggtatttttttggcccttttaatgcatttcttgttgaccgattatatatatatatatatatatatatatatatatatatatatatatatatatatatatatatatatatatatttatatagaataagaaactttaaacttatattgcaatgatgtataagtctaatattttttgtcatagatcctcctcttgtggcctagatatcaataaacaacactctgccagtcctaagacacacatatggtctagaatacgtgagattactcataataaaacttaaaagttgttaaaaataataacttagttgttataatgaaaaccctttgtagagggtagtcaaattttggatgtgtgcttattgcaaatgaggtcgtcagtttatggttaaagagcttctttaatggtgttttctggaagcttgacagtaagaagacctatgatcatgtaaattggggtttcttgcttatagttattgtgaaaatgagtttttggatagaagtgggttgggtggattgagttgtgtacctatgatcatgtaaattggggtttcttgcttgtagttatgtagaaaatgagttttggatagaagtgggttgggtggattgggttgtgtatctctatggctaggtttttgcttcttgttaaaggtactcccattggcttttttctaaatttaagagggttaaggcaaggggactctatttttctctctatttgttttggtgatggaggcttttacttgtcttttaaagagaactaggagtggggttttatcttgatttcaaggtgggatgtgttggatggtgttgattgagattgcaaggaaaattggtaaataggggtgaagaagatagggtgccatggatggtttcaaagattggtaacttttaaattttatactcttggatggtgcatgggagattagagccttttttggtagatgttatttggaatccattggttccaacaaaatgtttttttttttttacttgggaagtagtttagaaaagaattatgaactttagtgaatggatgttttatgtgcaatgttaaggatgaatctgttgagcacattctccttcattatgctagagcaagaagcctatggcagctggtcttttccttatttagaatagtatgggcgctaagttattcaatagtaatgacctttctaagttggcatagatcctttgtcgggaagaatcagaagaaagcagggaaaattgttcctttgtatttgttttgaactgaactatttgggaaagagagaaatcaaaggtgttttgaaaatttagagtacttaaatcgagattttaaaaccatttgtgtttgtaattttttggaattcattagagggagtatagatgaggtgtcaatgtcaatggtagactttattaattggttacgttgcaagtaattgagaagggggagggggggttaattttttgtttctctcttcttgttctttgcctttagatgcccctgtagatgtcttgtgtactttggtgtgtccttaagctaggtgcttttaatatatttctttgcttgcctacgaattttcttttgcatggtgggtcagtatcttcttcatcttctatattttcttgtgaaaattctagctggatgtgagggcggctttaatgagacgacttgcaccacaaggaatgcacactacttgaaaagtttataattgaagtagttatgctctcatactatgatttgatgtttcagcaatcatccttttggcatgttgctttgcattgttgttgcctaaaattattatactggctgtatctaagaacctttttcactatctaaacatttttgattctttcctgaggtatgcaggaaggtattcctattaataatcatcttggaaaagacagtattatgcatagggcatgggaaataatattttgtaaaaagttggagcatataggttggtttggatcaatatagagttatttcatcatgctcattctggggctgatgatgcaagatgaaattcccatttttagattcatctgactcttacattagtccatctacttttttatttttttatttttattatttatttttttagtgcagtgctttctgatttatgtttacccttttttcagctct

SEQ ID NO: 13572 - DNA, 5745 bp, Vitis vinifera
  Intron number 1 from transcript GSVIVT01029132001 (locus G SVIVG01029132001) derived from phytozome v7.0 (chr-ID chr1 1; pos 19295031 to 19300775 reverse strand)
cttcctttgcttcagtcactggcttaagcttgattgtaagtaacatggattttttttattttttattttttgtcattatctcacacatccatccacatttgatttagctacttttgggttgtaccctttcgaatatatgttgcatcgcataattattcggctgagttcttcattggattgccgacatagatcagaaaatatttatctaaacttagaggttactataatattgttgggaatccatcctaactttttttcccacagcttctgtccagtttcctttatggaccgaaattttgtctcatttatccattcttatctcatacaatgacaacagtgtcccttaaatcttcttgattcaaggctcttggttcttgatccactcttgacccctctacaatggacaaagcagtaatatattctgtgtaatgttgtaacaactttctctgttatttatttataagaaggaatcatcttaatcttaattagtaactaaaacctatgagataacaattattggaagctacaaaaacaagaaaaagaaaaaaaaatgttggataagaaaaaatatataaaaaaagaatgtcagaggaaataattattataatatagatattctagattaaaaaaaaaaaaaaaagtggacatacatgtggatatagattattgcctgtggatatagacattattattattattattattcaaatataacaaattgatcaattaaatataaaaaataagatttagataagaaaaaatgagaatataattgtaaagctatcaagagatgctctcacatggtcatagtgaactcttttcattaattgctactttcttattggttactacttttcaatatgacataaaagaaaagttatcgggtgttttaaaaaagcccaatcaagaaatgtgtttctctaacttcattggattgatgaataactgttaatatcaagaataatgaaagggcatgatctaagaccaccgtattataggttggagttctaatcctaattgatagaacaatctttacctttttggtatggaatgaaggtaagggtctatctactaaaaaactttaagcatccaacatcattggattagagttggggtatggtaattgatgaataactactagtatcaagaatagtgtatttgtgcttttgagttattacttattttacaaagattctgcttatttctttctatatctgtatagaaactttgagaaagatttcaagtgttaattatttaacactccaaagacatttccaaccaagcttttgaaatgagttttatccacattttgtctttcatcttatttcttcagcttttcattcacaactaaaggagcattttagaggttcacaaccaatcatgccaaatgtttttaggatattcaacatacattttttgacaaataaacactcaatcttctttttaatagacttgaattcccaatgcaaaaaatagtacaacaatcacatgtcgctcatttcattttttttttcatcatttcttttttgaacttttcaatcatttttcagcattttaactaaaaatcaaaccaacaacagaaagaacaacaataagtatgaatcttagagctacctttgctcttgaaacatagagtagctaggttcactcttgcttctatagaagtcgtttttggtgaagtagctatcaatttaattgtactagacatgaagaacttgtttcaaattgtacaaggccttcttcaacttgtaaaccttctttcctttaccaataacaacaaagtcttgaggttgctcagtataaattttttcattcaactttccattcaaaaatgtagattttatgttaagttggtaaagtaaccaaccttttttaggagccacaacaatgatagctttagtagtgtcaaggcaaacaacttgagcaaaagtttcatggaattgcaaccaaccttgctgcaaatattcaaaccctactatcaaaatggtttttcaccctatagatccacttcaccacaatcatctcttttccttttccttttcctttcatgaccagctgccagaatgcattttcctcaatgatatcaattgtttgttccattgcttccttcaatcttcatcttctattgcctttttcaaagctttgaggtttagtaatgcaaaaattgcatcccttataaatgtcactcaaactccttatttttcttggagttgaggatagtgatgaagagcatgaagttggagacccagtgaagggggcagtggaactgatcttagggagttttgaggtgataaaattgagcttccactattatcattttcgatggggcattggttggactttgtcaaagaaatttgtttggttggactttgtcaaagaaatttgttttgtttttttattcgtttgtttgtttttttttttcttttttaaactttgccttctcctaattccaaacaactttttcataaaaaatgatatctctacttatcaaattgtttgtttttaggttttacatcctataacatatgcaaatacatttttcacttacttcatccaatttactcctcttttcttttggtacttgtgaataacatatacaaccaaacactcttaagtgtctcctagatggttttcttccaccctgttattggagttcaatttaacaatgcttctattgagcatctatttaataagcatgcaataatgttaataacttcatcttggaggattttaggtaaccctttctcatgtagcattgctttagccattttcataatagttgacttttttcttttcaactactttattttgttgaggaatatatgcagcaatctgttacatctcaaccccttcatcttgatgaaacttctcaaattggcataaagtacattcttttcctttgtcacttctcaaggtttttacataacaacccttttgtttttcaacaaaactattgaattttgttaagaaaatgaacatttaaatactttttcttcattaagaacaccaaagtcaatgttgtaaaatcatcaataaatagtataaaatatttgttgttaccttgagaagttgtacacataagaacacaatcatcaacgtgaattagatccaattcctttgctcttcatgcaacttccttgggaaataattactatgatgctatccaagaacacaaccttcacatactttattctttccttcaatggtgttgagcaatccttataccatcttctttttgcaaagaaactttaaacttatattgaagttcaaagtacccaaatcttatatgcaaaaccaaccttccttaacatcttctactctgaaagctacattttaagcatatttgaagacaattagaacattgctattttttttatccatttttatctttgtcactacacttcttctttgccccttatcatagatggtacactcattgtcttcaaagtgaagtttgtatccatgctctactagctagtccacacaaaacaaattttgctccaaagctgaaacaagtagaagatttcaaatgtacttggttactattttagtttgaatactaaatgtgtcttttcccttgacatgcaccaaatcgccttttacccattttgacttgtgatttaatggttctatctatgtcaagaaaaatatctttattatcaaacatgtggtttatgtaaccactatcaatgaaccacatattatttctcttcttaatatctttttgacaagtataaaacatattttctttatcttttttttcttcaacacaatttgcttgttgattgttggaagtcaacaatcttttcttaacatacccaaattttatttataatagagaattggggcttccctttaaacaaacaatcattttcaacatgactatttttttatttttgcaaatattacatttttggaatgtgttagtgaattgtcgaaattagtgaattttctttgaccgttgaatatttgtctacctcttccatttcttcctctaccacttcctcttccatttctacctatcctagattgcaaatattacattttaggaacttccactatcgaatctttctttacctcttccatttctttctcttcctctctttctcatccatttctaccaaccctaggtgaatcacttttattttcattacttgtgggtttgttttcaacatttcttgagttaatgctcaacttgcactagatcgcactttcaatcgatttttcaaaaggcctcaatagtccctactcataagttttcaaggacctaaaaaatggctcatgtaagcttagctaaacgaggttttttttttttttttttatttcttcaaccatagtcataattgggtcaattttatcaagtaggctaattaaaattttctcaataattcttctatcattaatttttttttcacaatatgacttcatctaatttactaacaccatgaatttgaaagaggacttatttaaagtttcattttccctcatgttcatattttctagctcttttcatagagtttggagcattactgattactcttccatctctttggaactcctattgatgggtgtcccatacttctttgacttttgaagctctcataattcttgagaagtagttttgtcaatacttccttgagtgtttttgaatccatttttctcaacaattttaactaatgcatttatttattttcatttggagttagtgttgttgcatttttaggttgactcaaagctattttttttataaaaaaaatcacaaacatcttaaaacataaataatgttttcatttgcacacaccaaaaatcataattttcccctataaatgatggaataaaagaaagttgagaacttatacttttgttacttgcggcaaccactgatttacgctaaaaatccttgatcttctgcttcaagggtgaaggttccttgttattcttctcaaataacaactaggttgttgagctcattgatcacaactttaattctacatgatcttcttaaaccataacaactctgccttcttttgtttctctttctctatatacttaggttgaagcattgaaaggaaaaggcaacagagacagccccacctacttcataatttatatccttacaaaaatccttttgtacttatatcttctctcctccaccaaaccctagactcattgctacggattcgagtctttaaagaagaagagaaaccttagaattcctcctctttgctataatatgtgtttgtcaagattccatgaacaaggagcatgccagtactagagacaagagataagaagaatacttaaaagagagagagagagagtgaaaaagaaagtatgagtttgggagagaaactgcaaatacaaagctatccaacaataaaacaatttagagagttagagaaagagttagaaacataaaatgactagcttttatttaacttttgttggttgttatttcaaccaaaaacgtgggatagaaattgaagataacaaggatatttaaaatggaagactcagctgaaacttggtctccttttgtatttatttatttcctactactaatttacttgaagattgcaatccacatttttaacaaatttaatcaattaaatctctctacatggatgaataatattcacacaaaataaaaacacaaaaaactaatttttatatgagtgacacattatgtaacattttctttatgatgtttttagcgttaatttcacttttgtttaataggtagga

SEQ ID NO: 13573 - DNA, 2492 bp, Vitis vinifera
  Intron number 2 from transcript GSVIVT01023622001 (locus G SVIVG01023622001) derived from phytozome v7.0 (chr-ID chr1 1; pos 8125677 to 8128168)
gaggtcagttccaccatcaactagtcctttcttcattaaaattggtggttgaaactgagctttcagtgaaaagatacacatataacaccatttactaaggaactaatcttccaaatcatagaatctgcaacgttgatacccaaagcatggagttacatcatcaacttaatcataactagcattaatatcttgctacatagcctacattatttacttctgcatgtgatttgaccatatatagatcaactcctgcagtgctcaactacactttggcatcctcattcaatgctttgttgaatcttgcccttcaaactaggaggaacccatggatcattttccaccaaaattttcatctttgttataataatttgattaataattagggttttgttttataaatggcactgattccaaaatgaaaagcagacacctcaactcttaactctctctctctctctctctctctctctctcggtcttagactcttaggcacaaaacaaatttgggcaatggccggtggttattcccactcccatcctcatctcttgcagtaccccacccctatccaagtcctccacacacatagaaaagaaacttagaatccggaggcgcatattagcaaactggtcggtactaacccacactaaaatgcgtcaacatcagcatcagtacaaccggagaaaaacgcccactttgtgtcctcgtgatctctttgtctccatcgttttatggttttattcccttccattactgacttttattccacaaaagctctgaattttcgcgcattcctttgggttttcgatgattcacatcagaagaacgcaatgaaaccacaaagtgaacctacttttccagaaggaactgtccacaattttccaaattgtcgcaccaaaagatgcccttttcttttcttttttttcctgagttgacttgagaaagagggaatatatacacacatataggagtgagaaagtttatggtttatagtctataggcatctcaatgttaagttccctctctgaagcacgcgcattcagagctcaaatgtggtgatatgatgatggcaatgttgggtggggtggggttcctgagttccacttgcttctcttctgaccacccataaatgaaacacaacagaatctagtcttgtgatttgttaatgttgagaagacaacatatactcatatatatgggaatggtacaagtagatcaaatagtagtgtctctttcttgtgtatttatagtggaagctgacaactcctaagaaagtaaatgaaaatatttattaccacactagatgggtaggtgttttcctgcagtttctttttgttgctttcattaatttactagaaatgataatcagtgtagttgttttgttttggctccagcaatcaaataatgtggtgtattccaatacccactttatttgaatcattatgaatatagctgttctgcccccatatattccactgtatgttggtcctttcttaccaaagggacctatctagagcaccaagcaatggaactagagtagagtttccttttttgttcttgtaatttagctgggcatatgcaaaacaaagacaacgaattattgatcattgtagcatatatatatatagatatagcaatgaaccagtactgctttgagctttcagtgacttgttttgatgagctttatctttatataatgaaagggttaggtgagagttctttctttctagtgttaagatgcaagagacccacctgaattggtcatggacgtatatagttccccttaggttgaaaattgaaacacagtgaatattccaccaagcctgtgtttttcataacagctcgcttgttcgtttgttaggcccaccacaaaactaaagactaaaaagtgagtggacttccattcaccccttcacttttgtccccagagttttgatggcgacctagaattcagaaaagagaaaagactacaagtagttagttgtcttctttttagatgacaaccatgattctttaacccttcttttttaagcctgttttacttattgttatctttttcttgaatcttatatgaatcatcacattctatgagtttgaggacactttcttaacttttaaggatctgagggtgtgaaaaagatgcatgtgaccatgttttagttgagaagatatgggtgcagttggattgctcattcaaaattccatcttaaggccttagagctagctttagatctaatagctaccaatttgactcaaagttttaatccattagataatgagccaacaactgatataagtatccctccttatataaaagcacttattaattaactgctagcttccttatgggtatcttctcatttgcatttttctacttagttttttcatcagtaagaaggttggattgtgacttacagaccactctacactaaattatcatgtttcctggtaaaaaaaaatggtatctgcaggaccgggttgttcatcagtggcat

SEQ ID NO: 13574 - DNA, 9890 bp, Vitis vinifera
  Intron number 7 from transcript GSVIVT01013178001 (locus G SVIVG01013178001) derived from phytozome v7.0 (chr-ID chr2 ; pos 7063283 to 7073172 reverse strand)
agaggagcttctttcccgtgctgcaaagaaagctggtaatttcctctccttgttcgttcttctgtatattatatttgtcagttgtcatatgcatatcctttatggtttgtacatgatatagagatgtagatctgaaattggattgggaactaattgcaaatttgtaggatgcacgcataaccacagtattggtattggaaatgcttaccagattgagtagatataaataaccaacctgcattgctcaccactttctggtctgaccccataactttggttggttgcatgtttgtcttgtgcccacagctgtgaaactttactaactttcaatttctatgttagattgactctagatattcagttattaagcaagttatgattctgtatcccttcactatgttgttctgacttgggttgtggagagatctgaatttaggttttctctctacctttcttctccttgctgtcctctttcttccttgagctattgtataagtgggtctggcatccttggtattacctcacttacagctaccttagccccataacaggtctaatcaattgctataccatactttgttgtagtatcagattcttttcacaccatttttcagtaggaaattgaaaagaaaacaaacacgtctagactataaattttattttttactggccaaagatgagtccaaacattaagcatgatttttaacatctgagcaaaattagggccatagagtgctattatgatgatatgtttttggaatccttagtttggaatccttgggttccaaagagagtcagcttttttgcttgggaggctatttggggaagaattctaactatggatcaattaaaaaggaggggttggattttaccaagcaggtgctttttgtgtaaagtggaagaagaatcaacaaatcatgtgcttattcaatgtcccaaggcagctatgatttggcaccttatttttgctctttttggtgttcagtgggttatgcccaattctatcaaggaaaccattcttagttggagtggctcctttgttggaaagaaaagaaaaaaggcatggaatgcaatccctttatgtttattttggaccttatggaaggacaaaaatagaagagtctttgaagataccaaattagcggatcaaactattttatggtcttttttgtatatgtttttggattgggttagggtgcatgtagattgtatatcatggtccattttcgatttcattgattgtttgggatgtaagtgggtgattttttactattccttttctttttggccttgttgccttgtatatattgtgtatactttcaggtgtacatcaggctttcttaatacaattgcttttacttgtaaaaaaaaatgtttttggagccttgggggttttttgtcatcaaggttcagaaatgtgcctatcgaggagcctatatacttgatagtaaagggaggataacagaagtttgaatttttgcttgtgttatcagatttgcagattgtgagagataccttggcaagctctctctctctctctcactcactcactcactcatgtgaattggaaccctcattttttttatccttttttttggtgcttaaattctggtgtccagtgcatatgaactaatattgaatatgcagaaaaatgttgttttcttggtaaatgttggtgatgtaaaatagcagagagaaaaagaatacaggggagaaaaatagaagtagaagagagagattccaaaatcatgaatgttgttaataaaaaaaagtctatggcctatatatagatagacaattgtaactctagtaggaaactgattttaagaatcctatctctaataaaactttatcaataactaataatgacacttgtaaatctagtggcaaggcgagaattttatggcagcagctagtgttctccatttttggtgtacagtgggttttgactgagttggttagggagactctcctaggtgacatgactcttttgtagataaaaggcgtattaaagcttggagagctgcttctacttgcattttctggacgatgtggaaggaaagaaatagaagattctttgattgtgaagaaatgcttgataagaggttaaagaatttgttccttaacaatctctctttgtgggttagggtgtatatagggcggagggtatacaaatatggttgatttcatagattggttggggctaggatgaaggagtatcttttgtgttttccctctttcctttttttgccaagtgtactttgtatacgtcctgtgtactcttgtgcgcttttagaacctagtaatacactctcttaaaaaaaataacaaaaatctatcacttgatatatttacgccaaacataagtgtgtaataacatcattatttccatcatttcttcccggttgaaaaaaactcaagactcaggtaaattatgttgtagatattgctctaaagtatcaggatgaaactgatggagctcctcatttgttatccaagtattatcggtatcaagatgatcttttcattgaacaaggaacgttgactatcatcagctggggaagtaacatatggatctgccaagacatccacaatcacatcaattggtgctgatgaaacgaaaggggcataaggcaaaaaaccgaaggattgccttgtagaaatagaagaaggcaacattggaggcttgaatgtgcctcagtgaggaaataaatctgccacattgaaaatttgactcaagttatgtacgatgcaaatcaaacaagcatgcattgcatccaagccttcgaagaatagggaaggggcctagtgatcagaaatgaagtttctttatataatttttagggtaatgcttaggacaaatgggaatcataacataatcaccctctttgaactctattcctgtgatgtgtatcattagcaagtttataatcggcattactgaaagcaattttttgttgtatcttagcatgtaagtcatgaatatgatcggtaaaggcttgggtggaatcaagaggatggtaatcaataggcaaagaaacaagattaatgaattggcgaggtgaaagaccctgaacaattttaaaaagatgagttattttaagcaaacttagcggttggaaaaataagatcccaattaccatgtttcttaccaattaggtacctaagcaagtcactcaagttacaattaacaacttttgtttgaccatctatttgaggattgaaagtagaggaatacttcaaagtggttcctaacaatttccaaagcgtcttcctaaaatagctaacaaacatgacatctttattagacactatgctagaaggtaaatcatgtaacctcataatatcattcaaaaacaattttgacataggggaaacatcaacaatgttagaacaagggataaaatgggtcatcttagtgaatctatctacaactaccaatatgtattcatgacctctagtagtcttggacaccttgagggcaaagtccatgctaagatcatgccaaagtgtatgtggaactagtaatggagtgtacaaacttgtgttttgtttcttagccttacccaattgataggtatgacattgggaaacgatcctagctacataccttttgaatggaagccgataaaacccatcttcaactagagctatagttttattttatacctatcaaaatgtccaacttagacctccagcatgtaattcccaaactagaaactccctaggtgaagtataagggatgcacaatctaacttcctcgaaaaataaccatcttgaatgagaaagcttgcatgatttgtattaggactatctaagaattccatgaaaatggtacaaaaacccaaacaagtaggggatactcattcttaatttgctcaaaccttaccactttattactcatagaatggaggatcatggaaacatgcttgagggcatcagtgaccttattttctacccagaatgatttttgaggacaaaagtgtagtattggaggaattcaacccacacaacgtgtctttcatttcacttacattggcaattaaggtgtctaaggacttaatggttggagcaaaggataaacttcttttttttttgttaggacaaaggataaacttctttggtaattgataatattgctaataacaaagaaattgcaccacaacataaaactccttgtcatagctggaatattgttgttttgcttcattgagtttttcactaaagtaggctacatggtgaccatcttgaattaagacactacccatacccactttgaaaacatcacaaactaccgcaaaaccttagaaagattaaggtgtctcaaaatagggagcctcaatcatattctacttaattgctaggaaaggtttatgggctattgacgtctaatgagaccttttttttttccttcatgcattcagtaattagtactgaattcttgaataaatcttctataaaaagaagttgaaatatggaaactacaaactatggttaaagttttgggtttaggctaatctcttgtagatttgaccttgtcagggtgagtagaggtcccttgagcagacacaataagacccaggaaaaacactctaggttgcatgaagcaacacttttgaaagcaagcatgcactctcttagctcttagggtatgaaatacttgcctaagatggttttaatgctcttctttagatcaactatagatcaagatctcatcaaaatagacaagaaggaattttcatacgaatagcctcaaaacatgtgttaatactctcatgaaagtactaggggtgttaaatattccaaatggcattgctaacaactcatataatctatcttgagttttaaaggctatcttccattcatctacttgagttggctccttatgtggttcaaagccatgttggggttgatggtgaatttggacaaaagtgagctcatttcggtgggaagagtggagaatgtagaggagttggctcttgagtttggttgcaagtttagcacactcccatcttcttacttgggtcttcttttggttgctcatttcaaggatatggcagtttggaatggggtagaggagaggctgaggaaaaggctttcaatttgaaaaagacaatatatttccaaagggggcaggttgaccttgatccaaagcactctgtccagtatgcctatctacggtatgtccctattttatatgccaaggagtgtgagattgaggttggagaggatccaaagggattttctttggggtggtggggccctagaaaggaagccccattagtagattggtttattgtttgctcagacaaatgaaaaggtggtttgggtgtgaggaattttggcattgttgaataaagctcttttatggaaatggagttggcgttttgtggtggagagagaggctttgttgaggcaagttatttgtgggaagtatgggaagaagcgggtggttggcagtcttgtgaagcgagaggaagttttgaggttggtttgtggaaagccattaggaaagattgggatgtgataggcaacaatatggtttattttgtggggaatggaaggagggttagattttggaaggacaggtggtgtggagacgatcctttgtgtatttgttttccctccttatttgctatttccttggctaaggaggcctgggtggaggatgtgtggagccactttggagggggagtatggattcctcggttctctaggcggcttaacgattgggaggtgttcgatgtggagcgttttcttttgagactgcaagggaggatggtatatagtgatatgtggaagatcaagtagtttggacaaagtcaaaggacggtagattttttgtcaagtctctttataaggctttggaaatggaaagacaaggggattttcctgcaagagtaatttggaactctttgttgccttcgagggtgaatttttttgcttgggaggctacatggaaaaaggtcttaaccttagatcgaatccaaaggagagggtgccctttagctaacaaatgttacttgtgtctttcaaaggaagagtctattgatcacatcctcttgcattgtgagctggcaagaagtttatggaacttattgttttccctatttggggtgtcgtgggtgctcccatatgcagttagagaggtgttattgggatgacttgggtcttgtgtgggcaagaagaggaagaaagtgtggcttttagctcccttgtgtcttttttggatagtttagaaggaaagaaacagtagggcttttgaaactgaggatcattcggtttaagggtgtaaatcttttttcctttgtaacctatgggcatgggcaaaagggttctgaccccccttccattgtggattttgtagattggttaggctctgtttaaggtagtgttgttttttgttgacctcctatttctctttgaggcattctttagcctcttttgtagacctcctatatactttggggcgcttccttgttgtgccttttattattaatatattgttgtttattcataaaaaaaataaaaatcataatttgatggtacccactacgaaagtctctcttcacaaaccattgggagccaactagctcatctaacatatttttcaacccaagaatatgaaacctatgtttaaccatggttttgttgattgctctactattccattacattctccaagactcatcatttttaggggtgagtaaaaataggaacaacacaaggactaaggctatgatgaatacaacccttagctaagagaccgtctatcttgtggcacccgatgcttaaaggtattcctaggaccttcattgacaaagtgtgagctagactctctcttatctccattgatttgcattggggtaccaaaatatatttcaacaaatgactcaagtccatgacatatttggtcacaatatatttcacctctattagatcgacttttcataatggttccaagggtttgtacacccccctaaagggtcaaatgggattgtcctaattcaatgacgtacatgtttggtgaaaacaaaggttgggaaaaaaatggaaataaggacaaattctcagaaaagcgtaatgctgagataaaaccttaataacttgaactattaccaaatttcttctagattgggtgcactcaataggaacaaaaacccaaataaaggactctacaatgactccaaagaaaggcacaagatacgaaatagataggaaataatggtaaatagaagactcaatatacaaatttttttaaaggcaataagcaaaaagacatgacaataaaggcaagaatcctaacaccattcctgtttaaccaaagaactaaaatgaaagtacaaatttccaagtagcaaaaaaattaccctcaagacttgttgatggcattgggccatgagattggtgcgaggcttccaatgatgtagaacacttataaaaattgacctgagttgtagtttagtaattgtaataaagttgtagcatagtgaagagtattcccaattgttgttgtatgatggggtaactaatgaagctgtagcatggtaaagagtattctcaattgtattgtagaatggtgggtatacccatcccaaaaacatgtccaatatcagccttgctctaatactaattgatgtagaatagtagagagaaaaaacatatatgtgggaaaaatagaagaaagagattccaaagaaacaaatattattactagaaaaagtttgcagtagttaatatcactgagcctctctctctctctctatatatatatatatagacgattctaatagagggcttctcaggggtggttggtttttgcttcctcttatttttgtttttcttttgcttgcctatggcctttgttgtatactgtgtgtgtactctattgcaccactttgcaagcacttttaatatatttctcttatttacctataaaagaaaaaatataaacaattctaataggggactaattttaataatctcatctttaataaaactctctcaatagctaataagtattaattttattgacactccttaaggtttagtgtaaatacactaagagagtgtttgttttttagttttttgctaaaaacaatttacttttagacttgaagttatttgttttttctattttttcatgacttattataaattttttgccgaataaaaaaagccaaagtatttaactttttctaaatagaaaaagtaacatgtaggtttttctttactttttaatgttcaatagaaataaaatattacaaaaagaaacaacctaatacttaacactattaacactatttagttttaagttctatttaaaattaagtaaaaaaaaaaaaacaccacctaagccatcactgatttcaaatttcatcaatttgcacccctatagatgtatttcatatattaaatttattgtttagagaataaaatttatttttaagaaaattattaaatacacctatttatttttttaaaaaaaatctaaaatctctctaacaaataaatttattaacaaaataaatttataggagtactagttgataaaatttgaaacaaatggtggttagttgtacttacaccaaaccaaaataaatagtaaataacaaaatctatcacttcttatatttatgcctaacataagcatgcaatttaacatcattatctccatcaattggtaacctcaacttggttcatgttaattccaagctctttttcaacttctcgaagttggagtatttctgctctcatccttcattccccagggatgatcacttgcttaatgttcactgtatagctttctccacttggtggtgtcctcctctttcattttatagtggcagaaaaacaaaattctacatcttcatgcaaacaaatagaatattatgtgtccatatgtcaaggtgaatatgctccatctgttgcagacgtatatgatgatgcagttttgacacttcatcttactttatctaccatctggacactgaattctctcaaagctgcacttctattgtgtctgtccaaatgattttttgaaattatgcaacatccttttgggttgccttattttgaccaattggctctttaatagattcctgggcacaaacttgtagttaagcatttgaaggatcctttagtgcaaataagttaaataaatcgttgtcatattgtataatcggtgacgattctgctctcaatctttgtaatctagttcttatccctttgctttcttgttggtcttttcatattgtctgaagcatttggttggtctgattgccaatggagtttaatgaaggcctttatatcttacatttccagccttaaggggctacccactgttacagttcactgagcagtttgcagaacatttttctgccctgctctgtgggttgcattttctgtagcccgcaagactcacatctctatacaatcaaatacattaatcaaacttcaggcatattatgcttctctacccttgtgacaatttaatgtggatgttctggaagtcctcatctcatctgtcttgtttgcttcattgtctctcctcatgtattgttaagttttaccggtccactggggcaaatttatttatcacactatttttttaaaatttattctaatgaggttttaatggcccttcagattgtgtatatgccaataaagagaggatagtggtccttgaaaataaaatccaatgctttctctccattgaaagatatctatcttggtgacaaacacaagttcttttacggacttcattctttttcatgttcatttgaccttgatgggctttccaatggaggcatttgcaaactgtatctcatttttttacaagtttgcttaccttgaacataaattggctttgtttgcagggttgaatttcc

SEQ ID NO: 13575 - DNA, 11747 bp, Vitis vinifera
  Intron number 1 from transcript GSVIVT01021460001 (locus G SVIVG01021460001) derived from phytozome v7.0 (chr-ID chr1 0; pos 5630649 to 5642395)
ttcaattcactttttactcctcttacgaatgtgctaatgcgcctagccatttcatattttaaatttgaataaaacaccctggtttgtggttttctagtttaattatttgtgtctaaaaagtgaatccataaaattgttctgaaaagtgttttaggagaagagatcaatcacatttgcatatttctatatcctataattatttcataagagtgtttaaattcagatccaccacattaaattcatatttgcatgcaagttcattccaaattcatttctagatttctcatatatcaatatataaatgatctatcaatcataatgaattaaacaggtagatcgcatttattgcattttcaagcatcaaatacatgaaatccataacaatattcaaaagaattcaatcatttatatcataaataatgatccaagagataggaactgagatttaccacaaagaaataaagtcctcatttgatcttcatttcaaaatggttcttctcaagatacaaagagatttaactcccaatcatgatggattttgccttcattctcatgttctgttgtcaagccagtgatagaaaaatggagggaaaagtaaaactcaaattctaagtaaaactgagtcaaaatgatgcaagaagataagattcacaaattgatccaaaaggatgcaagagattctaaaaggatgtcttctacatctaacaatcactatttatactaataccatgtctatgtagcaagatcttactatgtcaccttatctatccatctaaacatcaacgacagaacttacttaaaataataacaaagtaaaaattacaaaacgaagctaaaataagagtttttacaacaatatatcatatttggaaatctagttttgaaatccattttgacacctcattatgaattttgatatatcttgataataggttcaacatgttaggatagagcccttaaaagtatgatacgatgtgacaaatttggaatttattatttatttaataaatttccaattgcactttaatctatcttaatttcatgtattgtaccttatgagcattttgacctacatctcttgcattgtacatgacttacgtacattagaagttgcatagaagatccaagttatgggttccttgcaagtagataatttgttcataactagttcatgggcttagacaatccatttgaggttatatgcactacttccttattggagagatagttggtcttggtcatcaggatgaatttcccatggtaagtgcactagtgtgtataatcacacattgaatacagtgaatcatgaaataggtatatcgggtcatgaattcatcaagttgccatgttatactatctcttaaccttgagagaatattgaatttgtgtcaatattaacaatgactttaatctacaggtgatatccgaaagtaatcataaatttcttatggattgagtcattattcatagaagttagtagcaataagtattcttaatagaggtatcataatatctcattaagacagtgtgtttccttaggtgattctaaggaggtgtgtttaggaaaactatggctatagtagttccttaagtggaacttaacatgtcaattgatcatactataagaggatctaaaactcaaggatggtagaagaaatcttgagaggctgaaaactttcactttgtcagattatggacaccaattcatagggagactgtatacaatagataacaagtcatagaatcgagtacatagtttctcgttgttatttacatagggtactagagtgaaattgattctctatagtagtaccttgaatcaacttcaaaattggattctgatgaagccggtactgtcctgcaggtcctaatggtcctcactcaagctcatatacttcaatggcatggtttataagggatgttctattggctcatgattcacttatgtgcataagagtattttgataatttcataagattgcacaagggttagtgatgatatctttggattgagctaattgattcattaaatggccttgttaggttaagtaatcaattaggaccttacccaagctagattaattgacctaagcttgtgataggttcaagtcacctatgcctagtaggaacccgataaatatcccttaagggtcaacatttaatttttctactctttccaccatccatagatagagagccctaagctccacactttaaaggcccaccatttgagtgccaagattcgagaaagagtcattgggcagaagatcaagagtttacaagacttttaatgatttcagacttgtttttcaccaaaatgaaaggatttaggaacatctaaatggtcaataaggttttataattcaaatatctagattcgtttttgttttaaaagacattttttctttcgttgctaggatttagatgcccctaggtagttattttatgcatttaacttgatcttgggatagaaaacgaagtaatccatatttccctacgcaacaatagtgaaaaatctttggtctcaaataattttgataccaaaactgatatatcaaattgatttcctcttttcgatttcatgcactctaatttctttttagttattatgattcgatacatctttgcttgtatcaaaatgcatttgacaccatatcttccattttgatacaacttttattctcaccaaattcttcctttaatgctttcttttttttccttgatgtttccttcacctatccaattccccataaagtcttgaacccccctattttgctacatgaaagacttaaaaaaatcatactaattaggaaccaaaataggactttagcaataatataagctaaaagaacttgcctatgctctcttttacaccaaaatgacatgttttattgatagaaaaccattcgattcaagcacaaatcgacttcccccaacttagcttttactagtccctagcaaaacagagaatgaaaaaaaatcaaaacatgtaattgaagaaaacttatcaacaagattgtaaaccaaaattaaacaagtacagatgtaaatccttctaagaataatctttaaattaaacatataactcaaagtaatcttttaactttacaaatatatacattagcatgttgcatgtttaatattcatcttattcatcctcaaataagtttttagaaatcatttctataggaaactcaagtgttaatttgcaatatttccttgtagcaactatttcaaaaacctcacttctccaacctatgacaaacctctcattagcaaatttagaagaacacatttttcttatgttattttttttcatcatttttcatttctagattttttatttattttttcaaccaaggaaaactcattctttatggctaaaaatggatcaaccagacaactcctaggaatcctcccaaggtaacagatattgaggaccatataaggtcatttactcttcaagaccctaagctctttagaacaaggtctaatttcctacttttattttctcttgagtgttaactaaatctcacctcatgtaacaaacattgtgtctatggctcctaactagttggttaagggtaccaaggtttaaagacaagaatggcatgacccttaaagacaagcactcaggccttgaacaagtcctcacattcttattcttactattttttatttatttatttttatttaggcaaactcttattcttacaccaaactcaattccattattaaaatcaaagtatacaaatcataagaaaaaatgaaccatggcaagttaattcaatcttaaaaatttaggtaatcacattgaaatggtttttttttattattcaaatatctaaaaataaagagattgaaaataaggaaaattgaaatcaacaatgaaatgggaaataccgcaatttattgaaatcttgaggccttgtatcaagatattttggcataagcaaccaaacattgcaattgacaaaattcaatatcataacattgtatcttattggtattaaaaatttcgatacatggtaaaattggatttaaatggctatttgatacaagcttgatttatcaaatgacatcgaaatacattttgataaaacttaaaacctattgattgatttataataaatcattttgaaattcgatatattgcgatatggaatcaaggtgtcaaaacaaattgcaataaaaccatgaaccttctattcttttttacattggggtgcaagtcaattcgataccccagtagatcgaaaagaattttgacaatacctcaaaatttttggtcatttgatacaagttaaattcaaacttgatacttatgtggtatcaaatagcctatcgaaattagaattaaaacatacatttagcttattgcagttgagctaactcaagttgatacccatttgttaggacattgagtcttgtttatatgttggatatatatatatatatatatatatatatatttaaccatagaagtctttttagatagtgacttactctccattaaagatcaagagttgttgttcatccaaccaggaagtcataaatacatctaaaaaggtttggcttttggaaaattagactttgttgaggtattaagagaattggttttgttttgaactttaaatgatttaaaattgacttttgaaatagagaatgaccactcaagcggcttaaagcactcaagcactcaagatcgctcaaatgagctataactctcaagcacctgaggcgctcaagtggtgggtgagttggctcaagttgtcaaacatactctgtcgagaattttttatgcaaattgatttggaactcttctaaagccaaaactcttaaggctttaacctataaatacttccctattaattccttgagggttagaaattggagataaatcattgagaaaccttacattccttagagaaggtcttcgagaaagaaaacctaaagagccacaccattcctgatctctcattcaagtattggatctttgaatcttggtttaaagaccttcatccttcggcgaggctgaagtgatctattagagaaattgaaggttgttgcactatggatgtgaatcaagttgtaggtagtagagagtaagtattcagggtaaagcaacttgatttcatataatggatttacattagtaggtcttaaacctcgtcgttttttatcttcacaattagtgtgagggttttccatgtaaaaaatttttgtgcctcattgtttatatatatattttagttgatattcggtttgaattgcctataattggtagaatagattaaccctaacatctcgcatggtaaaaaaattgggtataacatataaatcgttattgaaaattttaaatcacctattctcccctcccctcccggctctaggtgtttcctattagactttcagtttttcaattgatatcaaagtaggatgaaaaaattaaaaataaaataaaataaaataaaattgattctttatttatcatataggataaaaatcaaatttttattaatcttgtaagtttgatatggaacaatctaaaagttgtgcccctttgaatagtccaccttactttgatgggaataactactctaattggaaaacacaaatgatgtgtttccttaaaatgcaaagcgaaagggtttgaaattcagttgaatatggatgaggaccctcattgatccttgatgttcaaggaagatcaataggagaactgaaacctatatatgaatgggacaaagccgacaatgaaggtagtaaagccaatgttagggctttatttaatatttttaatggagtttatctagataagttttgtaggataacaaattgtaaacatgcaaaagaagcatgggatattcttcaagtcactcatgaaggtacatttgttgtaaaaatctcaaaattgcaattgtctaccacaaaatttgagaatattaagatgcttgaatatcaaaacttttctaccttttatttttaattaagtgatattgttaattgttttctaaccttggagaatccaccccaaattaaaaggtagtaagaaaaatattgagatttttatctgagagatttagacctaaagttactatcatagaggagagcaagggtatcaattccatgagagttgatgagctttttggttccatacgaacatatgagatgaccttacctttaaggcttttgagaatgagggaaaagatattgaaatgccatatgatgtaactagggagtctttaaggcttttgagaatgaggagaaagatattgaaatgtcatatgatgtaactagggatgaattagcacatatgactaaaagaataaaaaaatgtcatgaaatttaacaaaaggttttgcaaaaaccaagaatctggaaaaatgaagagaactaatgaacaaatatccaaaaataaagataaaggttcatccaaaggtaagaaagttgaatgctttaactgtggaggtcttggacactatgctaatgattgtcctaaccccaaagatatcaaaaaatctatataagctacttggagtgatactaactctgaagagagtgcttccatagcttttgaagatgcaacgtacgatccaaatgaatttttagtttttattgcatttatggaatctgtgcatgatagtgatagtgatgatgagtttactgataaacaaaaggctgaattcctaagtaatcttgttgttgagcatgaaaagctaattaagagttacttaaagatcattatattctttaagctcataaaaacaagattgaaatgcttaatggataatatactaatttacttgaaaaaaaatagatttcttaagtctaaccatcactccctccttgagaaaaataatgctctcactcaagagatcaacattagtaagtctttttcatttgtgaagtttttttaccttggaactagtgttcttaatgaaatacttgataaatgcaaaactcattgtgataaaagagatttggggtatattaacatagatgaaactccctatagtggaataaacctaatcaaaagcctagaagtcaacctagttcctttaagtcactacctaggactaaacaagcttagttgagaaagaatagggctaaatgtcaaattgtgttcaatgcacttaaagatagatcttccagtaagtggtacttggataatggttgctctagacatatgattggagacgaagcctttttcacatctctagaggattataatggtgagacagttacatttggagatgggagcttagcttgtgtgaaaggcaaggaaagtatatctatccctacttgtctctatgttgatggactaaagaaaaacctcctaagaattagttagacctgtgacaaagaccatagggtaaatttttgccaagacttatgcgaggtagtcaataaagagggaaaagtcgttatcataggacataaggcagttgacaactattatgcaataagtcctaactctagaacacctcttttgtgtagtagggcaaagctagatcctactaagctatggcataaaaggctaagtcatataagctataggaaccttgtgcacttagtgaatattgaaaacattagaggtatccctaaactaagtgatgaacctaaacccgtttgtggtgagtgcatgaaaggtaaacaaactaagagttcacacaaaaaaggttaagacgaaaatgatcactaatcccttacaccttctacatatggatcttatgggtccaatgtgaactgaaagtagaggtaggaagagatatgtcctagttgttgtcgatgatttttcaagatactcattttttagttttcttaaagagaaatcaaagacgatagagcacttaaagtctttattcaatagaatacaagtggaaatagaccatccaattgtaaagattaggagtaataggggaagagagtttgaaaatgtggatgttgacctcttttgcaagtctaaaggaattaaacatgagttttttagcccttagaactcctcaacagaatggagtggttgaaaaaaaagagaatggagtgttataaaaaatggctaaagtgatgatcatatacataataccttatgcaattttaggcaaaagtaattaatgcagcatgttatattaccaataggatttttcttaggccaagaacaaagaaaacatcttataaattatggactgggagaaaacctaaccttaagtattttaggacttttgacagtgaatgctatatattcagggatggggagaaaatagaaaagtttgatgttaaatctgatgtaggtatcttcctaggttattctattactactaaagcctagagggtttataatctaaattcatagattagccaagagtcctctaatgtggttataaatgatactatgtatgatcaggatataattgacagtcaaattttaacctaggattctattgagaataccttaaagatgtggaaatcacaaaagataaccttaacgatatccctaaaagagacattgatcccaataaagatgaaaatgtacttctagatgtcacttccgaagaaatgaggagtaagcatagatttagaatgcctaagaaccacccaatctcaaatgctataggtaatgtaaatgaacatgtggttactagaaggcaatcaaggttaaatgagatgggtattgtatgttatacttcccaattggagccaaagaatgtgaaggaagcttcaggtgatgagtcttggactactgcactccaagaagaactaaatcaatttattaggaatgatgtgtggtatttagtccctaggcctaaagataaacatgttataggtacaaaatggattttcaagaacaaataagatgaaaatgggatcattgtaaggaacaaagcaagattagttgtccaaggataatcataaatagaaaagattgattatgaagagacatttgtatctgtagctagattagaatcaattaggatacttttggcaatggcatactccttgaggataaagctttaccaaatggatgtcaagagtacatttctaaaagggattctaagtgaagaggcttatgttgagcaacctaagggttttgaggatccgagattccccaatcatgtctatagattaaagaaagccctttatggattaaagcaagttcctagagtttggtatgagaggcttacaacctatcttttggagaaaaagtttaagacaaaggaagttgacaaaggcttatttatacataggtccaaggatgagttgttagtggcttagatttatgttgatgatattgtcaagtttaagagtgaacttgccttttgttttgttgaggaaatgaagactgaatttgaaatgagcgtgttaggtgaactaatcttcattctaggattgcagattaggcaactaaaagatggaatctttctttctcaatccaagtatgctaaggatttaataataaaaaaataaaacaaaattggtctagaatccatcaaacactttaggacacctatgagcactaccacttagcttagcaaagatgcatctagtaaagatgttgagcaaatgctctataagagtatgatagaaagtttactttatctcacagcgtgtcgtcctgacatatcttttagtgttaaagcttgtgctaggtaccatgcaaatcccaaagagtcacacttaattactattaaaagaattatatgttatataaatgggactcttaattatggttcgtgatatccctatgattcttctcttgtggttgttggatattccaacaccgactgggttgggaatgttgaggatagaaaaaacacatttgatgtttgtttctttattggtgattgtcttgtggcttggcttagtaagaaacaaaactttatatccttatctaccgttgaagctgaatatattgcttctagaagttgttgtatgcaactcttgtggatgaagcaaatgataaagactgaaattgagcaagggaccatgaacatacatcattacaattctagtgctataaatatctcagagaatctagtttttcattcccatactaaacacattgaaatttgttatcatttcattagagattttcttaattaattagccattaaattcacaaatttaaaactcaaataatgaacccattaatagataaaaattagttcataatgaattttcttttttgcacataattatatttttataaattttctcaatagaaaaataaacttcaagttaagcaacactttatattgaatttattaatgtgtttaaccatttttaaaattaagtaagaactcaaaaaataaatctaatcattacaaaaaaaaaaaaaaaggagaaaactaatatattatgattcatgactttattatttctcttatatgaacaactatatcttttgaattgtcttggtaaatagattctaaattaagtgacacatgattagtaatttaaactttttaatgaatcctttaatttttaagaataatttggaattcaaaaaaccaatccagttaaatattgcattttaaaccaaaacattataaaatacatatttcgtaatagaatactaaatgtgtatatataatgaaaattttgattcatttgcaccttaaaaaggttaaacattattcattattcattttaaataaaatattcttaacaaatattattattgtttatttttaacaaaaaaaaaaaagaaataaagaaagaaatcaattatgcttttatgaagatattaatatccatatttttctaccatatactaaaatagaaattcttttataaaaaaataaatttatgattttattataatattactattcttattttactcaaaagtatttatttatttttaattatttggtaattaaaaactaatttcacttttattatgactagaattaaatttaattaatagtatataaattaaatttacaatatttttataaaatcaaaatagtttttttttttttttttaaagtaacaatttatccaaataattttttatttttaaaaattgtttttaaaaacaccatgtcaaacaactttactttcatgaaattctaaaaaaaattgtttttgaaaattcaacttaaaaaacaatttttaaaaataagcattagaaaatatgctcaaacggagctttaatttattcattttttggttttatttttctatttatttgttttgtaaatggagacagaaacagccccttaaccctcctcagtccgggtttgagatgcagatggaaaatagttgtgtaatttggatgagaatggaataagggtgctccccaaacctgctccttcgtcattcatatggataatgcaggtgatgccaatgccaatttcgtagcaacaagcacaaggttgtgcaactcatagagctccatcaaccccctaattatcattcagtagaggaaatatgttgggggttgttaaaaaaggatggtcgaatttcacaaagctgggtaggtcctaagtcctaaccatatgattaatgtgtgagacatcaatgaaacgcctttggctgccaacacgtgacaccaagatgccttgcttactgccaaagacaatattgtctaaagcagtggtctatattataccttgcttcttccccagaaaagaaagaatttattctgtgctgcaatatcatttttatttgctatatttgcccatatataagtgctcttaatgccagtagtagtgtcctatacctagaatcaacacaaccacgcc

SEQ ID NO: 13576 - DNA, 6691 bp, Vitis vinifera
  Intron number 2 from transcript GSVIVT01037852001 (locus G SVIVG01037852001) derived from phytozome v7.0 (chr-ID chr3 ; pos 7106833 to 7113523 reverse strand)
gaaacagtgttaggtgagatcttttgcagccttagctatttttatcgtcattttttttttttaatttctctgaagttgtttatgttgatgttttatcatgatgcatttggtttcacttggcataagctttgatgttgaccatcttccttgtctccattgttttccgcacattgaaattctcttcactataccctcttttgttgttgttctgcaactttttttcatgcttaatctagggccattgaagcagtttgaaaatttactttcttatctaggatatttcagtattcaataagataaaataatgtccaaggtctattttgggcttttgttggtgtctgctagtcacttcattggttaaaatgaaatatgccagcaggctctatgagcacaaccagttcatccttgttccactcagtccatcttactgcccccaaaaaggattggtcaatttgtctagacctgattgttgatcttgcatccttttatgttatattcttcttttggcatttatgggccattactggagaacttcgaggtctggaaggatgtgctcagttattttaattgtgatggcttcatgatttagcatgaatttgctaatagcttattttgatgggatgttgagactttatatccaaagttcagaaagtttgtacaaaacttttagcagttccaattgttgggtgcgggtaattgctttaaggttatatctgcacttcctttgagaagtattgcttacatatcatttctcactttgatgtgcttactgcattctggaattgaacatggttggacatctggaaggggaacaaggagacactatgtaataatgacccttgatgttgattattatctttgttttaagcattcaatttattagtcaagtaaataatcacttgtccattccaattgaaggattttgggcttggtaatgcaattttaagtataagattccttagaagggatggtaaaatgattatgtcccaatactttaaatagaatgtttggaggaaatatcatcattataaatgtggacttagtttgtcttatctgtgcttaccatatttttgtaacttaaaggctaatttagtggcacatatgaaagaattaataagaagcctgatctatgtattaagtacattagatcttgtttagtggtatcagtacagaaattggggaagtttattcaatcatgggctttggagaaaaaagttgatttcctttagaagtgatatagattatattatatctggcaaagatctggaattggatctgcttcagaattttatagggatgctttaggcctctggtatattggacacctagtcaatccgtggactggttgtttgtgcctggatgaaagcttgttgctttgctcattgaaaaagacatggaaataaagtatttggctttgattacaaggcaaatgtgtcatatgaatgaggatatcatctttgatgctaatccatttaagagaacacctctgatgtgatattaaaaataaaatgaagaaaattgtgccttcagccaacaactagaagatactctaagtagaatagagcaaatgttgtccattacagaactagaactggtgagaatggcagagttgcctgaaatatatacacctttgcatgctagttggctttcttgcttaaaagccatatcaggaaaggataaccaaacaagttctggggaaagaggattaacatcagtacagtgagatcactacatattacttgagtaacccacccaaagcatttccaggaaagacttaattatgatttataacttcatctatttggaaatgtgatgtaatttcaactcttttactatttaatttttttatacaagggactcctaagttaattgtatctgtaagaagccacatcttgtggttatgattaacaatggtggcagcgaaatatagattgtggtagttgatgtggtgttttttaggtagaaatgggagttggttgttagtaattgttgtaattttggtagcaaaaaattgaccagcatggtggtctttgaagatggcgggttaagcacagtgggtttaatggcattggagaggggtgattctatcaaggaacatcaaaggtggcagtggttttcaggggtggaatggtgcactatacctcttaccatgaaaatgtatacctggggtatcaatcatctggattgcattttgcatatatgatacaacagttacagaactctaaatttagagatttggaaattttgttcttaatgttccttctgctttcctttatgtgaggcaaagtaacaatgtgaacagctctaacctaaaacaatatcctctgttgcatttgttgacaatgcttaaatgatcctctagcacctcctctgctagtaaagagaaacctattgaaaccagtatatcacattccaattaagtaaactaaactgtgctatgcgctgtatcctatttgaatgtaagcagtatcatgtggctgctattatctaatataccacagtggtccatcttccagtaaaagtgaatttggatatggggctgagtgacattattggacaaggtagattgtggtggtctcaatgatgggttgtgattgtatttcagtgggtgagaatagaagcagtagtggttggtgatggtggctgaagtggtgtttagattcagtaacagtggtttaatgtggagatggcaatgaatgaggtagctcatttgggttattctggtgttgaaagaaataactagtgttaggcattttataggcctagtggagagatggaagaatattttggatatattgtccaggatgcagagaggatattttacggacactgatgcaacagatttcataaaataaaataatgttgcatctggattctgataatgatgtgatacacacatgcattcacacatgtacgatttaagtgtatataactaacaattataagtttttggttcatctatctaaaatactactgttgactcataacaattgctaatcttggaaaaaagaattaatttttaaaatgaaatttgacaagaagcaatttcgttatctccctctcttcaattgtgaaagtagagaggcttcatgcaattgaaaccctcggtcacacattttctcttagtttgtaagaagcctcatttatacacttactgaaggggcattttcattatttcatgagaagcttagttttgtttttccaaaaaatagtttttaatcatgtcatattctagctgtatcataagcatatctagaaagcatatgattgttcaaaaattattttgcattcagcatccatcatttctcactccccaatgcacaacaggacacatgtcttttatagaaccatccatgctacttccttatggggctagttgaggagctagggtggaaggtttagaggttagtactagtcctcatggaggtaataatagaagcagtggggagtgaagtttggtgtgattgtcatgattgaacatgtagtgaaaagcaagaaggtcaagagatctttcgctataaagtccaaaaataaactcaacaatgtatttggtgttgcacatcaatctaatttgggtggactttgcaatatcaaatttgattcattggaaaatccaatgaggcataaaatgtacataattgaaataagaatgttaagatagaagagtaatagggttcgaaaatgatagaactacggaactggaaatgtatacggaattggaaatgtatcataacctaaaagtagcacccaatgtgatggaagaagattggacaaaggttgtagaatcggcatggtcacatgaagcaaggcttagtcactgcacaaacatggagttatatagtatgagttaaattattagggttatctttgtatgcatggttgatccattccttaataggtcttaaacttttgaaattgttcatgtattagattaagttgacaattttgttccattattgcattgaattcaacatgtcatatgttctaagggttttacctgttgcaattgacttcaagtaacttgagaatcaacttcatttgaggtatgtatgtgttcgatgtattagggtatgagaaatggtttggtatataaagagtttgaaattcaaagaaaagtatgaaaatcagatggaaaaattgagaaaaatgcgtagacgttcaaaggtcctcttgttggatgtttaaatgtctgcatcaagttcaaaccgtcccttgcaagacatttgagctttgactcttctattctgtatttttaagcttgatttttagaattttatcagattttttgccaaaattactttgtttttaccttctccaaatatccaattagggttttgatagaaaaacctaacattctagactaaaaacttttcatgtgatctcaaagccattattcttcactatcactctagttctctgtatctttcaagaactttcttagaagtcctttagggggaaaaacaagatggtgcatcaatccattagcctcaacaccatgttgaggtgatatgctaaggagttggttgtatcaaggatgtgaaagaaaaatttatgtgtttttttttataaataagcatgaaatatattataaaaaggcaaaaagccacaaagtatacaaggagtatacatagtagcttaaaccttgaaacgcaaaaaacaaacaaccttaccaacccttaagtggacgcaagccactccaaaagcctaacagcgaagaggactcctctccaatatacaccctaacccaactccataaattacatacaaaagaatttttgagtttctgtatagctaaggaccaccccccccccgaaagctaatctattcctttccttctagaccgtccaaaaaatacacaacggaatggaattctgggtctttttcctttttttccccacaaaagggcccctccaactaaataacacctctttgactgtctttgggaacactcactgaaccccaaacaaggtaaggacgatctcccagaggaccctgactactatacagtgtaaaagaatatgatttacagtttcttcttcacaaccgcacaaaaaacaacgattagggagctgccacccccgtttttgaagcctatctagggtaagaatcttcccccatgtggcctcccaagcaaaaaaggcagctttggttggaactttatccaccaaaatgcactttttcgagaaggtgaaaacgttgggagcaaccagctgtttgtaagcatccttaaccccaaaaattccatttcccccacccttccaaaaaactgaatcctcctctgaagatatcctgtagtctctcaacatagaaagcaaatctcctattaaatccaattcccaatcattaaaacctctagaaaatctaagattccaacctccttgaccaaaatttgggtcccacacttcattaaccgttgcattcctatggaccgccaaagcgaaatttatgtgttgaaagaaaaatttatgtgttgattgatataagacccttggaagtaagtgcatttggatcaggtaaaaccatgtactttcttttcatatttagaggatttgttctacaatagtttgatctgtggttttttacattggcaaagagagactttttaggtggtttttccacatatatcggttgttattattcagtgcatgattattttcaattatcattgattgaattattgaaattggtaaactttggttgtaattttggagtacatattgcttgaactatgtctttacctccctctaggtagttttgtaatcaagattgaactttcagaaataactaatcatgtaccgtggtgtcatggttttggttgctagagtcttgctttctgtgtatttgttctcccattcatttgtctatgaccagccatctgcctcataacatgtggaatggtctcaccctagagagggatatatattgttgacacgtgcaagacaagaagagttcctagcgaatcaggatgaaccgctgtgtaaaagatcagaggactaaattagttcagtaataacgtgcccaaattattaatactattattttgtttttcactgggcagttcctggtaaataaactcagatattcaagaaatggttctagaaaattaaactatatctttggaggctgctttgctggtgattgtctagtagttcacatgtgaggttgttcacattacatggtacttaacaacatagtccaccaaagcaattataatggcacatttctcatctaacagctttgatacccaccctttccatgatttctttttttccgaaacaaacagacctcggttctctttctgtggctccattaatggtctgtcttgaaatctagatgtggcaacagattctgttttttctgaaaagtgctgagaatttcatgcggatgacgtcatatatttcatgtgcttcaaaaaaattattgtttgatgtgactgtacattgtacatctgtctcctgtcctttttctctgtatcaaataaaataagtaaacaaaaacataagattccatttggttgttctcacttataaatcaaacaaagtcatgaattttttaaaagacccttctaacacaagtttattagctaaaagaaaaaagaaaaagaaaaattgatggcatagtacattaaatcgtctctactttatgaaattgcattgactacgttaccagatgaatattcacatgtgcaggt

SEQ ID NO: 13577 - DNA, 15396 bp, Vitis vinifera
  Intron number 11 from transcript GSVIVT01030942001 (locus GSVIVG01030942001) derived from phytozome v7.0 (chr-ID chr 14; pos 19489820 to 19505215)
tgaatataagtaagttcctcttcatagatgtattctttactttcttttggattatgctgtctaatttcctgacagcagatcactaaattagcatgtatcatgtagcatgcacatgtgcaactggttatatattagtattcttggttagggattaaagtatgctggacattaagttgtggaattttgagaaaattggggtaaagttcttttcatctgtttaacgaaaaatgaactaattgaaaacaaagagaaagaaagaaaaaaggttttgctttatcagcctcactctataggccaagtttcaaggtatcagccaagtctaatactactaggttgagtcatgtcaaggacaactgctgagacaatactaagagcaaattctagattttccaattgcaacaatgaattggctggtacagctgagtcatggctgagttgtgatcaaaactgctgagttatgatcaacttgcaccatgttgtcaagcttgtaaaagttccaaagtcatatttacttcccatcattcaatatgaagtcgaacactaagttacttgaaaaatgattatatttgaaatgaagaagaaaaaatattatatttgacgcgaagaagttttcaattctttgtaagtcataagttgatcctaagacatgatttcatgactatttgaacaatgtcaaatgtgatagatttcttattagttcgttgagtttatttgaaagtagagaatgatttctgaataatatttatatatttactggatatatttacaatttatgtatgacttgctacctcctatatagatattatccgctctaagctcaaagggcctttaggactttaaaacatgtctacataattaagaggaatctatacatatataacacaaaattgtaggactaagcagacaagccccttacagggtcggacaaaagaacacccacacttaggtgaagtattagctttgataccatttgtaacaacctacttccaactttgtagatattgttcactttggggcctaatggatcctcaagactttaaaacgtgtctatatggttaagaggaacctatacatatatagcgtcaaaaacttttttccctatctaaagtgggatatcacacttaagggtgctgattggttgtcccatttgttaatatttttgtgaacataatagcaactaatgctcaaactcaaggaaatgacttttcaagataatgacagaatgttttgtacttacaacatggtatgcataatgtaaatatagataagattactaagagcaagagaagaagaataaatagtgtttagagcctagtggaagacaagtgttgtctgccggttcatgctaactccattatcatcttataccaaattatatcatttgtttcccctatccagtttctgttatatttcaaatgatgcccaggaatatctactaattcagatattttgggacttctatatgaatgtgagaatctatgtacagtgatgcgacatattgaagttgtataatgaacatggcttcttattcatgtgtgacccttaacttctaacttttagagctcaacaagtattccaatctaaatttcacattcttaatccaaactcattttgttttgttttgctttgtgtgtatgttatgtgataaacaggattataatgattgttcatcacatctttatctaaatttcccaccatatgtttgaatttttcaatattgtttttaatgtttcctagaactttcttaaaacttaaacataatgttctagtttcgtggggctaccaagcccatattgaatgaagttcgaatccttgcacagatatcaaagaacacaaccacaaaattgatgataaatataatcaaagtaagatactgtgtctctcagtagctttcttcatgttcaatttcctcccatttcgatgttaatgagacctatttcgatgttggtatcacctcccaagtttttcagatcaagtggcagatatgaataccaagcaagggactttaagtgtcacacaatactatcactctctcaaagggttattgatggagttagacctttaccaaaacatggagacggaatctactaccaatttaaagaagatgagggacatgctggaaatggaacaggtctttcaatttttgtttggacttaatcctggatttgatcaagcatgtgaaaaaatactagaaaaaggcctttttcctgatcttgatgaagctttttcatacatccatggggaggaaagatgcaaagaattgatgggcaacaaaactgaaaatagtagaagtcttacaacagaaaattccgttgtagtagtggccaaacaaaatcaaaatgcaagggacaacaagaaaccagtggataaggataaaatgtggtgtggacacaaaagagccatgtgttggaagctacatggaaagcctcaaaacctgaaacaaattagtggcaaaggaggaaatcagcctattagattgggacaagctaatcacacaaccattgttaaagaaaaatcagaacagttgggattcaacaaattttatattgagaggctgaaacaattattgaaccagctggagaattctaatgcaaacccctcattaaatttaggttcatgtttcatggcttaagcaggtacaaaggcttcaatttccctctaaaataacttcaatacatggatcattgattcaagtgcttgaaaccacatgactagcatgtataaattattttccagttatttaccatatccaggaaaacaaaaaatcaaggtagctgatggatcattctcctcgattgctggctaaggatttgtacatgtttcacctaccttaaccttacactctgtccttcatgccccaaatttaaactataatctattgtcttttgtaaaaattataagatttgaattgttctattcaattcacttctacaggttgttattttcaagatcgcctggggaagatgattgggtatggtaagctgaaaaatggactttactaactagagactaactggagaagaagaggcaaagcgtctcaatgcttggtttcagcccacaaaactggtttggaccaaatccttctttagcataactgtttaggacaccccccttgcctttcttgacaaggtcgttccctttcttgtttaagaaaataaacattagcaagttccattatgggtttatctcataaagttcaagtttgaagtgcctttaattttttctgcatttcactgagattgatgacaacaaagaatatttcaattaggaattgatgagttacttgagcaataaagacattctacatcagtcaacatgtgttgataccctacaacagaatggagtggctgaaaaaaaaatagacatcttttgttgatagcctattgtcacggacttagtcgttcactaagctcgtgcggcacttagacaaggcaagacgcttgatcttgctaagtcagccttgctcccaatgcttagctcgctcggctaagacactcgcgactcaaaagcttaaggagtttggtaggcaactctttaaagaatggaagctcttactaactcaagaaagcctttacaagtgcttggatgctcacttgcttggttaggaaatgattttggatggtgctttggccaaatgagggtctcacctatttataggcatcaatggaactatctggaaccttggagggttccttacaaatcaagaatattctagaacatcctaccctattctatgtacaaccctatgtacaagaatatacaagagattcctagaagtctctagaaagccttggactcctcccatgccttccaccatagtgtagagatgtgtggacatctctaggcatttctagaaccttccacactcttcccaccaatggcttagtgtagatggctctaggagtctccagaagcttccctcctcctatataagcccatggggagggtcatttgaagcatcctgtgacactctcccccaccgatgccgtcgacgtcctcgttgttgcctcattctgaaacctctcgatgtgtttccagaactttctcaaggcatccacatgttcccaacttacctgcctcttaggtagtcctttccattggactagatactctatcacaagagggaccccttgtctcctggtgacccgttcagccaggatattcttcacctccttctcccgtgaggcttcagatggatgcagacccgtgcgctttcgatgcttggagtgctgcttcctcttacccattgagttcacctttcccttggtgacctcttccatgtgtgtgcgggctacctcagctcgctcccctttttcctcctttacttgcacccctgctagtaaggaggtcttaggcatactaggcttcgggttgaattggagggcacctagtagctgcattgagcccatatgtgctttgtcctcctactccctctcctcgatcatggcactaagtgccttcctctttggacaatcccgtgcccaatgtggaccgtcacataggaagcatttgattttaggcgtgaactccttccttaccaccttaccccttccttctcggacgttaggcgtcttgcctgatccatttttaggagcgttgtggtcccttggaacctcgtctccacccatggtgtggctatcctccaaaaactcatcattggaggagtcttccctcttataatccgttaaagactctgttactgccatggcagtggctaagtcttgaacacctcgacgcctcaattcctgctcggcccacccttgcaggttatccatgaagttgaataactcctcctcctcagtcatgttaggaatctcaagtatgagcgaagagaattccttgacatagtcgcgtatcgagcctgtgtgcttgagacgcctcatgtttttcctagccaggtaagccacgtcctcggggtagaactgcctcttgatccccctcttgaagtcctcccacgtctctatgatgcaagtgcctttctccatatcggcaaacctccgacgccaccatagagtagctgtgtcagtaaggtagagggttgcagttctcaccttagccacctcatccgtcaatgcgatagcctcgaagtatcactccatatgccataagaagttgtccaactccttagcatccctcttgccactaaacccttgtggcttcggcacctccaccctagatgccccttgtgtggccatgacccgtgccaacacaacagccttgtagatggccaactcctgccgaatcttttggtctcgggcctccatgcgcgcagctaaggcctccatccttgactccatacaagcgaacatgttcatgacctttccttggaaggacacaaactcctcgtgtgacaccggttgaacttgtgagcctagcaccccctcgtgaaggtcctggatctgcttccttagatcctctaagcccttctccatgccttgcttgatcaagtccaccccttcccgggtgtctgccatggctagctccaccttggctagccttgcctctatgttggctaaggcttcatgagacttatccttcttgcccctaccctgtgcagtaggctcggtctccctcccacgggtttgctcgctaatctcctctacgttagagcccgacatgcttccttgctatgcccatttcgtaaccgcgctctgataccacttgtcacggacttagtcgttcactaagctcgtgcgacacttagacaagccaagacgcttgatcttgctaagtcagccttgctcccaatgcttagctcgctcggctaagacactcgcgactcaaaagcttaaggagcttggtaggcaactctttaaagaatggaagctcttactaactcaagaaatcctttacaagtgcttggatgctcacttgcttggttaggaagtgattttgggtggtgctttggccaaatgagggcctcacctatttataggcaccaatggaactatctggaaccttggagggttccttacaaatcaagaatattctagaacatcctaccctattctatgaacaaccctatgtacaagaatatacaagagatttctagaagtctctagaaagctttggactcttcccatgccttccatcatagtgtagagatgtgtggacatctctagacatttctagaaccttccacactcttcccaccaatggcttagtgtagatggttctaggagtctccagaagcttccctcctcctatataagcccatggggagggtcatttgaagcatcctatgacactatgctctcttattccaaatgaaagtgttgaaacaccattggggtgatgctatactagcaacttcataccttgtcaattgaatgccaactaaggtcctagaaaaccaagcaccagtgaagaaactcaagacactatttcccaactttcaaggagaaggcactttaccaccaaaggtcttcgggtgtgcatcctatgttcatatccatgaccaattacttggaaagttggatcctagagctgtgaaggctatgttcttaggatactctcccataatgaaaggctacaagtgctatcaccctcccatgaagaagcattatgtcactatggatgtgacttttgtagggaatcaactatactttgatagctcctatctttagggggagaatatatcaaagattggaagataggtgggattgggatgtaaaaaaagaattgaaagaaggaacaaacatcattgctattgaaaagaaggagttgaaaaaaggaacaaacataatagtttctgaaaagaatgacgaattgctgctaaaaggaatgatacaatggttgaaattatgaataaagatgatgggaatagaatggttgtccaccccaatcagagagataatcctagaaatccttcctacaataaattagatagtgtttcaccaaaaatatttgctgaaacttctcctagttctctcacaaataatgaaaccatgcctgaaagacctaaaactccaattcgcaatgtgtgctctaggaaggaaagattcatcatcacttctctagctcttattgtcaacctttaaataggtaatgaaaataacgatgtaagtccaccttctactttagagatctctcctcctagtaatcttggtttgcttattgttttttaaaaaagggttcgagcttgcactcgtcatcccatgtctcattttgtgtctatacagaaactttcaccttaataccaagccttcctctcacaagttttgtctcaacaaatacccacctctattcaagaagccttaacctcaaaatcatggaaagatgccatgaatgaggagatgatagcattgaaaaaaaaccagacttgggagattgttgatttaccaaaaggaaagaagccatggattgcaaatggatcttcaccatgcaatacaaatttgatggatcattggaaagatacaaagcaagacttgttgtcaaagggtacactcaaacttgtgttataaactaccatgagatgtttgcattagtggcaaagatgaataccattagaattcttctgtctttggctgacatcaagaattggtctctacaatacatttctgcaaaagtcaaatttgctgagtaagaaagtatggaggagagagagagggttagagagagaaagaacgtgagagagaaagatagcggcggcgatgggggatcgacagagactgtagagggcgagagccatgcgaggcctgggaagaatgtcaggaagggtggtttcgacgtggaatcgaaaacgtttgaggttgaggtggagaagagaagaggcagattgcaagccacgattgtggaaaggaaaggagggatctcgtcgtgggttaggctaggtccggtgagccttgggatagtcctcgattgcctgattctgagcatcgaggacgaaaggatgggtaggtgggtaagagagtggaaggagaatgagaggaagtactctctgacgcgcgactataacagagggggttgctttctccgtctgggggttgcggacttggagagaaagaggtttagcatttttattcccaaaggaagaggagcaaagggtggttgggcttcaatggtggaaacactacggagcttgggttgtgaagacggaaggataaagagtcagaaggaagacgagccacggtcgaagccaaacatggtgaagacatatgcggaagcgaccaatatggcaaggggaaaggagagaacagaagtaagggtagaggtcacaaaggaggaagtgggtcggaatctattcaaacttgaacactgtgttgtcgagacatggaaccctaacgcagcaaaaggggacgacctcagagggtggggaacccagttagcgagaatttggagcctaaaaggaaatctagggctagcaaaaatggagaagggcaaggttttaatggagtttgagtttttgatagaggctgagcaagtctctaagcttggaagtatctcgtttggggggttgtttcttcgtttggagaagtggaggccagagacgggatgcctgagggaaggggagagaagtagtgaagcttgggtgcaggtagtaggcttatctgtttccttgtgggagcgggatattttgaggaggattggggaggcgtgtgggggatttcttgcggttgactatcaaacggaaaaaatggaggagttacagtgggcacgactcttggtgaagcggaacggtgagacttctcccaatgcagtggaggtttgggttgaagagtcatgttactcgataaccttatggtgggaagtcaggccagtcatgaaagtgtcgactactggaaagaaagggaaggccgtcgcagcgggagagaaggtaaggggtgatgtaagtgcacgcgcgagtgagcgtgtgacggtggcgatggagggttcgaggctcgaggacaccctgctgattgccgatgggacgcgaggtcagtccagcaggtcgggtcaaaccccgaacccttctcggagcgacgacgggtctccaggcgggcctcacgtctcgggtgggctgggtttgttgggccaagcaaagccctctcggtggtctaaggcctctgactcccctgggctaattccgtttgggctggttgattctgggattgggaagcccacggaaaaggccaagcctatggggctgcttcaaggggctgggctggacaaccaaagcccatcttcttctggtttgtttagggcccaggcggaaagggccttcctgctacgaagtgtagccgaagcccattgaggggcccagatgcagctatttcccctttttgggtgaaggatggacagtgggggctctattgggacgagactcagtgtgggggggggatctccaggaccgactgtgccctgctggaggaagacgcaaggtatgataacgctctttcctcctctagaatggtggctcttgaccctccttctcccttcttttctccttttggtcagactcccttgagggagtctttcgaccgttctggggctcttgtggactcaaccaagggggataggttgtgcaatggaactgggtctacagagcaggttgaagggaagtgttgggatttggtagagatcagtaatgatagtatggaggataatagaaaggctttgtgcctagcccggcctatgcctcaagaagaaagtggatgggtggaagcgagatgggaggaaagtgatttggctaggttcaattagtttttgggattctcgacggagggcctagagaaagatatcttggagtttatggttaaaattaggaagaggagagaaagaattcatagcaaagtcatgttggagaaatcgaagtttgaaagagagttgagaagacttgaatgttcagtcaattatgagggggggaagaagaaaaagtgtactgtgcaaggaagagggtgccaaattatggaagtccaatgaaaataaggctcttgagttggaacgtgcgcggagtcaatgataactccaagaggaaagtgattaaagctatgatcagaagccagaaagttgatttgttttgtgtccaggaaacgaaaattcagtccatgactgagggtctggtgaggagtttgggttctgggaggttccttgattggggtgctttggatgcttagggagccgcaggagggattctgatttgctgggacaaaagaaccttggaagtccttgagatggagatgggtcaattctcaatctcatgcagacttaggaatgtagaagacgggaaggcctggatatttacaggtgtgtatgggccgttttccaaagatgacagggagactctctggggggagcttggggctataaggggtatctgggatgatccctggtgcatagggggtgacttcaatgttaccttatccctttgggaaaggagcaatcaggggaggctgactggcgctatgagaagatttgctcaggtggtggatgacttaaagctcctggatattcctttgcaagggggggggggggctggcttcttggagtgggggaaggaacaatcaagtttgggctagactggaccggtttctagtgacctaagattggcttgactgtttcagtgggatcattcaatgtaggctgcccagacccacctctaaccattttcccattttactgaaaggtggaggggtcagaaagggcccttccccttttaggttcgagaatatgtggcttaaagttgatgggtttaaggagcttcttcggggttggtggtaggaggcggggaggagggggagggccagcttcagattggctacaaaattgaagattctaaaggataaaatcaaaacttggaacagggatgtgtttggtagattggaagtcaacaaaaacctagccttgtaacaaatagaattttgggatagggtggagagtgacaggaacctaactgaaagagagacgaagctgaaaacagaggccaaggatgtctttaaaaaatgggtgcttttggaagaaacgcattggagacaattgtctagggagttgtggcttagggaaggagataagaacactggcttctttcaccggatggctaatgctcatagaagaaataattccatgtaaaagattaaaatcaatgggaggtggctggaggaggagcgggaggtgagagaaggggttgtgaatgcctttcagaagctgttgtcagaggagcaatcctggaaagctgatattgaacggctgcagctacaaaggttaagccatgctaaagctgaaggtttggaacagccattcactgagaaagagattcatgcggctctgatggggatgaatggtgataaggccccaggcccgaatgggttcacagtggccttttggcaatcttgttgggagttcgcgaaagaggagattgtggacttgttcaaggagttttttgaagaaaattcgtttgccaagagccttaactctactttcctagtactcattcctaagaaagggggggctgaggacttgggggacttcagacccatcagtctgcttgggggtttatataagatcttggccaaagtgttagccaatagaattaaggaggtgttagacaaggtggtttcgccggaccaaaatgcctttgtgaagggaagatagattttagatgcctcgctcatagccaatgaggtgattgactattggcttaaacgcaaagagaaagggctgatatgtaaattggatgttgaaaaagcctatgatagtattaattgaaatttcctcatgaaggtcatgcacaagatgggctttggggactggtggatgaaatggatttggtggtgtatttcaactgcaagtttctctattctggtcaatggggtgccagttggttatttccccaattctagggggttacgccaaggagatccactttccccctacctctttgtgttgggaatggaagtgctaagcgcgttgttaagaagggctgttgatgggggcttcatttcaggctgtaggattcaagggagggggggaatggagataaatgtttcccacttactatttgctgatgacacgattattttttgtgaagcaagacaagatcacattgcctacctaagttggattttggtgtggtttgaggtagcctctggtcttggaataaaccttgctataagtgaagtaatcccggttggggaggtggaagacattgaggtgttggcgatggagttagggtgtaaagtggggacccttccttttgtttatttagggctacccttgggagccaagcacaagaccatggctatgtgggatggggttgaagcaagaatgagaagaaggcttgccttgtggaaaagacaatatttgtcaaagggcgggaggattaccctcattaaaagcaccttggccagcatgcctatctaccaattgtctctttttcgcatacctaagctagttgcaaaaaggctcgaaaaactacaaagggattttctttggggagggggaagcacggaaagaaaaatccatctaatcaattgggaggtggtgtgtacccaaaaggagagtgggggtctaggtattcggaaaattgatctcttgaataaggccctgttggataaatggatttggcggtttgcctttgaggaagaattcctttggaggaaggtgattggggtgaagtatggccaagtgggatttggttggagaacaaaggaggcctgcggaacgtttagggtgggggtttggagggatatcttgaaggagtcgtcttggtgttgggataatatagagttcaaagtgggaaaggggactaaggttagtttctggactgaccattggtgtggaaatgaggtgttgtcccaagcttttccccagttgtttgctttggcggcctaaaggaatgcctacgtaaatgagatgtgggattctagtcttggtcaaggaggttggaacataagactctctagaaactctaatgattgggagttggacgccttaggagagctgttgcatatgttgagggatttgaggatttcttttgaagaggactcggtgatatggaaaggagggggacacggccgctttcggattagagatgcctacaagttgttgacaaggcctaatgtcattaccttcccgaaaaagagcatttgggtggacaaggtcccaaccaaagttgtttttttttgcgtgggaggcttcttgggagaaggtcctaactttggacaaacttcaaagacggggttggcatcttccaaattggtgttttttgtgtggttgtgaagaggaaaatgtaaatcatattcttttacactgtacagttgtaagggctctctgggagattgtcttggccttgtttggggctaattgggtgttcccagagaaagtcagagatgttagtcagttggaggggcccttttgtggggagaaagaggaaaaggatttggacttccatcccgttgtgtattttttggacggtttggaaggagagaaatagattagctttcagagggggcgctctagctattcagaaactaaagaattcttttgtttgtaacttgtggagttgggctagagtgtatatgggagaagagtcctcttcgcttttaggttttttggaatggcttgtcgttccctaaggggtggtgagtgttgtttttgttcaggctgctatgtatacttcctgtatgctttgtggctttttgcctcgtaatatatatatgcgcacttatctaaaaaaaaaagaattggtctctacatcaatttgatctcaagaatgcattctttcatagagatttagaagaagacgtttatatggacataccattgggatactaggagagacgaccgaagagcaaggtatgtagactaaaaaagtccctctatggttgaaacaatcacttcaagcatggtttgggaaatttaccaagtctatgcttgatagaggctattcccaaagtcaaggtgatcacaccttattcataaaaccatcctcaattgggagagttattgccttaattgtgtacgtggatgatattattgtgactggtgataacaacatgaccaaaccaagcatgtggaaattgatagacattttataaaagaaaatcttcacttcgaacaagtttgtactccatatgtttcatcctccaacctgcttgtagatgtgctcacaaaaggattatctaatacaaactttcaacagataattagcaagcttggaatgcgaaatatctttgcatcatcttgaaagggagtcttagaaaatgtctatcaatttccacatgcttggtttggtcatgttgaactgaattatgtgctatgtttatagctgctttattgtcacaataaagcaccattggactctttactctcacttgcaaatctaagagtattatcttcaaccaaagtagtttgcaaatcccctacaccattgtttccctcaactctccttgggtggcatggagcgtttgtggggaaaacccgtaaaaaggcgtggcaaatgacccccttatgtatattttggtcagtttggaaggaaagaaatttgttggcttttgggaatgaggtgtttttgctccaaaggctgaaatattcttttgtatgtaatctttggtcttgggttaaggtgtttatagttttgagcccttcttctcttgttaacttttttgagtagctaggctctaagtaagggcaggggctgttgtttatttccttttcccttggtttcgagtctgtgggctgcttttgtatactccctgtatacctaaagggcactagtttggtgtttcctcttcccgtttaatattattctctttatctatcaaaaaaaaaaaaagaatagacaataatttggtagaataggcaattactttctataaattagttgtatatttatagttctattgttaccactgatgtggatctactatgtatgggaggttaggatatctttcctagtttagagctcaatagatcaactagtgtattttatatatcttataatattttttcctaagaaatatatcagttttcataactctttcacaagtttatagaacctaatgtgaaacctctcccatcccacccccaactcattgtcacctaagttaagccatgagggctgtgaataccttttttttttctttttttttatagagctcttacattgaaaatttgaacttagaattcttttgatgtttgttcccctagatttttgtaattgacataattcagttgtaggattttgaaggtttccgtatgtgagttttgtgattttatttttgttttcttatttggtaaaattcaatgtattgtttttttcatttattccacatgtttcatgtcttggagagattcacactatttgtatttttaagttgaacatgaaaactgtcttatggacatttatgctcattttgttatctctttatgttacccactgaacttgcatgttgcatttgaatggcacttgtatcttcagat

SEQ ID NO: 13578 - DNA, 11305 bp, Vitis vinifera
  Intron number 3 from transcript GSVIVT01027547001 (locus G SVIVG01027547001) derived from phytozome v7.0 (chr-ID chr1 5; pos 15798691 to 15809995)
gttgactgcccacagcccaatcaggtaaaatacttaataaatttatctttgctatacattattaattatagataactgcatgctaatttatcacatgaatgattttaagttgagcatgtgcagactagcattttttttgttattattaaaatggtcttttttatatgtaaacttttatcttttaatggaatcatttctttgggatggtacgcatgaacattcattcataggtgcttttagatatttgcttatatcgtcataagaatatatttctcactgccttaattttctgaagattttaaaaaatatttttaattccttcctcgtttaaatgagtctcaagggcttcaacagcttgatgcaagatctttagatattatagactattgaagtttatagaataagatataaagctaaagatggccgaaaagaagaaaaaatacaaaaaaatccttggcaattgcactaaggttcttggttgatcacacacaggttttcttaaatagtcccacttaggaacaaaacagtcacaccctcaaaggaagcataaccaatgtcaaacacttttattaaaattttgattccctattttaaatactacatatgtgtttataaattcttatgactattcaaataggatgattttactaatttttttttacaagaatagaaaagatataggataaaaatattatttagaaaccaaaaagaatagaaactttcctaacatgtcaagaggactaaaagaaatgaaaacttgacaaaagcaaaccactaactaaaatagaaacttaataaagtaaaatataaatttaacaaaccactcaagttatcctaaactgtctattgaagtttccaagaggaacttaaatcatcatcagggtcctaaattaaagcttaaacattggaactgacctttccccttcctgcgcaagtctttaaaggatgtttctaatgttatttcttgccactcttatatctttctcttcttgaaaattgtacaagtctagctagtgcccaatcatgagttattaacaagcattattcttgctgaattatattatatagtttgagctcaagagtttagggctccctagttccttattaggaaataattatatattaatttaatccttacacttaggctttgtttgaatcgtaaaatgtgagtggaaaggaaataaaaaataaagaaaaatgaagaaataagggtttgcatgggaatgtttttgaaaatggttcctaaaaagtagtttttgaaaatagttctcaaaaaggcatatgataatgtcaattgatattgagaaggtgtatgatcatgtcaattgggactttttacttgcggttttggaaaaaatgggttttggccagaggtggattagttggtgcatttcttctccaagtttctcggtgatagtgaatggtaccattttggggtttttacaaaactctaggggattaaggtagggggatccactttctccatatttgtttgtgcttgctatggaggcgcttagctgtctccttagaagggcaagggagggcgactttttaattggtttaaaagtgaatggtagaggtggagagggtttggaggttactcatttgttgtttgcagatgatattttggtgttttgtgaggcctctcatacccaattgacttgcttaagttagttgtttatgtggtgtgaagttatttcgggtttgaaaattaatttaaccaagagcgagctcatttcggttgggagattagaggacttaaaggagttggctcttgtaataggctgtaaagtgggagtgctaccgaccatttatatggggctcccgctaggcgcccctcataatttgttggtggcttgggatgtggtggaagaaagattttataaaatattgacatgtggaaaagacaatatatttccaaaggggggagactaacgttgattagaaatacgttatctaatttgccaatctactttttatctcttttctggatgtcgaggattgtgtggttaatgttggaaaaaattcaaaaggacttcctctaggggggtgggaccttagaaagtgagtcttatctagtgaagtgggttatcgtttgctttgacagaaggaaggggggcttgggcgttaggcaccttcactcacttaacaaggccctcctttggaaagtggaattgatgttttgcttcagaaagggaggccttttggagacaaatcatttgtggtaaatatggggaagtgcaaaggggttggtgctctaagaaagcgagagacaactatggcgttgggttatggtaggccataaggaagttgtaggatttagttagttatagattgtccttttcggtgggcaatgggaaaaggataaagttttggaaagataaatgatgagtcgttaaatgtttcttttccctccttatttgctctaactagctctaaaaaagctcaagtggcgaagttgtggtaacattctattgaggggggtgtttagaatcctaacttcctaaggcctcttaatgattgggaaattgttattttttttttttttgataagtaaacaagattgcattaaaaaaggctagacgccacaaagcatacagggagtatacaagatggatacagcctcaaaaaagaaaaggaccagaaagaactacctcccctcaagtggaagctatccactccaaaaagcctataagggagaaagcctcctcacctaaatacactttggcccaattccataaattacaaacaaaagaattctttaacctctgaacattcaccacaccccccctaaaggctaacctatttctctccttccaaaccgtccaaaaaatacacaacggaatggatttccatatccgtttccttttcttcccaacaaaagagcccctccaggaggttaaagcctccttaaccgtttctgggaaaacccacttaatatctaacaacccaaaaataatatcccaaagtgctctagccactatacaatgtaaaagaatatgatttacattctcttctgcacaaccacacaaaaaacaacagtttggaagttgcacccctcttatctgaagcttatccagagtgagcaccttcccccaagtagcctcccaagcaaagaaactgactttcgttggaaccctatccacccatattccccttgcgggaaacaaggagacattagatttatccaacaatctgtaggcttctttgaccctgaaagaaccattccttgcctccatttgattgagtcatcctccagggaaggcctatggcccctcaaagtacggagcaaatcaccagccatatccagctcccaatcattgaaatccctctcaaaaatcagattccaatctccttgacccgaatgatggtcccacatctcctcaatcgaagcatctctatgcacggcaaggacaaagagatggttgaaacattgggacaaaggagtatcagtgcaccatctgtctttccaaaatttgattttagagcccttcccaaccagaaaagacaaattttcccagcaccaatcagattctttcataatctccttccagaccctaactccagccgccccactaaccttcttagccctccacccataatcctcttgcccgtatttggtagagatcacttgtttccaaaggttatccctttcacatgcaaacctccaaatccacttgcccaacaaggctctattcagagtggctattctccttaatcctagccctccattgcgtttttctgtacagaccacatcccattttactagatgaattttacctcccaaatttccacccccccaaaggaaatctctttggattttctccactcttctagcaacggacttaggcatacggaagatagacatttggtagattggcatactggccagggcactttttatgagagtgatccgcccccctttggagatgtactgtcttttccaaagcgcaagtctcctcctgatcctctcttccactccatcccacatagaagaagccctatttggtacccctagagggagacccaaataatgggagggcaaggaccccaccctacaccctaactcagcagctaactcctgaatctcctccacttctccaattgggattatttcgcttttggctagattcatacgaagacccgaggctgcttcaaaccaaaagagaatccagctaagatgagagacttgatctttgtttgcctcacaaaacacaatcgtgtcatcaataaaaaacaagtgggaaatatgcaatgaggtactactaccatcccgaatgttgcatcctgaaagataccccccctccactgctctcctgatgaggacgtccaaaatctccattcccataacaaaaaggtaaggggatagaggatctccttgacgaagccctctagagctagggaaaaacccagctggcactccattaacaagaatagagaatttagcagaagatacacagctccacatccatcccacccacttgttcccaaagcccattttttggaggaccttcattaaatagttccaattaatgctatcataggctttttctatgtccaatttgcagataaggcccttttcttttcttttctgccacgaatctatcacctcattagcaattagagacgcgtccagaatttgtctccccattacaaaggcattttgcgcactagaaaccaccttaccaatcacccttttgagcctgttagctaagactttagccaaaagtttatataggccccctaacagactgatgggtctaaagtctcccaaatcctccgccccacttttcttaggaatcaacaccagaaaagtattattgaggctcctaacaaaggtactatgctcgtgaaattccttaaacatctccatgatctcctctgcgttttgccaaaatgcaacagaaaaaccatccgggccaggggctttgtccccattcatctccatcaacgccgagtgaatctcattttctacaaatgggacttctatacactctgcatcttgctggctgatacaccccatctgaatattaccaatatctgcctgccaagccatgtcttcagtaagcaactgctgaaacgagttcacaatgccttctttcacctcctgttcctctaccagccactccccattaaccttaatactgcccatagcgttgtttcttcgatgcgcacttgccattctatgaaaaaaccccgtatttttatccccctcccttagccaaatctctctagaatgctgtctccaatgggcttcctccaacaggacccatttcttaaaggattccttggctgccttttttaactcagcctcctccacagtcaaaattctttcactttccacccgatcccaaaagacaacttgttctagggctgtggctttattggtttccaacctcccaaaaacctctttattccacactttcaaccttttcttaatttccttcattttagtagccaatctgtagctagcgctgcctctgacatcaatcccctgccaccatgctctcacaacatcttgaaacccctcaaccttcagccacatattttcgaatctaaacggtgttggacctcttctaattccgcccccctctaagacgattgggaagtgatctgagattggccgagacaatctgatctgagtggcaccattaaacatctctagccaggtagaagaaactaaaaatctgtctagtctcgcccatacctgattgttgagccccccattccaggtgaattctcccccctgaagaggcatatccaccaactctaactcgtccacagtctctgcaaatctcctcatggctgaggtgattcttctatgactactcctttcttgttgggacagggtaatgttgaagtccccaccaagacaccagggatcgtcccaaagccctcttaacgcccccaattcctcccacataccctccctttccattttagtaaagggcccatacactcccgtgaaaacccaagtagccccattttccataatcttgaatctacaagacaaagtaaaatgaccctcctcccactccaagacatccaaaaccctcttatcccaacatatcagaatgccacccgcagccccttccgcatttagagctctccaatctaaaaatctcccagtgcccaggcttctcactataccctccgacatctcctgaatcttggtctcctgaatacacattagatccaccctttggctccttatatagttcttaataattttcctcttagagctatcattagctcccctcacattccaacttataatcttcagcttcattggacaactatcaattggttccctttgtcctgtgagagagctttctgcttattccccccctcataattgacagaacattctagcctcttcagttccctttcaaacttggtcttctccaataattctttactgtgaatcttttcccttctcttcctaattttagtcaggaagctcactatctccttttctatcccctccgtagaaaatcccaggacttggctaaatttcgccaagctacactcctcccataattcccctttcacattttccgaggcttgaatccctgaggcaccaacactcccctcatagactgttagccaagttgatttgtccccccctaattcctcctctaattcccctgaacgatcgaaagactccctctccggagcctgatcaaaattagaagagagaagaagagacgtccccatagcttgatttcctttagtataggaatgcagggcgtacctcttagcttcttcttggagcgcacagtcagtcgtggagagaccatcaactctctgttccctcctgctctcctctggcacccagcacgtcaaaacgtcctctggaaagggtctttttctagaaagtgaacagcccaataaaccagccttctcctggacatccttagggccctccctttccaatccgtccatcacagcagaggagaggcagcccattccagaagcccaacaagtagacgatgggcctgcctctggcacaacagccatctttaacttatcctttaattttcggcccaaagaaccatctctcttagccagcccaccccccatctcctgttctgtcaggcccaaagatgatccatgtgaaggcggcccattcaagaatccatccacgcaggcccactcccgagacctcgatccatgggtctggctcttggactctaagcccgatccatgggaaaacaactaagacatgttttcaaaaagaaaagaaaaatgaagaaatgagggtctgtttgggaacttttttgaaaataaacaatagttttttagaacaattttcataagaagttcactgatgttttctagaacaaaagtctgtttggaaatttggaacgttctcaacttgtttttgtatttttaaatatttcttaaaaatagcttttatctataatatgttattttcaatcattctccatatttgtacaattatattttaaaacaatcccctataaaacaagtgaaaacggctaaaatatgttataaaaaaatagtctgttttaaaatcaattcttaaaaatctgttttgggaacaattgataaccaagcgtgtttttatgtcttttttgttttcaaaaataaaaaactgttttgagaacagacccaaacacaatcttaagagcttaatttttttttttctccaatcactccctaattcttttcctctttgacatagagcgtggagagtttagaaatccataaggttttaaataatcttcattatatctcatttcctttatatttttatatgataaagcatagaaaggaatttgagattcctctctcttctcctttcttttgtttagctaaatctaggaataagggtgcaatttaggaataggagtggttggctgattcttcttactgctggaacaaacaacactaattggctgaaattcttcccttttgcataagctgtttccaaagtaaatatgttttcccaaattgcttaccacacaaagaaaccaactttgtggtagacattacctcaaacccttctatatggaaacaaatattacaattcatattcaaaatcttatagaataatttctcaaataattttccatctttagcatacttctaagctaagttatcctccttttcttcatgcacaattacatttgaatacaagtgaaagaggattctactatttccaattgctaatcacaaaccccctgatgaaccttaagagtccaatggctacaactaccttccacatacaaataatccgtcaccagggtacctttgtttaaagatggcaaaaaagtttggaaacaatagtaagtgtaaagtcctcacaccaaatattattccaaagcctagttccaaggataaaaaaacatttcgcattcaaatagctttggaaagactcgagggtattgactcttcccaccatagagcaccaaacacccatctttatccccatgcttccccatatgcccttctgccatagcttatttctacccatagcaaacctcaaagtccacttacctaatgaagccttgttcaaaattagtaaattccaaatattcaaacctttgtactcctttatagagcatacaattgtccgtctaaaaaatgcaaattcctcataactttcctagtccctataaaaatctcttcgagtctttcctaaccttggttgagttgatattggcatgacaaaaagtagacatgagataaatgaggaggctagaaacagtacttttaatgagcacgagttgtccttcctagcgagatttctttttccatgaagcacgtccttttgtgaagtcactcctcaactgttttccaaactaatttagatatgaaagatcctgaaattgtgaattcagttcccatttccagcattctttcatttgtttgcatatatcaacctgaagttgagttcctatgtcattgaatgacccaaaaaatgtgggatacaaaattccaagtgagatggtgaatatctattaccctaacctggaattagaattgtagggcctgtttggtaatcgctttcgaaagcatttctgaaaatcagtttttgaaaactattctttgatgttttatagaacaaaagtttgtatgaaaacctaaaatgtttttaatctatttttaatatttttatgtttagtgttttattattaatcattctatatgtttgtataattatttttaaaaacaacctttagaaaacaagtgaaaataacagaaaactattaaaagatattatgtgaaaatactttaagaataagaaacaaaaaacggtttttagttgccaaacatgttttttttttatttttttttatttttatggaaaacacaaaattgttctcgaaaacagttaccaaacaagcatgtagtaactaataattaccaacatacccttaaaacttatttttaaaataaatttttttaattatgtcccaaatccaatatcttgaagatcgcttttcttttccctttatttatttatttaattcctagttttttatatgttgtcattgaataaacatttgaaaatgattatacatttaagagttttttttttaaataaatattttcaaacttaaaagccttttaattatatttgatggctctaaatagaggtagttaaaaattgtagagttaataaaaaaatttcaaaatttaattgttttcttctcaaaaatgtgaaatatattaaataaaaacttttaaaaaatattttcttcttgaaaatgtgaaaatattaaatcccttgttcattattaaaaattaatatgatttagttttatactaactaaacataaaagtagcaatagaactaactttctaatcagattcctatggtttccaaacattagaatgagatcaatgggttcctggggtaccaattcttgaaatttataaccccaggtattctatttccatttcctagatttagtgggcctgtttgctaggtgctattaatctatttgctgtttgcctattaaaaaaaggaaataattctgtttcctagatttttcaaaccaagtggagtattgaagtttttgagagaagctcactactattgtggaattcttcttcgagttatcatcaaagtttggaatcatgtatgacccactgcatcgaccacccactgatacttttatatggagtaccatctatttcagtcttatttaatatgttcaccttttgttttttctaaaaaaaaagcctttcatatgtatgtagaactaggtgtttgactttcctcagaaataggaagcttttagaagaggagaggggctggagttgtttcactttgtcttaaggttagggttctggggttgtgggcttattttgtaattcctaagggggcagaaggtggtggtttcaggaagtgcaaggaagagtggaagtggcagtagtgggtagatttggtttgtatttacccaaggttttgataagcctggggtctctatgtctttctaggcttttggggtgaagttttttgtattggtttatggtttattgtttctctttccttttgcttgtatttgactactacttgtatacttcatgtgtactttgtgtgccttttccaagcgtttttaatatatttgctatgtttacctatcaaaaaaaaaaaaatgtgtttctagaactaagtcaaaacttggggttaaaatagtaaacctgtttgttcagggatggaagaagacttaactagttgaaagccaataatccactttctcaaatgcttatctttgaagttgttggataaaaggtcaacatggccatggtagactaccactaagaaggatattcagaacataatatctattcatccttgcatcacattgctaattacctaaatggtttgtctttttaaaacagcgatatgtttggagattaccaattattgtagtaaagagtgaatacactaaagtgtatgtatatatgcatgtttattttttttgataagtatgcatgtacgcgtttatatttgtagcatgagccttgtttcttcttacttataaaaaaaaaatgagccttgtttcttcttaatcattgtgtttacataccttctcatcttgaaattggagaattcctaggcacttatctgaggtcattgcggcatgagtctatattcttcttaaccattgtatttatataccttctcattttgaaattggagaattccctggtacatactcgaggtcattgtatattgagccataagttggctattttattatgagttctcttcatctgatatcttcttccaggttgccagggtgttgcacctcatatacaggttggt

SEQ ID NO: 13579 - DNA, 6825 bp, Vitis vinifera
  Intron number 3 from transcript GSVIVT01021418001 (locus G SVIVG01021418001) derived from phytozome v7.0 (chr-ID chr1 0; pos 5108068 to 5114892 reverse strand)
tgggtaagaaaatgatctgcaatctggtattactctttgtgctacatctattgatctgtagttcttcttatactctgcccgttgtcatgcttattaaagtgttgagagtcaatctatttttaacttgtgatgaactttttcccattttattgttgcctgcttcaagtgttggttctgggattgaatatgggtgattagttaataaatacaggtattttatggtgccatcatctcttgggaagttccacttggtacacttgcagtagacgagtggctgcaacaaaggaagaagataaccaagtcggatgcaaatgaaatgagtaaaggaaaaggagaagttggcttcatactatttttgaaggatttattcattatttaacaaattttgttgggattaaacatattgtctctattagttctctcaattgagaaatgagaaccatataaagagtccactactcctttatgaggattctactactgcacacagtgacccagtaatttttataatcatcagcagcttatacatacatatgcaaaggaatgacgttgcccttgtgccactgatgcatgacgtggttttcttttgtttataattttttagctggctggagcaattcctatgtatggagatacaggcattttcttgtgtaatcagcaatggtttggttgttcaaagattataactaaaaatagcaggacataaactttttccttctaccatggttcgtaaagatgatttggaaaccatcacttttctccaaatcattactactactcttcattatcttggggaagaagtgaagctttcccttcaagcatagtgtggaatccttgggttcctacaaaggcaagcttctttggttggaaagctttatgaagtaggattttaatgattgaccagctccaaaggaggggatggaattttccgaacagatgctacatgtgtaaaggtggaagaggagtcagctgatcatttgtttatgcattgctccaaggtgagaattctatggtagatggtcttttctcttttggtgtgacttgggttataaactcttcggtgagaaggaccacttatgagttggcatggttcttttttggggaagaagagtaagaaagcttagaagatcgctcctgtgtgtatattctgggtgttatggatggaaagaaatacaaggttgaaaaacttatgtctagtaggttaacacccaaagggggctaaatgggtgatcttttaaagattttgatataaggattgagatttttaacccaaactaaacctgtgagagggaattaagcctttttaaattaattgaaccttgatagattaaagagatcaatggaagaaagaatcacatacaagagacaacaaattttacgtgggaaacctccacactaactgtggaaataaaaaaccatggggtttaaaacctcaaatcaagcatccactaattgaaatcaagatacacaaatttacttgataacttaccctaagacttattctttagcatgtatattgtgaccaacgtctacgacgtagcacttccaatgctctagtggattcgccttagcctttgaggggatgtaggtcctttagacaacttggaattcgataaattgaatcgttaagagatttaggaatgataaggcaagttagggttttttctcatggaagcatcaaaccctaaaatgagtttgggaagggtatttataggttcataaacccaaagaaatagaatcaatttttttcataaaaaataaatcgaattttttcaaaaaagagaattgtcagaatatggtagaaatagaatgagtgcccgaactgacttatccatcgcttgagtgctcgagtggtggttccaacgcttgagcggtcctatttaacaaaacttaaaattaaaacgtttttactcaaaacaataattatccgatccaatccgtaccctttttaaatactaacttgcctctattaaaccttttcagacttacttgtgacaatttggttgaatggtcagcaacctcgagtcttcaatggagagtatgatagaaatggaatgagcgctcgagttgacttatccaccattttagtgcttgagttggacttatccaccgtttgagtgctcgagcggtggttctagtgcttgagtggtcctgtttaacaaaacttgaaattaaaacatttttacttaaaacgataattatccaatccaatccgtaccctttttaaatactaatttgcctctatcaaatcttttcaaacttacatgtgacaatctggttaaatgatcagcaacctcgagttttcggtagaaagtaagtcactatctaaaaaggtttctatgttagaatgaaaaagaacaaaattaccaacaacaaactgaagacattaggccctaacaaaggtcatttgatggcacaaaacaataagatcaagtaatcaaatcttcctttatgtctacctttttggattgggttagagtgtacataagtgaccattccatgactgtgataggccttattgattaactgatctcaaagtaggttgagggagggtgtttttggttatctcctttgtttgcttgcttgatggcactctttgtatacaccatgtatactttgttgcaccctcttttaggcaccttgaatatattctctattttgcctagaaaaaaaaaaagaaaaagaaaaagaaaagaaaagaaaacatcacttttttcaatctcttgatgtggctgttaggacagcgtgaagcctgtaattcttgtacttcagcaaccagtccatcatgatatgattcatatctataatatggaaacaagcacacagctcagaatgttgttgacatttttataatgagaaggctctgttcattctttatttcctaatttctttagggcttgatgtttatctatttttaatgcaacttatgaaaagttgctagctgcaaacttattttttggatatccataattgtttaatcccctttaagatatctgatgctaagtgcatcaattgcaaccattcagaagaggtgaaatagttttgttggagaattgatgttggatcacctcaaaaatctcaagcttatggtggcaatactttactagtttttgctaaaagataccgagtctgtccaaagcccttgaatgggcttagagaatgaggaagcattaagttgcaattgcactaggtacactatatagtcacccattagaagatgcatccaatttagaggctactgctgttggtagcttaagtttcatttagaagttttcctttctggcgagttttgaattgattgttgttgctttatgtttccttttaatttaaattgattcctaccttatttgggaaagtatttcattcggcttatcatgttttgtggatgttattagtagttaggtattgaatcaaacatgcataagttggcttagataaattttctcccatcaactctgccatatttgctctctactttggatgcatgtaaagtgtccctttttcttacaagtatcaaccgaaacactatggaactagatcccaaatccttgaatgctatgctccaaatagagatttcaacaaaaatgggtacaaggagacgaataccttcaagtggtggtgaccatacatgagagagcttctcagccaaagtcttgaatctgcatgcaaggtgccaatctaagaatctaaggctcaaaggagtgcttgtgaaggcttcattaataaaggctcaaagggaggaataagagtacaacaactcccaaagtgcatctctaaacatccttaaaatcctcacatttctttcccatcggattgtccatatcaaattgagttcaacgattgtccataaaaccctatctttgggtttactgctgaagcctctaaatggaatggtcaacatttttgccaccctacaaggtggaatcccaatatatgccagaaactcaaagcaattgggcaatgaaggaaatgatcatcaacatgccacacacacatatacacacatggatatcctactccaaatatattgttcttgttgaagtaaaaagccaatagaaaaaataaaagacacaccaacactccacatctaggtcttactctatctcaaactcagattaagaagagtgcccttgaaatacaaatcaatcataataaacaatgcaggaaaagggaagaaacgggagaaaaagggggagatagagtggttgtagatcaagaatagtcactccactccaatacatttccaaaggaggtaggattactttgattcggagtactttggcgagtatgcccatttactatatgtctatgctctctatgcccagaaaagtcagattgaggttagagcgaattaaaagggatttcttgtggggaggtggggctcttgagaggaagcctcatcttgttaggtgggatttggtttgccttgagaagtgtaatggggggttgggggttaagagtctttctatcctcaataaggctcttttgtgtaaatggagttggagatttgctattgagagagaagctttttggaaccaagtgattaggggaaagtttggggaggagcaagggggatggagttcaaaggaagcaagggaggggtatggtgtggggttgtggaaaaatcttaggaaggaatgggaagttgtaagaagtaggctattttttgttgtggggaatgggcaaagggtaaaattttggaaagatatttggtgtggggatgaacctctttgtgtttcttttccttccttatttgcactggctgttttcaaggatgcttgggttaaggatgtgtggaggtgcaatgagggtgggggaagttggagcccgcttttttctagaccgtttaatgattgggagttggacgaggtttgcagattttttgtggccttaaatgggaagcgaattcagcaaggatgatagggtgatttggagagagactaaatgtgggaagttttcagttaagtctctttacaaatcattagtatcaggccatccagtctccttcccttcgtcggctatttggaaagtctcggtgcagcctagagtgagtttttttgggtgggaagcaacttgggggaaggaccttaccttggatcagcttcaaaagagaggatgggctctagtgaacagatgttacctttgtcataggcacgaagaatcaatagatcacattctcctccactgtgaaaaggcaaggactctttgggcgttgcttttctctatgttcggggtgcagtgggtgctgccagccactgttaaggagatgcttttggggtggaataggacttttgtgggaaagaagaggaagggtgtttggagagcaagtcctttgtgcctcttttggaaggtttggaaggcaaggaacaaagttgcttttgaggaagaagagctgtcaattcaaaggcttaagttttcttttgtttattttctttggtcgaagatgaaattgtctataaaagatggtccttcgaccttagtcgattttgttggttgggtggcaacccgttaagggtgtgggtagggaagctcctttggccttggcgttcagctagggtgtgaggggtgtttttctttcttgtatatttaagccactgctttggtggttttttaatacaatctctttacttatcaaaaaaaaagaatagtcactccactccatagatagtgaacacagattctgtcttactctatctcaaactcagattaagaagagcgcccttgaaatacaaatcaatcataataaacaatgttggaaaagggaagaaaaaggagaaaaagggggagatagagtggttgtagatcaagattagtcactccactccatagatagtgaatacaaactcttttgtcactttgaattctttttcgggttggaaatgcgggcttctgcttattcaaaatcccaatctggttttaggattggtcacattcttggacttggggggacaaattccagaaattccaattggctgtgactctacattttccaatccttgttaaaatatttaagtaagaaagtccattatcatataatttaatatattacctgacattgtgagtccatggatgaagaggggtggttaatatttagagcagaatgggaatctttcattcatttaatctcaggataatggttaatcttgagaaatttaaagtcacctaacttgtaatttcaaatggagcttctgttggatattgagcttctcctctgtcgattttttccatagttcaaatctggattcacagtggaaaagaaaacagttcatggctaagatacacctgatagacttaggtttatcttctcattgacaacccatttattttggtttccctggaaactaagttcaaggctaagatacacttgtgtcatgggttagcttgtgcatagaaaaagactcaatgattctaattgattttatagattaggtgggatctagttcagggagggagtaattattttctatgttctctctctttacggcaacgtcttctgctacctattgtatacgtcctttgtaccttggtatatagctttcttttttcctttttgatatttgtgatatttttttatttacttatcgccccccccccccaaaaaaaaaaaaacatccacatctttttttttttcataaaaaaaaaatggtaaactatattgatcttccaaatataccatgaagttgtaaaaccatatgtttttttgctgttcttccacattaatatgtaattgatgctttcatttcacctttatcttgagctcactattggaattaatttcctatcctggcaggttacttcctttattttgttttaactcttgtggct

SEQ ID NO: 13580 - DNA, 773 bp, Vitis vinifera
  Intron number 1 from transcript GSVIVT01024564001 (locus G SVIVG01024564001) derived from phytozome v7.0 (chr-ID chr6 ; pos 8828656 to 8829428)
ggctacagacttggtcgtccctgataaagataaaggtacgtctagtaggctctggtacatagttttttttttcctctgcatttgggtttttctctttttttttttccttctgagtttacatgtttgtaatgccatcttttggaaggacaggaaaattttattgctttatgctaaatgtactgtattattcatttcaaagctacaaacttcacgggatagaaaatttatggctgcgagatgtggccatttgtcaagatttgttttgatttggaattcagattctatggaattaaaaatcattattttggctgtggagtgttccttgtgaagctctgttgttttgatggaattgggtcccaaatccaaggcctctttcctttcaaccaaacacacttaagactgtatatggtttagaatttgaaggagttgaatttcaaaatttatgcctttgttgtgaaatagtttttatagttttgggttctggagttcaatttcaaatccattggtatagaaaggaattagtcaatgtaactgaaattggagcctccaatttaaaattcagatccccaatttgaaagcaaccaaatggcctgagtgtattttcttccataacttgataagcattgtacttaaatgattatgtgatccaatgaccaccacagttatttctattcaagcttgtttttgacattttggagtttttcatctacaattcagaactaattttgttaaataatttatttttttaattaatagaaacactgaaggctagt

SEQ ID NO: 13581 - DNA, 11042 bp, Vitis vinifera
  Intron number 1 from transcript GSVIVT01001965001 (locus G SVIVG01001965001) derived from phytozome v7.0 (chr-ID chr1 9; pos 5853040 to 5864081 reverse strand)
cattatttgggttggtgcggttgggacgtgatctggtggattctacatcactgagaataattagtacctgtttgaaaaatgaattaaagatggaaaaagaaaactatcccacttagaagggcgaaatttaatgtgcttttgatgggtaggttgaaattaaaataagaaaactaccctacttagaagggtgaaatttaatgcttgtttcattcttctatttttttgggaagtatttatgatagatattgactaaaggggcatcgaagtctagttatttaatgtttaatacctaaaatgactttaatttaaattatgtttgtaatgattttaaaaaatatttatgatatttttaataataaaaaattgttattttttaaatattaaaactattaaaaacacttcctaaaattattatttattcatgacacagatgataacaaatgagaaatttgaaactttaatatattatgtttgacttcaagaaaatattaagaaaaatatagaagaaatcaaatataattaagagggctatttgatcaaaagcattattaaaagctcaaaatcctctaaattttttttggatattttttttataaaatattatcatttttcctcgttaaaaaaatatttttttaaaacatacatataaatagtcaaaatgataaaaaaaatatttatataaaagattgattatttttcaaataaaaatatgagaatgattagatttacaaagttcgggattattttattttttaatttgatttattctaattaaaattagttagaaacatatacattttcaaataattaaatataattaatattacttagaaatttatgaattttcaagtgatttaatttttatatgaaagaaaagtaaaatgggtttaaaaagaagaataaaatcataaacatgccataatttcattaataacattttttttccctaaaaaaaaagatagaaaagaaggttgccgacttcagttataaataaataataggccccgacagcttattcaatgagtcttattcctagtcattcaaggttggccgtaccttgtcgctgcaccccaaagtcggcatagtgctgaaagataaataatgtcgcctagtccccatatataatacatttatgataacaaaatatctattaaattcaaccatacataaaatctaccactcaatttccacatcaaattttaaaacttagaacttcaaattcaaagaattcaattgaggttggttttggaatttagtttgaactctgtttatttataatcaaaacttaagatagatttgagttcaagtttttgtttagtaatttgactaagaatttcaaaaagtgaacaatttttctttcaaaatttagcttagtcgacttggaaacaaattcttaaatatgaatacgacattacccaaaatgacttataccatattttgaaaaagagagaacatcttttaaaaagtaaattttaatttaattaaaaatttaaaaatatactcaaagttcaaactaaaactataatttgagtgggttggatcgaatagttaatgagtccaacttaaattaaaaaatataaagttcaacccaacctcatccctaggtactcgatgcaatcatagttcaactttattcttataaatttaagttaaagttggattagttgaattacacttgacttagttggattagtcaaattgattggattgcgtgacttaaatttattcatttgttattatcttgaaattctatctcacttattatttaaaaattatatatttatttcaaattttaaataataaatgagatagaattttaagataataacaaaaatagtaaaattaaattcatttaaaaattatatatttatttcaaaatttaaataataagtgagatagaattttaagataataacaaaaatagtaaaattaaattcatataaccccccgacttacctcaaacatgaattttaaaaatgattttttgttaaaacctcacatggatttggttagctaatccgtacatattgcatccatgattcaaatgacttagaatataaaaatactaatttaaatgatggagcatttaaaaaaaaaatcattaaatttgttgaaattaaattacaatattaagaggggaataacatgaatggaaaaggaggtcgttaaatggcctcattccataaggccaagaggatgaagcttgactggttttgcggggattgttaggaaattttccttctttataaaaaaacatataaattttagcacatataagaaatgataaattaaaattatagaaattaaagtaatggatataagaaaaattggcttagtttggtgaagcttgtaagaacatgctatcttactcccaatgtgtaagtaccgactattggatagtagttctaaaataaaactcaattggctcattgcaatatctcatttatgagcacgcccataaaaaaattataaagaacttgtctacaatcaagttgactagaaatatgaagattcaccatgaaaagagacacataaaactatgaggtaagaggaaaataaaggtaatatatagatattttaagataattttaaaaataaaagaaaaatcatttttattgaataagagatgacatttatggatataatagataaaaatattacaattcataagtccttaactactagaaatatttaaggttattgaattacatattaaggttaagatttcgtaacaaacaattgactttcaaaatcagatgaaatatattataattatcatattaaccttttcccaccctaccttttaaattgtgtaaataataataaatggtaagagaaaataattgaataactttatatatgtaatcaatatagacgtcttttggatttgaacttattcttagtgttgacaatttttatttgaggattcatagtgaattatgtcttgaattaagtctttgaaccgaacttttacatgtcacacacatagtattggtatgagacttggttcttgattctagataggctaatattattaataaccatgtgtcagtatcttgattctcatgagagttaatatagaataattcaatctcatagtcgcaatctcacggcaacactcacatggtgagtgttccaaagatacatgtgaagtgtacttcacaacactttctacctctacctcatttaagctaaaacccttcctaacattacattagtagcattgtcatcataaggatggggaagagactctctcctcaaaattggtattattctacctattgaatcttcttcatatgatctatttattattattattatataataataataataataataataataaatactcaacaggaaatatttctcaataatttttttcgttttcccttaatttatacaataaaaatttgattttcaatataaattaattcatttatccccttctcaaacaaaattatcaaatctttgtctttcaaataacctatcaaaatattatgactatatatacatagaaaattagatcctttgaaggctatttatattatacatataattttcatcacataaaactttgatattcttttatgcctttattatagatctgtctctcttttctttttctttttttggccacagattaaggagaaatttatgacctttataacataacaaaacaaatataattgtagcatcattcttttactttccaacaagtttagaataatcttagaaaaaataaatcaaagtagaattaatttccaaattttaggaaagttttcatttccttttgcacatatttttatgtaactagaaagccgtaaatagctcaagagaagtatcagaccatgatcttaattttcttctaataatatttgatttttgtaaatagcaataatacttatcaaatggaagaaaatatgatatttgacaagtaagaaaagaaaagaattgtaaaacttcaaattaatagataattaaatttattctttctattaaaataatttacaaaccaatatctatatagttttacctacatagaaatcaaatatattatatttttctcaattagaagaataataattttagattgctagaaaattttcctactttatatatatatatatatatatatatatatatatatatattctagcacatgtaacaaataataaatcaaaattatagaaaaataaaagtaaaggagataagaaaagttagtctagtttggtggggtatgtgaaaataccttatcctaggcctccctatgtgtgggtatgaccgatattagttgcaagagacaacttcaattggctcacaacaatatctcatttataggtacatccatagaaagattaagaaaaactcatcatcgatctaattacccaaaaaatataaagatttagaatgaaaacacatacaaacaaactatgagatatgatgaagagaaggatgatatgtagatattttagaacaatttcaaagaaaaggaaaatcatttttattgaatatatatatatatataagcttattaaggtacataaatcccaactattctctaatatttaagcttattgaatcacatattaagttaggattttataaggttgaaaatagttgacttctcaaactttatgaatatattataattatcatatttttaaataatcaaaatttaaacttttaagcatcaaatttccaaccattgaagtcatcaaccaccaaccaatggggtcttctagggttgagaatggtgattggtagacttcaactgatatggcattggggctgtcttgcaacataacctcccaaccataaatgggtggccccactaagattcacaaccttcccaaaaagaaaagaacaaatcacaattatgtgttgcctgtttcctgatttaaccttgtagaaagatggaaaaaaaataaaatcaatcaaataaaaaaaaaattatacgattttcttatttcttttcttttcttatatttcgatttccgctccatgcatgaaattcaaacttataaaaaaaaatgatattatatttacgcattaatacatatcaacttaattttatttagtctaaatgcttaaaagaaaactgatatttgaatttcctagggtttgtcttaaattttttatgagaggatggactggcttagggatggtcaaaagataaagggaaaataaaaaataaaaaatcaagacaaggaccataagtaataatcaaggttgtggtcaactccgggatagagaaaatttgaaaaactcaaaaccgaggtaggaacatatataatttaatatattatatataatttaatatttaaaaattgaaataaatatttatagcttatatataattttatatccaaaaattagaaaaactaaatctaaaattatatatataaaaaaaataactaatattccccacctaggattattaataggggatatggaatttattcatctaataaggattccacatcttctttctttctaatctaaaatcaggaataaaacaaaaataaagaataaatttacaggtacgagaatgaagagtcttcctcgatcccacactattatatttatattcctaaattgatcttgaatttcatacttagaggatacttgagtattgtaacattaatttagtcggctttttagagataaaaatgttaaggattattaaggtctaaataagtttcatcaaggtaatttatataattttatatcttttttttctaaaaataaattaatataagatatagattgaatcaattttatcaattaatttaataattttgtttagagggaaagataatttctctaatcccaatgaaaagtgtggagtagggaaaaataaaaaataaaaatgcaactttaaaaatttggaattgggtaccacatataaatgtaatatatttagttaatgacaccaaagattataggtatcggaggaatatcttgtaatattcatagggagaattatgttttgggggtagatgggtccccaaattaacaaaaggtccactaacttttcaaattgagcccaagacctaatgaaagtatggaaattgagttgaaggatatcatccttcagtatttccaaaaatgcccttagttgattttgagaaaaaaaattaatatttttgaaaaatacttttatttaatttaatatttaaaaaatatatttttatgtaatttaatattttttaaaatacttttatttaattttaatatttttttaaaataaatttatttaatttaatattttttaaaaataaaattatttaatttaatatttaaaaaatattatttaatttaatatttttttaaatactttaatttaatttaatatttttgaaaaaaaatatttaatttaatatttttgaaaaaaaattatttaatttaatatttttgaaaactacttttatttaatttcgtatttttgaaaaaaaaattatttaacttaattttataaaatattttatatgtgtttttaaagggtatatttgtccgttattatttcatatccttcaactcaatttgaaaagttatatgaaccttttgttaatttggggacccatctacccccaaaacataattctcccatattcatattatgatccaaataatattaagtataatcatattgagaaatttacttaattaatcaaccaacataaatacaactccatcttacaaggatgacatcacataacctaaataattcattttataaacatgttgaattgggtgaaccaaatcatgattattgttctcttaaatatttatgaagttgtgagggtaaaatgtttgaagacaaagacttcactcaataatttaacatttccatccaaaaaaattgtgaccccattcccgtatataggaccattaagagtaaatgcagccttgcaattggatatactcctatttgtcactttcctaccaaagtgacttttcgttttttgggataattatcgtgttacagttgattataataagtactatttgttaaaaataaggtgatgatcaccaccttaaattaagttcaaaaaattcatttgatactgttgcatttactttccttaaaaatgagtattaaatcgaattcatctataaagcgtctaaagggttttccatctcttacacaaatgacatcttgaataagaggttctctcaattctttcttatcaatatgaattgctttgaaggtaattttatgatcttaaactcgagattgttaatatggaataaattttttatatttatattaatgttgattttgttcatttaaattttgttatatatatagtcaagagttataagcaaattatttggctttgtcataatcataagttatgcacaaatctcatttcatattatcattgtcaaatgtgatatgcaaattcttatatagaaaaaagtaatgtaaaaatcattttatggttaaaagctatttagaaataattttatatctgattttagctaaaagttaaactaatgttattaatgtaaaacttatataaaatttattttatattgtagaatgcattagtattatttactaatttttgtttgttatatgaaacttattataataatatcatttttccatatatgaaaagttctttgacaatatcaaatgtcataaacctcaaatttgtaagacttgatatttcaagaaagaagtatatatcttaggtccttatattgaaatacatcttaatacgatgaatcttagagttataatcagggggggaaatcaagcttccttggagaatcacacaaaaacattgatttgcttttgtcatcatctttataaagaattttatcttatattgaaatatattttggatttggatcacttaatttaactcattaggtctaaattaattaattagctttattgggctccaattaataaagtggcccaatcaagaaaagtcattcataagttcttgtgtaacctgcatttttacaaaaacatccttatgcatacatattaattaataaagaacctataagtcccttaaaataatgtgttatcatggaatgtgagcttgaaaaaaaaccatctttataatattttgttttaaacataaatactttaatctatgatgtcttttgaaagaaatcacttttgatcattttagtaaatttgaaagtggtttttgaatttgtcattgaactcctactttctatgcctttttaagggactaaatacaaacatccaactagtcctagaaacatgataaatatttcttttggtaaaagcttgataaaaatattagaatattcaaaatattgtaacacctaaaaatggtgaagttttgtctcctcaatcattttgactatgattgtgttgtaaataataataataataataataaattgcatgcttggggaatattttttcctcctcatttttggtagtggaagattatttatgcccttaaagaactagcataaattgggtaaggattagaagtcaaaaccttttcataactttgtccaaagttttggaatgaattggaaaactttgtattagacgaaaattgtttttttatttttttattttagctaactagattgtcacatatatttttgaagtcttttaaatatttttgagatattccaaccctttttagtttttatttttttgaaaatcataaccatatattttttttaagatttatttatctcttaattgtaatagagagatgttgtcctttaagagaagttcatacatcatataatatttcaacaccgaagatcattctttaaatgtcttcttttttagtttcatgaagccatgaagtaagaaatctatctataattagtattacatgtaagacttttgcttctctcattttccttaatttcttcaatatgttttccttcactcacatgatgatgaagaaaactaatgccacaaactaaggggggtgatttggttttgccacaatagggaacttgtagtattttgcttaattgagatcaaactacaacatgaatgggaactttggatattaaggttgagtttttttttttcctttagaagaggaagacatggtttctaatgataggctgagctttttttgaggttcatctaacttcatttaagtgacttgtcatttgatttgatagtaaccaagaggttcaattttgagctcttcccctaactctgtcaagaatttgataatttgataatgaaagtataagttttatggcttattttctaaaatttatagaggagtgtatagtaaattatacaaagaaaaaaaatattgaatttcaattcaaaaaattatcagagtaaattcttcttcattatgcacttaattctatacacgtctttgaatatttccattttgaatatctctttgaatacattcacataatctcttgaattacatgtgcatctgtggtagtgaatttggaaaactagtaaggtagtctacgagcttaagaggatagattgcaaatcttggtggtcatagagaggctagcaagaaaaccgcagcaatgtggtctaccatctaaagagggcaggtcgtagcgcttaatgggcgtagagaagttagcgcgaaaaccgttgcaaattagcacttacatatatgaacaaaaaccccgtaggacaaatactgtaccgttaagagtaggaatatatcgtacaaacgcattcaaagatcagtacactaggaatatatggtccaaatgcattcgaacaccagcattgctctctctctctctctatctgtctatctccctcaacaaaaatcgcgtaagacaaatactggtacactaggaatatatggtacaaatgcattcaatcagtacactaggaatatatggtccaaatgcattgaaactgcattgaaacaccagcagtgttctttctatctgacaacaaaaatcccgtaggacaaatactagtacgctaggaatatatggtacaaatgcattcaaaaaccaatacttttttgttctcaggctatcaacaattcagattagagcactcttttacgtatggatcaataattcaaactggggccgggctgagaatccaaaaatttgcatgttagtttatgaatatatctaggtagttctagactcgagaggacagattcgctacatctttccttggcttggatccgtatggaaatacgtaccacaaccttttcttctttattttttgtgcattgtggcaacatttcatgtatgtcccctgactaaactttgtcttaaagcaaactcatcaaccatgcacatgcagtggtgaaggggcgaaacgttattattatttctaaaataaaattttttaagtgttaaaaatattacaaacacttcttaaaattattataaaatcgactcataattcgatgcatatatactattttactaaaaggactccaaatttcagatacattccaccgagttggttaaaagattgtgatgaaccaagttttaggtacctttctggcgttgtagttcataaaaacgcatccttcttgttcctcaaaatttaccatcatacatggtgtttttaggacaaactaagtttcatggtttttctgctagtaagtaccatatgactagattctgctttctagttacaggttgaaataataaattcatataatggcattattcaatgtctaatgtatattgcacattttatcctacaacttggtgatagatgattttgctccattttgaatataaagaatacttgggaatcaatggtaattagcacaaagacactggaaactcacgtttggatcattttcatgttctataagtttccatctaattcttctagcctgtgtaagcatgggtaaaattgtagaaccatctgggaactgtgtagatgaagtggaaagtggaacagcattccagaagttctttgctgttgatgaacttgatcttccacttgttgacctaaatctcttgaatcttggcccattggaaagtgaaagagtgtcaaagacaaatatgtgatgctgcatccaactggggcttcttgcagttggtcaatc

SEQ ID NO: 13582 - DNA, 12743 bp, Vitis vinifera
  Intron number 2 from transcript GSVIVT01036551001 (locus G SVIVG01036551001) derived from phytozome v7.0 (chr-ID chr1 4; pos 23366415 to 23379157 reverse strand)
agttctgcagcagctcaaggtcctctctttgattcctcttttcctatatctacgcatattcacaaacgcatgtcttcatattggatctgtttgatttcttgattttatttggttgatttttgttgattttcgattttatgtgttcttgcttcggcaaagaaatcgtcttcagctctctatcatctacctcgaactcgtgtttctttctcttttttctattttcggaatgagaattttttgacgttgatgaggttggggtttttatgagctccaaagctgcgttctttgcttattttgatgatgatggttggattgattttagttcagtctgttttgatttttcgtatttgtggtcaagtttatttggtctgatcttgagtttttgtttcttgcactgagagatctgaaacatatatgcagccttttcttctgtttttttccctgattcgattgtgtacgtttgcatctatcgatgtccttgtgtgtttttcttcacattgctttactaatgaaatcttcactattttaggtctttctttttacagaactaagttcagatattaagcagcctgcatgaagtttagcagatcatcgtcttgaacaacttctttcttttccctttctttcggttaacatgttggaaactccctatttcagggtctttttgagagaaaaattcttcttttattcttatccaaacactgaaattgttgtagagcctcatgtttcaccatatgctttattcattttttttgtttattcattctggctttaattgggatcatcggtatgaaatttgactagaaagatttgtcttattaagtcttttataggtggtaaggacacatcttttcccaggcaagtccagtttttaatttgcttgatgcatgtttgatttcagaaaactaatagaaaaaaaaaatacttatttttaatatttggatgataaggaaaataaaaatactaacaaaatattaaagtattttattttgtatttttcaaaaaaaaaaaggaaggaaattttgtgatgaaaatggaggaaaagtagagggaaaagttttacatgctcctttttattaccatttctcttcaccattgctgattcctctgatcactactattcattttcttcaacttcttctgcccatggtttctcatcactactaataatttttgtctccttatcttcttctcctaacatttttccaaaaggggtgagtctttttccattactgaattcatttgtaggaatttatcattcattgtttgacaaaagttacgtttcttttcataaattaccaataggtttctcatcataaatgagctccttaactaggttacaattatatcgatgcaagagatggaatgtcaatttatcaaatttgctctccaagaacaatcagcaaacagctaataaatatatactgttctttccaactgggacaaaataattcatttatgcaatctagtgtggtttagagttattttgtgaaccaactgtgtaaaaaagagttctttctagtacaaaatgttgggttgtttataaggatctatgcagatgctgatgacagaactttggcaattggagttaataaaaatcgtgaagaataaatgaaagatctgcattagcttaaggcggagtggattttgagtttatcgggtgaaagaatgcaggagttgggcaccttcctttggtaggatcctagggaccatttttcttcttcaattttttttctttttggataaagttttaagggtttgatctaattggtgtatcaacactaagccaattcagtacacataattaagtaaagaaattttaacatatatgagaagaatagaacaagtatctaacattgaaaaatgttatatgtagccttctagttcagaatttcttgattgttttctatcagacatgtttcaggagaagagtggtgatgtatattttctcttttatatgcattttctagttatgaataattgtctaatgtctgttaaccccccattaataatgtaacagttattaacaaatccctggtgaatcagaaagcaacccaatcatttcacagaacatgtcaagtacttatcatggtcactactgttttctgaagaaaaagaatgaaatccatgtctaactattttgtactcacttctgtctttgtgaagaagtggcctgaattattttctctagtttattgctagtaatttatacatgatttccatggacatgcacaagtttatatacatgtactgtactgccaacttggttgaatggagtggaaggttgagacatgagagagcaagatatctattaatcatgtgaatagactcacagtgccgtggtaataaaatatcttgttcgttgattcggatgcaaagtctaggagcatgctcacgtgaattgacttcaaactagagtgtcttagaatttcatgattaaagctttccgtatttgttattggataacttcaacaaagagcctccctcattgagacgtatgacaatcctcaatttaatatattatagtgtttgatatctaaaatgaaaattacttttccaaaaattttgctctgacattcacttttattattttcattcatcagagtgcatgaaaaacattattttaaaatttctagaaatatcctctcaagatgttttttggaagcactccttgaaaacattattttaattcctactagatgtctttgaccaacacgaggcctggttggtgcaactgcaatttctagtagtccttttgagaaatatccattgctagggaaatttattttaaagacatcatttttttttttttgtgtgtatgattattattacatttttagaagggctttgaatattaataatttgagacaaaaaatatatgaataatatttttttgtttcattttataacgtttataaggttataaaagtctattggaaatcaaattaggagaactaattttctttctgattggttatgttaaattctcatgtttgtgtgtgatgactttatctttatgtaattacactaacccataaaatattataccttgaagtcctcacagctgagatttaatgtgccttttgatatgtctcctcctagtaatgtattggtcccattttctctcgaaatttcaccaatatcaggcactccaaatactaagaattgcaaaggttttttcaaaataagtccaggatctaatctaacagcaccattgggatggatgccaatttccgttgacatttcatctttagcattatacatcgaagtaatgtactacaatttgacgttgttattttatcatttatattaaaaaaattaaaataattttgatgttgttattttatcactgttgtaagagatgctctaagggtcaaaagaccatggtgtacctcataattcattaaatccaactctgacaggatcatgtatttcatcacagagtttatttacaaggggacgaggggctggcatcgtacgatgttaattctcttatttcatcataacatcctaccttgatatttatggtatctatgttaggttttgcttgtaaatccttcgagctcccgctagatgagaccttccaatgtctattaatttttccccacttgtaaaacagcatgaataggagccttgttccatcatgtctctcctactcttcgttacatctttacctctcacatttagtactcttcatcaaattcatcttaattcttataatttttttgaaaactttccttataaagtaaaaaaataatttttttacaagaaaatattaatatattaaatattatgcataatattttttttgtcaaaggaaacactaatatatataaatattatttataatattctttttaaaaaatatacttgaaatataaatttaagaaactttccaataaatataccaagtataacatgaagtatataaattagttgtctcacaaatgagaccaaaccaaaaaaagggtggactttctaccttgatgcatgaggttttatttcctaattatcaaataaatcattattacaatcccacaatcaatctcaattttagtccatttaaaaacaagttctgatatacataatgaatccaaatcttgcaagtttaaacttttaagaaagttggtagttcaacctgatagtaaattttgatttgagtgaaggctatgtgtttgagtcacctctctacaatttgcatgtttgtaaatccaaaaatggttatttgcatttgtttatctctctctcctctatctttctatgtatctccatgtgtggatattctcttctatctttctatgtctctccatatgcggatatgaggtggaatgtgaggggtgttaagaggcttttaggtaagtaaagttggtagttcaacaaaactaagttcaagagatttccaatccatagcactcaacaacatattttgatacaaaaatgaaagatgtactcttttactagatattattagtacaatatagaatgttaactcattgcttaacaatctagtcattttgggtaaattatttaattaatatagtataagagttctgattaactagaattgcctctttacatatgggtatgaccatacgaggccacacatatcaatgagtgtttacctagtatatattattgatcatatgaggccacacatatcagggagtgtttacctagtatatactatttgcctagatactattcccctattatttgtcaccttaacctttggagtaaaattggtaggttaacaacatagcaatcaagaacatgtttcgatacaacaatgaaagatgtattgttccactagatagtattagtctagtatagaatgttaacccatttcttaatagtctagtcattttgggtcaaattatttagttaacatggtatgagagttttgcttaactagaattgcctctccacagatgggtatgaccatacgaggccatgtatattagttagtgtttacctagtatatattattgaccatacgaggccacctatatcaaggagtgtttacctagtatatactatttgcctagatactattcccctaatatctgctagccttaacctctagagtaaaattggtaggttaacatattacatttttttaacttcttgttcaactacaacacttcatagacatttccttgagcaagcttacattcatttccttaacatactaattcatgcctttgatttaataaatattttgttcatttgtagaggattgtatcctaaatcatgtagtaaaacatgtgtcatatatctaacaactattctttgtaagtgagaattcatttttaagaagatttgttgtggagcatcaccttttgtattcacaattttcaagtctttacatagttttcatagttataaatcttatcatatcaactattcttggcaactattttttttttctaggaaccttaatttctgtcataacctcattcgtatggagattgtggatcttaaaagacttatattctctctcactcatgtgctatacttatcttcaagcaagagcttgttcattatcctcttgaggtttattcttagtaaaatcatttttcatgggttttttttttccaatgtatcagatctaatttctttctccctaaccaaatttttatagaaatctaaagtgtcataaaaagtcaaggccttcatttgactagtgacacattaaaaggtaaataccaatgatatggtataagttgagaagacttttcaaatcccttagtcttgattattgcattttatatatagggagtgaagagataattgaccacctctttctacattatcttttaactttaaggctatgtatagtttatttaaacaagctaatgtggattaggttccatctaggagtctatgtgacatgataattacttcatataagagtttgagaagctccattagagataatatcttttggcaaattatttgtttgatattgctttggattgtgtactagagagaaatgatagaatctttaagaataattagaggatgttaaagattttgtgagatcaatttaccttctatccctctttctaggccttttgtaccaacacttttaagacattcctcttaatattgttcaacttaattggcatttggacaatattgagaggaggttagtttgtttttgaagagaagacatttatgtatattcttatatgaccaaaacttttttgtacaagtctccttgtataatggagtttagtcatatgttgatcttgtttttgaaattgtggagaggactcctcatccttttcatgtacttgttatctataattaatacattttttgtttatgataaaaacatatctatcaatgaagggtaaaactcatagtaacacttgaaactgcactttaaagttaatgttgtgttaaaaaaaagctttgatatcacttgtacaaatagaagcttcaatcctatcatattaatgtcataaaataaagataaaacaatcttcacataaaggtacttaggttttaatgtggtttgaccaaccatacttatatccatgattgagaaaaaaaaatatttcattatacaatggagaatattatagaggaccagaaaatgcaaatataatcatagcgtttaaaatatctcatatttctccacttctggtattttcaccttaaactgttagtaaatgtctcctactattcctcatatctctatctactcaatataaacttcatacttacaactttttctcctagaatatttatagagatatttcaaataccattctttattttatatggaaatataatattataatgacacatcaatataataaataatctatataatattctttacaaaaaagaaatatatatcgactaggaatttgaaatatttttcaacaatctcatcttggatcaaatttcatcaagtcaatattctatcgcttatatgttactatcaaagaaatcatgacatttactctatttggaactttctagccaaatccttacacaatagcttctttatgtgtcatagttgcattgtagtagatctccatgtattcaaactatttattcacttgactgtttcctcttttcaagatgcaataaacatataaaacaaacatacttatttcaaataataaagtacaatacatctccaaatgaaggaagatcaccttgattcgaagcactttggttagcttgcccatttatttcatgtttgtgttttctttacctaggacaatcaaattgaggttaaagtagattcagagggatttttaatggggaggtgggactcttgagcagaaacttcatcttgttaggtggatgttgctttgcttagacaaaaacaaagaggggttggggataaagtatctctttactctaaataagacgcttttgtgcaaatggagttggagatttgcaaatgagagaggagtcttttggaattaagtgataaagggaaagtatggggatgagcaaaggggttagtgtcccaaagaagtgagatatgggtatggtgtggggttgtggaaagcaattaggaagtagtggcatgttgtaagtggtagattttcttttgtggtgggtaatggtcaaagggtgaaattttggaaggatagatggtgtggggttgcacattttccaaggatgcttggtgaaatatgtgtggagttccactggttccactaagggaaatgagagttggagcctacaattatctagatctttcaatgattgggaggtggatgaggtgcataggtttttattgagcctcaatggaaagagtgttcaacggaatgtggaagatagggtgctttggataaagatcaaatgtgggaagttttccgttaagtctctctataaagccttagttttaggtcctccagtctcttttccatcgaatgttatttggaaagcttgtgtgcccaaagtgagtttttttaggtgggaagcaatgtggggaaaaactcttactttggaccaactttagaaaagaggatgacttttaacgaatagatgctacctctgctaaatgcatgaagaatcgatagatcacatcctcctccattgtactaagataaggactttatgggtgttgtttttctctctctttggggtacaatgggtgatgctagccacagttaaggtgacgtttttgggctgggacaggtcctttgtgggaaaaaaaaaaaaaaaagtttggagagtagacccttatgtattttttggacgatttgaaaggcaagtaacaaaattgtatttaaagatgatgtgttgtccatccaaagacttgagagttcttttattttctttcactggttggagatgaaattgtttataaaatatggtccttcgactttagttggtttctttgattgggtgggttctcgttaagggtgaggttttttttactcctttgtgtttgacaactatttgttctagttggggaagggagaggtgtttctactttatatactttgagttattgttttggcggctcttttcaatgtaattttatctcttttatttataaaaaataaaataaaataataaagtacatgcttcatttatcacattccaatgagggaaaattgactcaatcttaaaccaaatttccttttgtaattcttttatatgttttgttcttttttattcttctagaaatctcaactaatgctctaatgtcatttattgtgctaatgaaagctttgatacaacttgttgtgcaaatagaagttttaatgttaattaatatactaatgcaaaaatacaaggatgaaacaatccacatataaaggtatataaaaaaaaattataggattaaaaaaaatgacaatgcaatcattaagccttgaaacatctcatgtttcccgttctttgtagctacaccttgagcttttgctctaccaattatctattactcttcctcacatccttatttgttatgaactttacatctccatctcaatccatacacaaaaggttacatataccaattagtgatttgagatactttccaataccctacaacttaagctaatcaaattctacaatgaccaattgacaagttttaattttcaaacattaggttgggttcaagttgaaaagtctcattccacttcaattccattgaatcttttccaaccttaaactaaccttcctccatatgaaaaagagagacataaagtaaattggcaagctagaaaggatgctttttaagagtcaaccttccttcttttgatagatatttgtttttttttttttttcatatagcaagtcatttctaaaatctctcttttactacatcccaaactcgagttcaattgaaagcagcttccaacataagtctcaaatatctgatggggagagttttgaggttatagcctaaaaccataaacaaatcttccaagttgacaaccctctcaacaagaatcaacttagttttctttgaattgacctttaggcccaagatagccttaaaccgcatgaatgcttgacttaagtattctatttattcctttgtgctatcacaaataataagagtatcatcaataaacaagagataagacacctttattctttctccttttctttcaccaactaacaaatttgtgatgaaacctgcttctttttgccttttagatagcaaagtgtgcttccatggttgagatgttgatatacagggataaaggattaccctttctcaagcctctactattttgaaagaagcttgttagggttccattaactaaaataaagaattgagttgtaaagatacaccactatgtccaacttatcggctcatgaccaagacccacattttccgaaattgctaataaaaatcctagttgacaaaatcaaaacccttctcaatatctagctttcatatgaaccaaccatcgatgcttttcatcctagagtgaatggcttcatttgttataagaactatatccaaaatttgttaatctaacattaacgcatgttggaaagcagataccacttttttgagtttgtttgctgggacttttatagaagcttgtatcactcaccaaatttattttcccccttttaagtctttactacccctttttttaggactaacactataaaaatatcagcgaacctaaaattaattagaaattataaaaatataagaaaaaaccctctaaacttctctcataagagcccaaactcatagagctccctaaaaaagcccatcactttactattgatgaagtcctaattgaattgccaagagaccagagataagtcatccatcttaaggttttattcacatacaaactagagtgttaaaaggatctcttcctcagaaaatggggtcttcaaatgtcctaagtcatcatacccaattttcaaaaaccatttcattgatgttggtctccaatcactttttgactcagaaaaaaggttatgaaaagcattcaccacccctttctttatgtttacatccttagacaacaatacaccatttaccttgattttaatcaaatgattccttcttctatgagcaatgactattttatggaagaactttgtgtttttatttccttctttaggtcataattctcttgatttttatctccataggactttttccattgctacccaattgcaatactcctccattaccttccttttgatctcattctccttgtctaaatgaatagttaccctttcctttattccctaaaaaccaatctgattcaaaactacaattttattagtagtgacattcccaaatacctctctattctaagctttaagatcacgcttcaaagctttcagcttagttgctaagatgtaacttatatgaactactaaatttctaatttggtctttgaacccttattttttcagtcacatagttttgaacctaaaagacattttacttttcctcaacccaaacccatctaataaaatgagagtgtgataataaaccagtcttggaaaaatactctatgttagatcactgaaattattctcattctttagacagtaagaagtgatctagtctaataattgttttaaatatataagataaggtatcatatactgatatgcaattgtcacccaagttattcttacctcaggtaacttatttatcaatttcaagtaatttagttattttcggtttttttttttttttcaaaattatacagtaaagaagtcctaagaattaagagatgaaaagaaccacataactgcttaaaagtgttgatgcgggattgtggaaggccgtcaagagagattgggggaattttgatagcataaactcatttattgtgagcaatggtagaaaggtgaagttttagaaagataaatggtatgctgattctactctaagagagtcactctactttgttttcaatagcgttgacaaaagatacttgggtggaggatgtttggtgttgatagggtgatggaggactttgcgaccttcgcttttcaagaaatctaaatgattggatgaatgcgaggaagggtaaattttctgttagatccttttatatttttgtggggagggcagaagtgttcctaaggagggttatttggaatttgatggtgccgaccaaagtagggttttcttttacatagaaagcttctaggagaaaggtttagacttttgatcggttgcaaaggagaggatagtatttggtgaaccaatgttttctttataagaaggatgaatactcagatcatatccttttgcattgcaccaaagttagggtggtatggaatttggtattttccttgtttaaggttgcgtggtaatgacaactttggtaagagaaacagttttagggtgcatagttcttttgtggaaaaaaaatggaaggtctgaatgcctaccccattgtgggttttttgaattttatggtaggagagaaaccaacgatcatttggaaacaaaaaaaaaagtgtgattaaacactaaacttctcatttatttattatttttaaccttttttttatgagtcaggttgtacacaggtgaaggtacctaaaccatgttagttttttttgacgtgtttttgtttttgttgccctttctgttgtatttcattttttcttttgtagaaagaggtaattattccttacctgtgtacacaggaatgtagaaactaatagtacatctccttaagcttttcttagccgatctctaaaacaaaaaccagccttatcttgttgcagtcctaaaatttgcgtatttaaccatttggtctatgattctgtcagtttggcagcttaatgacagtcgacaaatgtatgatgttgtgtccctttggaggccaatatgcctacaattgaaacattttcctttgtgattaatcagctcgttagctgtactttctgacttcacattacgttctctgggcttggaccacagaatgggctgcccttgcactcaaggacagtgttctatgacaaacttgcaattatctgccagacatgaagttcagtccttgtacacaccaatgtggactgacagtgttttattgatttctacttggtttgtaagataatccaagacgttgtgttgcttatttgagctggtgaaattttgtgacttaagtgagcttaggagattggattatagtatgctgtttatttataagatgaccaggtttcaatttttttagtacaagtttcattattttatgttcatgttcggttctataatgggatctcttttttttcctttgccttcatcttatgttagc

SEQ ID NO: 13583 - DNA, 18234 bp, Vitis vinifera
  Intron number 2 from transcript GSVIVT01023741001 (locus G SVIVG01023741001) derived from phytozome v7.0 (chr-ID chr1 1; pos 10424383 to 10442616)
tcctgctgctaaggctatcgaatctcctcagacaggtgcttactttcactccaaacttatactgtgagaattgaaacatagcaattatagccttataggaaggcataaagaagtggttccagagtgtttggctactctgtgatacccaatattcttgtgatgtaaattgtaaatttattctattcatcttgtcctgatcacctttggatttgaacttgtttcattctgttttaactatacagaatcatttttttattttttttattttttatttttttatcatgtttagatttcctttcaagttgaatttatttcattctactactgattgaactctgtatctcccttggaaataaaattgtttatcttcacaatatttgaatgtgcaagtccatccttgagaatgaagtgtttacaaggagtgatagacatgcagtcagatgcactttctttattttttataagagtaaatattcttataagcatgaatttctaatataaggtgatacacttgctacactactatctgaggtctgctacagtaatacccttttgctatttgctctaatttatggcctatgtgtggttaagttcataagtctctctctgtttttgccacagcttaatccatgttcttctccttgtccttgttttgtgttgaatcagaatcattattgcttaccagaggtgaatggaaagtttcagggacttttggaaacgtgagggggctgttgattggttggttctctgtaggaattgttgttttttctggtaatggaagatctaagtaagtttatctccaagcattcgaggaaatagtgttggagggcttttagggtgagggctggaggatctcctcttgaagaagttcctaacatttaatgtgcagatatgcttatcttttttgggcgatgggcagttaagattctttgaattatttctatttgctttaaggcagcttctggtttttaaggatgagcatggggaaaagttacaaggtgttagtttgggattcagacaatgctagtctcttggtgaggcatataagttatggtgtaggagatcttccaaatattcctcttgagcttgctaacagttatacttttgattctagaccattgttggcagttttgggatactgtgattgaattctgagaaaaaagtttttagatggatggaaaaatcttctcttttaaagggggagactcagctcactaaaagtaatctttttgcctttctccattattgttgtttctttgtttgccattctagggttcgggacctgagggtggaggcatatctttcctcttttaactcacaactgtgcactaggattgtaagaagcatattaaaaaccaatgggctacaaggccgatggggtgaattgggaaggaaagatggaattcaagctaccaattcatatgggtagactgaaatataaatgactaacccaccattagcttgccaaagttgagcagtggaaatttttttaatttaggagcagtattggaatccaaaataacaagttgctagtccaactaaacatccatagagttaacatctcaaatctagaagtgttggaagatgtctctatgaagaactatgaattgtatttctctgcttcaaactgtgcaaaattgattcctatttgtacaagaatagctactgaaaaataaggaaagttgactaactaataatccctacaaaccagggatttaaaacagccaatatgactaatagtcctccagctgtccatgtgttgagacataaggtctataaatcaaattgctctttgatttttctttgatgaaatgtcatccacttcaacatgtttggtgcaattgtgttagaccagatcgtaagcaatgttgatggcaaattttttgtcacagtatggtttcataggaccacaccacttgatttttaggtcatcaaggatgattttcagccatagaagctcacaaatgccatgatccatggctcaaaatttagcttccacacttgatctagtcacaactatttgttttttgcttctcgatgtcaccaagtttcctcctagtaaaatgcaatacgctgaggtggactttatatttataatcgaacatgtccagtcagtgtttgtgtatacttccatccacaatagttcattattttttaacactataactttcctcggagtatacttcagatagcagaagaccctagatgttgcctccatatgtactgcttttggattgtgcataaattgattgattatgctcatgacataagctatgtttggccatgcatgtgagataaatagatcagtttgccaaccaacctttgatacacacctctatctactatagcatcatcattagcctcccttagcttgtggtttggctcaattgggtgtcaattggcttgcatcctagcatcttacttttgttgtgacacaaaaatttctctaattgaacttgtcactttaataccaaaaatgtatttgagctttctaaactctgttatctcaaacttgtgttaatttctttcaaagtgcctctttttccattggattattacctgtcactattatatcatcaatgtacactattaacactgtaatcctcctttggctgattgttctatgaacaacatgtgatctccttggctttgcttctatctcatttctttcgtcactttattaaatcatctaaaccatgctttaggagattgttgtagtccatacaataatttcttttaatctgaaaaaccttgttcccataaaaaaaaacttgtcaaaatcacctcttgtctccatatgcacttcttcttttagcttgccatgcaagaaagcattcttgacatctgttgcaaacaccaatcaagattagttgttaaagatgagaaaactcaagcagtatttattttagccatgagtgccaaagtcttttggtagtcgaccccataagttttgagtgtagcctttggctactaacctagccttatatctttctagggatccatcaaccttatgtttcacaataaacactggtagattgctttccttttggaagacccactatttcccatgtttgatttttattcaatgcattcatttcctcctccatagcatgattccaattcttgtcttttagtgcctcatgtaatgctggaggaatttgaacagattttattttaatagatgttccaattccaaaaatttggaaaaaaatccacctcagatttgtgttttaaaagaaaaagctaggttatcctagtgcaatcattaacaaaagacacaaatcatcttgcacctgaaaaatattgggaattttttatggtcccctaatatctgaaggaattaaagtaagtggagaaaaagaccttgtaccggttaatggaagtgaaacacagtggtgtttggaaaactcacaaacatcacaatgaaatgagtcaacatcaacaattgtaaacaatgaaggggacacatcttattgttcactaaatgttggatgtccaaggcagaaatgaagaagctaaatctcatttttattggaataaattttcttggatgggtaaggaaaacaaggttgataatcgttgccattcttggtctcaagaagatagagtttgtcctttgcttttagaatgtccaatcttcctccccataatccaattgaaagacaatgagtaggataggatgttacacaacaatttaactttttggcaatttgatgtttggccagcaattttacagatagtttagaacatgtaacaagtattttaatgatatagaggaggtgagaaacacttccccttgaccagctactgtttctgaagatccaattacaacttttatctttctatttctaggacatgggttataagtaacaaataattgagagaagtttgtcatgtggttggttgcttctgagtccatggcccaaaaactaccaaaaaacaatttttgaggtgctaaaggtgcaagagttgggaaacctacctgtttgagccaatgaacatttattgagtattgaggagatttttttgcctttctatctcttctctattgatttctcctctgtccaaacaattagaacttgaattttatccacattgaggagattctccacattagttaagtggacttagcccctgttgtctgcctctaaagcatttgtacacactactacttgttgtttcccaggaagtttccagcaagattccctagcatggcaaggtttcttgcagtaggtgcaccatacacgctcttggttgtttgccttgaaggattctgcagcagtgtacttcactggagcttcggcaacattcttactggttccatcacttaatcgagatgaaatcatggttgatccttcaatggactgagcatcacactttgtcagctttcttcagcttgaataatcaaagaaaataccatttaatgaaggaagagtttccttcccaaaaatttgcacccagacttgatcaaattcaacaataaagcttgtgagaaatccaaagattctctccctcttgacaatcctttgtagcatcactgcattgttgctacacttcattctaaagttctgataatagtctaatttgacccaaacacctttcatcatattaaagtactcgataatggataagttaccttgtttgatgcctaagattttggtcttgatcttagatttggactacatcatatactttctaataggttcatccaatggtttcccaaatttccttcgtagttgataataacttacactttccattattttcggcaatatggaattccacaaccatgacatgaccatggaatcttcttcatctcactcaataaatgtgggaatagatggtctagtacctatcaaatgagtcagcttgccttttcccttggaaaacatctttaccacttgttaccattagaaatagttattgccattcagttggtatgagagatggagatttggaagttcctcttttattgagttttgttgagttcctatgaactgattctcaactattgtaatgatgggattaattttggatgcttctaacagggctggaagtaaagcaggattgtggtttttctgcctacaaaggttgtaggttttcgagagtgtaggtttcagaaatgcttggatactatgtggagaactatgaattgtatttctctgcttcaaactgtacagaatttgatcgctatttatacaaaaataactatagaaagaaaaataaggaaggttgactaactaatgatccctacaaatcaggtaattaatccctacaagttagggatttaaatggaaaaatataactacctaatttacagtttagaattatacaatctttcccaattaatcttgatatcacacagatttcaacagtctcaagttccttattaagttaacttttgcttttaggagagtcccttttagaaaagaatattgtttaggagatctccaattctggtatttattttgggaaataggtttttagttgataaggaaaaatttgggaatatctctataaatattactggtataagaaaagaaaaaattttaaaaaaaatgaagttgtacttgtagaagctatctcatgtatatagagatatgttaaattgatgggtgaagaatatatgactttttggggcttgagtttaagatgatgtaaatatttagagatagttggctgaactacgtcaagacctggtgtctttgttcatgaattgatttgtcttttctattattgctcaaaatatagattcaattttccactagctcaaacaattagtcaaagacccttattccttcaagtcagacctcagaaatgatagatataaaatagtagtgttaactgtaccttggttcaaactaggagtaaattcgaacacatgtcatcatattcacacctcatccaccttatggtcacttgaaagggtggaaaatggggtgagcttacaacttagtaaggaatgatattatatcaagttaggtcaagtgactttttcagagcaaaatatcaaagtgaagaacattgtgtttcaaataatgtcaaccagatacatctgttcaaagaaaattccatcaatttttcaaatataatcattcctagctttgttagaggatttagacatcctattttctcaaactatggtttttctcaaattctttggttccctcataaacaaccatcctaatatgggtctaaaaagaatgcatcatcagtgggggactgaaggctaaaaacattgccctccaaagccaaggccaaacaaggtgggcaacctcatggttgttcctattagtgatgagcaaacaggagtgacagtcctgaaggcctcttatctcctagttgctgaggtccagtgcattgtggtcatctccgagggatatctcatttgatgctaactagtgtcaaacaaataacatgagtcttatataaaacatagcatgtccttagaatcaaatcatatggttgcaattaaaaatgtaattttatattcccagtctagagttcaaacaacaaatggcctaagtctaatttacatacttccaaaataagttaatgaatctacattatttgagaccaaaaaatgttcattgttaattaaacagatgaaaatatcaatacaagttacatggttttcagaacatatgtataatgttccttggcatactacagttgtggatctttgttacttgatggtgaacctatccaaactgctcccttgatcatgttatttgtgccctagcatgaaacaataaattagacatcaatttgttatcatacattttctgatcctaggcctcagttggaatcagtaaaagctcctaagttatattccatattctgttttctaggttttgacattaattccacacatttcataattttccaagtcttctaatgcttgatcaattgatttgtaaatctcccagctcctttgtttgatattggctccaagctgcctatttcctttcataacagtttctagaattgtccaacttattctattggcattatcaagattcaatgattcatatatgaaaatgaagggggatgggtatagattgtgaaataaaatgcaactttagagatgcagatgtgaagatttgcaaaagaaagagaaaaaagcttgctttggtttagattcccttgttaggtgtaggttgtgggttttgaatatgtcatttcaaattataaacatttttcacattcatctattagtatgatttatttgatttcacaattcaaccacaaggcgaaaaaaataaaagggagcaagatgcaaaatcacatggaaaccttccttcaaagttctttctacctattcatagggaaaaatcactaacctaggttccactaaaatcaaataaaaacttttattgaattaagtgatcttggtctagtcataggacttgagttcaccttttgaaactcttcaaggcttaacaggtcaatgatgtttgttaacctcttctcaaggatgcatatgaactcagtttgtcatttcatactccacccaagcctagccttattagcctccttagaacttcaccaaggatttcattttcaccctaaagagctgatcatgaactgcatataatgagatgagagtacggtaatatattttcaaaatcccaataaatctacattcaaccttagatgatgataaccttaaggaccaagaacaatgagatctccttgaaaattagctctatttgtctttctaaaagaaaaaagaaaaaaaaaaagaaagaaagaaagatcctgttgacatattctaaataattttgtatttatttctttccttttctttcttggtaaaatatgatttatgagagatactataggataataggaggtaggtaaataggatccttgatttataggagagattttaagggaatctaatccccaattgtgtataaataggaagtagatattgtattctaaaaaaattcaaggagagcagaatttatttcatggtattagagctagggctctcttttgcatcctaagtttttttttgtttttttgttttttttttcttttcttagcctttaattgtggagaattttgccgcacttgtagaccttctttgctagcagcaaaactcattgatgcctatctccttcctttgaattttttggtctacatagccttataaaatttccccctcctagatttacaaaaattattcctgatttgctctaatatgtttgacgtatcaaaaatcatcctatcttcaaactttgctcctaacttgactagcaataacccttctgtagaatatcaaaatctacaaaatccattaaaacttagtgaccataattatttggtgtggtctctactggtgtgaatgtttttggagggaaaaagaaaactaagtcatttaattggacatgtcccaagtgaaaatccaaagttcattgtatgagatgaagaggacacaatgtttttcatggttatggaattcaatgcaaccaaagatcaacgagacatgcatgttcttgatgatagctaaagatatttgggagattattaggcaaatatacttcaaagtaagggatgctacccatatctacgaaataaagaccaagattagtgttaccaagcaaggtactttttctgttactgaataatataatatcatgaaaagcttatggctagaattagattactatcagaatattaagatgaagtgtagagaagatgttgccatgattctcaaatatgttgaaagggaaaggatatttgattttttagtgagtcttaatttggaatatgatcaagttaagattcaggtccttgaaaggaagatgtacctccttaaatgaagtcttcttcattataagagcagaagaaggaaggagtgttatgcttgacactccaataacagaaggttcagctcttgtcaccatgaagccaaactccacattgccaaacaacaattatggaataagtgaagtgtctagattgccaatcaacaaaaatggtttgtggtgtgtctattgcaaaaaaccgaggcatacatgttggaaattctatggaaagccacaatcatttggtagagggaatggaaatcgatatgcacaatttggacaatggaatggtcaagcccatattgctcaatctaaaagagaattcccaaccaaaaatctcagcttctaatgattcaaatgttagtatattaaacagagaagagattgagaggctctgtagccttctgacttcaatggataagcctactacttcatggtctctctcctaatcaagtaccccatttcttatgtttttggtgtttaaaaggactgtttttccaattaagaggcttcgtagtcttcgtagtcttttgacttcaatggataagtttactgctttatgctctcttgcttaatcaagtaagcatctaatttctcatgttcttggtattgggaacctcgaattactccaatcccatgccctggatctcattgggtgcatgtatctatccttagggatttctaaatttatcatagtggaataaaatgacaaaaaaccattattaactatagatcgagagataacactcatacttggatttggatgttcccaaatcaaaattcatccaatgaagaacttgcttgaatactttataagcatctaatttctcatgttcttggtattgggaacctcgacttactccaatcccatgccctggatctcattgggtgcatgtatctatccttagggatttctaaatctatcatagtggaataaaatgacaaaaaaccattattaactatagatcgagagataacactcatacttggatttggatgttcccaaatcaaaattcatccaatgaagaacttgcttgaatactttagaagtctcatacacccaaagttttttgctctatgactcgaaccatgtccatagcactttgaagagtgaactttggaagggtggatgcttagactctctctctttggatctaggagacaacagtcgaaaggccattaggaaaccctaatccataaaagagtatttataagattcctctattgggcttaagtgacttaagtccacatggacttagatcacttaatctagtccaaaagggttcttaattaattaattaactacacagggttatctaattaatcaattaccacaatttagagaccttattcactatcccctatctaaccttgcataattaccaaaatgctcttatgcacaagagtaaaccacaagcgaaaccaacccttataaaccatgtcaatatagttatgagctcagagcgaggccactaggacccataggagtattggttctcttagaattcaattttgaagttgattcaacatctcactatagagaatatactatactttaataccttatgtaaataacaacaagacaaggctcagattcgtgacctactattcaccacatacaaaaccctcgtgagttggtgttcctaatctaacaaggtattgtcatcacctatcaagattacttctccaattattgagttatgaatctcacttattactacgacaagaagcatatgtcaaattccactaaaggaattactacggtcacaaatttcatgatcacatgtcctttggatcaactaatgagacacattatttcaatattaggagatatcatggtgcttttattgagaatacttattgccaccaaccttcatcaacaattacccaattcataaagatatatgatcattttaaagtttcacctattggtcaaaacctcttgttaattttgacacaatctcaatgtactctcaaggttaagagtccatgcagtatagtaggtgaatcatgataatcgatagccttacatcatgattcatcgtacgttctgtctagtgtgcatcacatacataagtgcactcactaggggaaactcatcctgacagccaagacaagttatccctccaattacaatctctattggattgcccaaatccatgaactgattgtaaacaaattatctacttacaaggaattcatgacttttatcctctatgtaactcttaatgcacacaaattatgtacaatgtaagagatatgggttgaatgctcaaatcaatatcaatatgtaaaaggaatagtaaggggatagtcaagcttgactttgttacaaaatgtcttgtttttaggggttcaatctcaacacttggtgtttcaaatgaccgtttcacaagtacttgggtcattgactcaagtgctattgatcatatgaccttttcttcatatcatttatcttcttataatctatgttttggggatgaaaaaattaaatttgctgatggcataccagcaactatggcagtccaaggaaaaattgctttaactttagttctcacattaaaatccatgttacatgttccaaaattttcagctaacctcgtcaattcatcaaattactaaagatttgaattgtatagtcacctttttcccatctcattgtgtggttcaggattgagacacggggaggacgattaggcatgctaaggaataggagagtctggacctacttggatccaattttggcaagggtgattgtatgccactctcttattttttcgaaaaattctcatggaataaagcccaaatatggttgcatcatctttgtctagggcatctattttttttctttgttcaaaaaaatgcttttaatagttttcattgtgaggtttgtcaatttgctaaacatcatcgtgttcggtttcctttaagtaatacaaaatcaacattgccttttttgttaattcatactaatgtttggtgtccttttggaatcccaagtctttttggaacaacgtggtttgtgttttgtatcgatgattgtactgtggtgaattagttatatctcataaaaaacaaatcaaatgttaattttatgtttcctatctttcagcaaatggttaggacatagtttggagttaaaataaaaccaattaaatctgatgatgggaaagatgaaaaaggaggattatacaccaatcttcttgtattaattccccaaaacaaaatgatgtgggtgaatggaaaaatatacatccattagaaatctctcaagctatttttttagaaaaatatgcctaaatcatatcgaagaaaagttatcttaattgcaactcatttgattaaccaactaccctcaaaagttcttgaaaatataactccattggatacacttccaaaatttttcccgcatttcaatagctttagtaaacttcctcccaaagtttttggttgcatgtcgttgtctatagctatcctccaaattgcaacaaacttgatcctcgagctttaaaatgtatgcttatgggatactctccaaccaaaaagggttatagatgttatcatcttgcttcttgaaatttttttacaaccatggatgttacttttactaaaaatcaataatttttttcctaatacttaccttcaaggggagagcttagatgaagataagtttctctcttatggtttgcctaatttgactgtactttttgaattcatgcttctttcacctaaggtctcacctataggttctacctccttgtcatttggttaagaaccttcataagaaatggagcaagggggatttactgtgattgacataccactacaggtttactttagatagaaacaatcttaactggatcgaatgtaagcttaagagtctgaacctgagcccggtaatgaacacacaaactccactaattttgtttgtagtgtcatttctcctacttcaaatttgttgctctcaccaaaaactcatgatcaatttgttcagaatgaagattcaaaagtgttttatgatctgcatttatcaattgcccttaggaaagctaccagaaaatgcactctaacacccggtctctataatattatttcatttgaaaacctatccccatcacatagagccttccttaccaattaaatcatatcgatatccctcaaacaggccaagaagcacttagaagtaagaattggaggaaagccatggacaaggagatgtcagctgttgagaaaaaccaaacttaggaaatagttgaattaccatagagagaaaactggttggatgtaaatgggtgttcattgttaaatatagagttgatggggcgtcggagagatacaaggctaggttggtggctaaggggtgtatgcaaacttatgggatggactaccaagaaacatttgctgcaatagcaaagatgaataccattctatattactatccttggtagctaactttggttggtctttgtagcaacttgatgttaagaatgcatttttgcatggtgattaagaagaagatgtgtatatggaaacaccaccaggtttcaatggagacttcagaagcaaaatgatgtgtgcagactaagaaaggtgctttatggccttaaacaatcttcccaagcatgatttgaaagatttgcaaaagctatgaatggtatagagttttgacaaagccaaggggattatacactcttcattaaacgctcacatatgggtaaacttaccgtcgtcataatttatgttcataacataattgttttttttttttttatagactgttcataacataattgtgataggagatgactatgcggaaatagaaaagacttaagaagaaactaactaaaaaattcaagataaaagacttgagaagactaagtattttttggggattgaagtggctcattcaaggaaggctatttttgtctcttaacagaagtgcattttggatcttcttaaggagaccgacatgcttggttgtaagcctattgacacctccattgaacaaaatcataagctaggggaagcttaagaagatgcagtaatagaacgtggaatgtatcaacatctaattggaaagttaatctatttatcacacacaaggtcggatataacctatgctattagtgtcataagccacttcatgcattcttctaggaagtccatttagaggcgatttataggattctacgttacttaaagtctactgcaagaaaaggaattttctttaaaaaaaatgaagagctaagcctaggggtgtacaccgatgcaaattaggtaggagtagtggcaaatcaacatttgacctctggttaccatacattcttaggtggcgacttagtgacatgaagaagtaagaaataattcatagtagctcaatcaattgtagaagtagagttcaaagctatgacacatggggtttgtgaactattatggataaagaatgtctttgatgatctaggaatcaagtggggtttgtgaactattatggataaagaatgtctttgatgatctaggaatcaagtgggaaacaatcaatattgctcacaatctagtacaatatgatcgaacaaagcatgtaaaagtagatcgacacttcattgagaaaaacttgatagtggtttgatctacacaccctatgtttaaacaaaaaggcaacttgcagatgtgttgaccaaatgattgattagtcactagtttcaaataattacatgcaaccggggaagggacaacatctatcctctaacttgaaggggagtgctgtcaaattctaaataattttgtatttatttttttccttttctttttttggtaaaatatgatttataggagatatcataggataaaggtggtaggtgaataagatcccttgtttttttgcttttctttttttgtatttatttctttgttccgattgtgtataaatagggtttatgtattgtattctaaaagaattcaaggagagcataatttatttcaaatcccatggattttaatgggtttatacagattttggaacaaagaaaacctaggggatgtggactaaaaaatttacgaaggtttcataagttggaaaccacttattttctttgaaaatcaaattaaaactattttcaaaacctgccagaaacaagtgtttgattacttggttggtcaaggaggcctattcatatggacatcaggttcttgataacataaccatttgatctgcttattaagggattagccaccataaatttgggaatatgattttaattgccttagcttataatatgtgcatctttaagaacatctttctaaaaatttttttatgcacaaaaatcccaactttaccctcgcaccttatatttacatttgaggacaaaataaccaactttaattttgatgtggctttacactccatggcttgaaggctggattgaatgtgagctagctaggttaacattacagcttttgaagtggaacttccagccacattccactagggcataatccctaatgataaaagatttgttgccaaggaggattcttttgcagtggaagcatgataagagttaatatagcttgtacctaagaggagacaaaggggtcaatatggagtaagtttgtgaagaaggtattttgaaaggatttgtgtttcctaaaggaggggctcatgctgttgtaattgtgggtaatggcatgacctttttgcatgatacttacttcttgtagagattccatttgaggacatttcataatttcatcattggaatggacaaggaagcaatctttgtttttgggttgaggggtgggaaatgccaggaggttatttgagttgttgggaggaaagagcattggatcaaaggttctttagggcaatggaaggctgggagagggagttaatagtggtgcttgagtgtttgtatgagtgaaggatgatgtgagaaggccataagaccataaccagtcaggtgttcatttgctactacattataaaggaagaaaggctatgtggattacttggtctattctaggagtgatacatataggctgttctcatttgcaaatcttggtgcattatcaagtataggaacatgtgaatatttgaatattacaaaagtaggctgccataatctaagaatagctctctaggtttacttttctcatggttcattcaattgttatttccccattatatgcctttctttgactttctggagatttatttatggagattggattggtttttccttgtctttttctttgttcctccattctttttattttgatttagtttattttattttttaatttctaattataatttttattttttattgtctttatttttttattttatatttattaattttgaaaattttaagttgatacttctctggttcctcttatgtgccttatacacatgagttaagcccctctttggggcctttctgttttaactatattttgtagaagagtcatttttgttccaacttgagagtgggttcttggacaggaaagtgttctttgttattttctattggcataagaatctattttttgttgttaaaaacttaaaaaccattacctgtaaattttgattttgaaagtggaaaggaaagatattgtaggaaaataactcactctagatgataggcttagtcactatattgggtgaattcttctttttagtaatcttcactaaaatagcactttctgaatcacgtctttgatgaaatgcgtcctaaaatcaatatgtttggtcctttaactggtttttggtcaaatatgtggcaatctagttatttcaatacccaatattcaacttcttcagtaatagtgagtgaagtcttgctggagaaatacaaatagctgaaacaaggttaataatctaattttacttgattctcaatggagttaagaggttaatctccatttgaaaattggaggaggtccatgtaattaagctacatcttgtatttgtgcggtccatatattttaagctaaatcgtgtgtgtaacatgacaatatgtggtaatggttttgaagaatgtccaataaattaaagcagtggtgctaagttgcgtgttaccatgcaaatggagaatacaataaaatcatattttgtgaactgtgtaatattgtagagttacttgtattctcaaggtgatttatcatggagattggtccatacctgaataaagcaaattattctctctccctccctctctctctctctctctctctctcttcctttacctgcaaaaggaaaaaaatgaaccatgattacaattagagatgaccaactagtcatcttgaaggccccggggctgcttcttagtcatggttgctatcttgttgttttgagaatattgttagctgccgagcagcacccgtatgatgcacttaataaatttcttgttggaaaactcatcaacaaacttccaatttgtgagaaaaaagagcttttattggataggcttgattggagatatcaatcaagaataaagtcgtcttcttaggtctctatatattagcatgcatcttaaaacccatctccttaaaatacaaatgtctccatggaccatcagaagcattattaccccatgatgagtctccctccatgattatcctggagagtcctgtagctttggctcccctaggacctattggaatgcttcaagctgagtcttgtttgaaccatgtacaattgtcttagtggttgtttggtaaaatttaatatttattacataatgattcaagttgactttaagttaaattatttttaaattgttaacttttactttaagtactaaggttgttgggtgaaactaatttaaagtttattttaagttattaaattgacatatttaccccattagctgtaattaataggtgtttttaaaaattttaattaatatttattgtattgtttattaaacatctatacttaaaagtatcttaaatttataagataaccttaaaatatttactatgaaaaataagtcatagatttggagtcatgattgtgaaatatgttttcattagatatgggcaaataagacaaaaaaaattgggattaagaataaataaacattttgactcaaatatttaaaaaaaagtcatttttaactttaaattgtcatattaagttattttacaaattatgcttaatctacttaccaacttaggaactttagttattaagtcactttaagtcattaagttgatttaccaaacgccctcttagagaagataaaatgataggccatgatggccttatacaaatacattgatgcttagctagttaatgggcttctagaaaattcatgaattttgtaagtttcagaatatattactgttgtttattatttatttgtttattttgttttaaatttcaggttacatcaaaagcataagcacagacatttcgaca

SEQ ID NO: 13584 - DNA, 16519 bp, Vitis vinifera
  Intron number 1 from transcript GSVIVT01038370001 (locus G SVIVG01038370001) derived from phytozome v7.0 (chr-ID chr9 ; pos 11215475 to 11231993)
ttggtggtgagttcttgggatcatcatcaaaaattgcatttccaaggttgaagcatctgtcttttgtattcatgttagagtgggaaaattgggaagtaaaagaagaaaaagggaggaaagtaatgccatgtcttctttccttggcaatagaagatagtccaaagcttacggcagtaccggacctcctgctccagaggacaccaccaattaaaataaagtgggataaagaggaaataggtggaagctcttaacatttgtccattggctttgcactggttgccctacatgcaagtaattattctattttctttttaattttgcttttctataattatttatcttatctctttttttcctttttctttttcctcttttataaatttatttatatattttggcaattccctaattatttataaatgtaaattcatatatttgtcgtcccttattttttaaaataagaagtaataataactttcatataaaatatatcatttttaatacaaaattatgaacttatcctccatatattcttgaaaactactttcaatataaaaatagtaaaattaatttttaaaaatcataaatctttgaaggtaagtatgtaaaagtttctttattttagatattagttactattatttaaaaataaaataaaataaaataaaaagtgcatccaaaccatagcagttttccattttaaatcaatttgtttttcaaagtaaaaattctttaatttaaaattttttttatttgaaggaaatttaatttaatttcccaaaggcatgagaaataacgagttggaaaactctattccttcctcaagtctaaactcaggagattctctattgaatgtggtaattgatgcaatgcaggtatgaaacggatccatccatggagcatattctatccaaaacaacctttcaaatcaagagatgtaattgagtttatggtattgaatttcatgataaataaatgtaaagttgtgattcatatgtgatgagaacacattccattacataaaagtttatcttctttttttctcctccctcatttgttggtcaaaaaatactatatgtaaattattctttagtctttcttgttttttttattattatttttcattttttaaattttaaaaataaaatacaatttagtataggaagtactgcaagaaggaaatacaaatcctttttttttttttttttgtttgatattttttgtcaaataaaaataataataaatttgaataaatatatgagaaaattttagtgggtttaaacattttttcaaattctctttactttgtcttttctttcccccccttttttttatatcacatttaattcgttcatattttttactcaaactttcgaaaatctaaatgcaattctataacttggataatttgtcacactacaaatttaacaaattttgtttatatttgtacaatagattttattgtaagtgaaaatggtttgatagcttattcgagagaaaaaatgaaaatagtttttttcaaaacagtttttaaaacaaaaataataaatgttttcatttttagtcatttaaaatttcttttaggctataagtacaagccacactaactaaaaatccagggaaatatatataaaagagaatgaatacatagtattattatggaaaggatcttttacttcattgaagggaaagaaaacacacaagttatgtttgtttccacgaaaatatgaggaaaaatgcaaaagaaaaaaaaatagagaggaaaagtaaaaagaaaaaaatatttaaaatcaataaattttttatatgctactttaaattaattttatttatttttccttatctatgtaaagatcacataatttaaaaatgtataaatttatatctaattttaattatatttggttttctttcttattttctatgttgaaactaaatatgagaaaatcatttttcttaatactttctaggaaccaaatataatcataatatttgttgagaggatctctcaattattattattattttgttatatatactacaaattaatagtgagggtatttattttgactttaaatttttgtttttgttttgccagtttataatatcttttagttttttatttttacaaattaaaagaaagcgacttttttctttctttcttttgatagtttacaattatttaaaaccttattaattccactatttttaaaagaaaacactaactttagttgattaaaatgattgatttttcaacaattttggaaagaattgaaaatgatgactatcatcaaaataatgaaaggctcaaaatgaataaaagtattaatattgtaatttttaatcaaatgaggataaataatagccataacaaaacactatacatccttcttttaatgtatatagacattaaaagtaatttataattacaaataaatttaaaaacaaatatcttttaataaaatataaatactaatattataataaatttataaaaatatgtgtaattaagaaataaatcatattgaatatttttgtattagttagtggagaaagaataaaaaaaagttgctcatgtcatattttatttcctttttaatggcttttttaaaattaatttttatttttccatattttccttttatttttaaaaacaccttaaaacaacttctatctattctctaaaattatttttaattttgatatatttttaaatactattttcaaggaacaactatcaaaagagtctataatgttttatttttctaaaaacaaaactttttgatttttaaatacaaaaaaatatttcttggtttgtttgatgacaattatttcacttcccttgtgcgtaaaaaaactttaaagtaattttccatagtagactaaagaccaactttatattaattgaaatatttcaaaatgttgtattttatcattttttttatttcacatttttttacattaattctgaaattttattgtaacctagtatttatttggaatttttaaatatcaattttcctattggaatatttccttcaaattattaaaatttttagaatgaaatgtatagttgaattagaaggcaaatgattaatgatagtctggatatgtacattaaaaaaaatgtttaatggaaataataaatgatgataagatcaaaatataaaggataatagaagtacaaatatgtaatttccacctactgcctactacctactagtagaagttagaggaggaaaatctagtgtagctagtaaaagataacaatctaaatgtccaaacctgcatgcaaaggataaggctttgtttgaaacatgacaacttctaaaactccaaggtgatatttgatacattggaataagaatgactacgttgtttctattctcgtgtctccttggatttaaatgaatttgctgattctatttcttttttgtgtttagatgtatataagaatgtaaggttagaatgatattttgtttcaatttcaatgttaagtaaaaataggaatgaaaacaaaaacaaataaataaatagataataatatctgtacttatagtctaaaatatttttttttttattttttttaaaaactctcacactctttaaaatatccttttattttcgtttaaaaaaatcctttagagtttttttggttaaatgataaaaacctatttggctgtgtgatttaaaaataaaattatttttaaaaatttaaaccattgtttagttgttctttagaaacaatttttttttttttaaaaaaaaaaagtaaaatagataattgttttttcatttttttcactagagaaaatgaatttcaaatcaaatgagactttgtattaaatttactaataagtttaataactttagaaaataatttaaaactcatatatatatatataatgactacaaaaaaataataaacataattaatgctttagattctttaataaattttgtaatttttaagaataatttaaaatttaaaaatttgattaattaattatagattaataaaataattcaaagtgtaatctccgtaattgagtaataaatatatgcatataatgaaaattttgactcatttataccttaaaaattagatttgatttttttttaaattgatttaaaatataatagtattagctattattaattttgaataattattctttatttttgacaaaataaattaattatgtttttattagatgtcaatatccatatttaataatatttatgaaatatataaaacagtattagaaattattaattttgaattgttattaattatttttaacaaaataaatcaattaatgttaatatccatatttgtataatatttattaaaaatgtaatttataattttattatattattaatattcatattttattaaaaactatttatttgcaattataaaattaattttatttttaacaagacatgaattaaattaaggttatattacataaattgaatttacaatttcaaaatttaaaaaaacttatctaaaaatgttttcagttgtctaatttgtaaaaactatttttaaaaatagggactgtcaaaagctaacttattggcctgacaaaatctaatagcaccccaaaggaggataagttaaaattattctctttgttgctcaaaaaagatgaataagaattcaaagaaatgacatttttctttccatggaaatgatgccctaattatcattctgtctctgtttccattttaaatgaatacaaagagaggcaggtgagaggtcctttcttcatattattaaaaccaaggatattccaaaatatgagaagaaaggggttggtgaggaatagaccttcgttctcctttcttgcaatagcatcaacagcagtagaaatcattcaaggaaatagttaagtcaatacacatgacttgaccaaatgcatgaaccgactgtggacaaacccatgacttgtatcttctatgcaactcttaatgcataaaagtcatgtacaatgtaagatatatgagttgaatgttcaaatcaatgtcaatacaccaaaaggataggaaggagatagttaagtcttactttattacgtcatatcttgcttttaggagttcaatcccaacagaaatggtattagaatcccctatcttgtatcaaaatgcttattccttccttctttcatctcctcttatgcatctaggcttctccattttgtttctatcatttttgtttctttaggttgccatgcactcacatttgcacccattttattgtttttttcctacattctccactggatataaacattagtccaacaataaaggcttaatgtatatttaagttaaaatggtagggttgaggtcttcaacggatttgaacctagaaataagactctaaggtgtcatatatttcctaatttcaattaggtcacttatgactaaggcatgtgacaataggtattcataagatagacactttaatattgttggaaattctagattgctctgtttcctagccttagataagataaaatgcatgcatctatccttaggcttctcttaatccaatcaaagtggttatgaaaaccaataagattaattgatctagagaaaaatagctcatacctatgatctggatgttcttaaataaattctagtgaagttgtctaagaagttgtaagtctcgtttacctggtgtccttccacctaatctttcctcacatggatctaaacatgtaagagaagtgtgggcttctcttcctccttgagggtggttagggttttttttgtagaaaatcttttttgaaagaaaaagtgtcaaaagtcttaaccctaaacctctaaggggatttatatagggttccttataggtttaagtgattgagcctaaattgggttggggtcacctaattcatcccacctaggtcctagttaattaattagtcctattaggtttcaattaattaattaattagcctagtctaaaaaaataattcataagatctaatgcaacctttacttttactaaaacactcgtatacacacttatcaatcaaaaacccaaatctctccaaataaatcgtgttaaatgtaatattaataaacatgtcatcaaggaatacaagctagagcagggatcactaggacccataagaaaatactaactccctcataattcaattttgaagttgactcaacatcccattatagagagttaattgcacttcgatatcctatgatattataatgagatataagaacccagatccatgacccatgttatatatctcaaacccatgagatatcatagtgcctatcttaagtatatttgttgccaacaacttctaccaataatgatcaaatccatagagaatatatgaccatcttagggtcttattcgcatgtcaaagtcattgaagactttagcactaactcagtatcctttcatggttgagagcccatatagtatagcaacttagtgatatcataattaccaatagttaattttatgactcaccgtaagtcctgtccaatatgtaataatacacattagtacacttaccatgagaatcctatcccgatgactaagactcttcatcccttcaattagaaggtaatgcactacaatctcaaatggattgcctaagtccatgagcgatttgtgaaccaatcatttatttgtaagaaactcatgacttggatctttcatacatctcctaatgtacctaactcatgtacaatgtagaaggtgtcaagcttaaatgctaagagagtataatacttgagtaggatagaagaaacggagaaattagaatcatatcattaaatgataaatatgtttattattacatcatgtcatacttttaaatgttctatcctaacaatgtaatcatatacactaatgcaatcatcatgaaaaacttatgttaatgaccataacaagtcatccctctaattagaaggtagtagaatacaatttcaaatagattgcctaaatccatgaaccaattattaacaactcatcaacttgcaagaaatctataattttgatcttctatatagcttctaatgcacctgagtcatgtacaatgcaattgatgtagacccaaatgcttaaattaataatgcaaatatggatgaaatagtgaaaataaaaatcatagtatatagatatattaatgaaatcttatttacttacattatatcatgtttttaagggctatatcccaacactttgcattatttaattgcttaaacctttggttttgtccctcaaaggcactaagacggtactcatgtctttttagtttcaataagcaccaaaacattccacatggaaataaaaatctcctgccttccttttaacttaaaagtattttttacattttgtaagaatattttgtaatatatgtcacctacataaaaaaatgtgaggaagttggaaacacattctatagttcattcataagagcaagttccccatcaatgacaagtactcttggaaagaagtcttcatgcatcaaatttctcaaattttgtagacttgtgtgtacttatcttctttttcacccccaagatatgtaaatgcaatatcaaatatcttatcaattgatgttataccaactatctcaagcaaaagcattcaataccaaggatgaaaatatcggtaatcacggatatatcggtaattcgattttacggatatatcggagatattttggatatatcggagatatatcagcgaatattattggtaggcttaaaattgttaaaaactcatggaaatgcaagaaaaacctcataataatataattagaaatataatagacattttaaagttgttttattgaaaaatttgatatatatatatatatgatataatttgcgatattagatgtaattatatcatgtcgatctataagaaatgttaatttcgtaattgttctgattataaagtcacatcaaatacttcatttcattaaataacaataatttgtacacattacattgcaatgtccctttagtaccaaaatgaggatcgatgtggttcaatgggattgatagatgaaggaaccccgacttgctgttggagacaatattggtaccaagtcaatgagcctcgataatattggttataaattctaacatgccatgcatatatctcttgagtcctgcctactgcttctacatggataggatactcaaagttcacccatgtgttaacgccaaatccttcttccatctgatatggaatttggtatggtatttgtctggaaggggaataatgtgacataccatactcttcatatgttgaacttgaaggttgaccataactcatcacatgaggagggtagatgttagcctcattcgaggagtcactaaattgagtccctatactcatagattcaaaactccctgaaagtaactcctcgttatatggttccatcattcgttcttttcctctataaggcctcccaatagctcctatgcctggaccagctcttctagagccatggtcttcatcctgtgtgcagtgtgtgaaatcattttcacaagtaaataggctgattggatattgactatgtcgacgttcatcaatatctcctcccccattatcacctccatcatcagttccacctcttgaaccatcgtaaccagaagcagaagtacctacagcactaagtctactactatggccagcacttgtggagtcaatctcttggtgggaatgcaatgtcgcatgaagtgaatcatcagtacctttgctaaaactttcaaagtgaacttcttcggacaacacacgttcaacattaactccaaattctcgagcatgagcggcaattcgtggatcaggatttccaacttcgtcatccaagtgtataggcctaacccactggaacaattgattatcttcttcttcacccaccttggctaaaatgtcaagaagatcaaggtaatctttttcagcaactcgatcattttctgtctccatatcgcgtaactttagcctcatattatagtaacaaaacactaattgctccaatcgagggtaagccaaacgatttcgttgctttgtgtggattaaagcaaacgtgctccaatttctctcacatgcagaagatgacacagtttgtgagagaactttgatggctaactttctcaatgtaggtgtttgattcccatacataaaccaccattcagctgcaacgaatttgataatcatataaatacttatgtggtgaatttataataataataatcaattttttcctataaagactcactaggcaccatggttgaccttgatgcaattgctgctcgatcaccgaatcctctttttgcatctcgaaaaagtacaagctatgtattcaacatttaatttgttagtaaacgttcaaataaattgatgaatgaaattattgttttattgacaaaaataacaattttttattcacctcatttccaaattgaccaagcgattcagtagttggatctaattttgcaaaaacatcatggacagcttgaagtagttccagatcactaccaactccacacctatattgaaatcttggatttaagaagtatgctacaataaaatttagtagagttagtattttttttttaaagaaacttaaatacaaagtaaaaacttataaagatatatagtatttaagtacctgctgcatgaagtggatgttttagtgttttctgccaatgatcttgtattattttgaacatccaatctccagctccttgacgaataaggttctctttcatcacatgcataagctcgtacacaaatggcattgtgggaacaacttcagaatccacaagtcaaagcaccacgtataatggctcatataatgaaactatatttgtcaatctgtcccaatacgtatggtcaaacaacaattgctccaattctcgtccaagttttgttcgactgagtttgtgttgtgcccattcatcactcataaacaattttttcaaatcagccattttttttagaagactgtcaagagcaatataattggtagcaaaccttgtagctcctggtcgaacaatgtctccaccacaatactttctcatttgtgctagtaaccaaccatgattgtaaatgaagttagttatcttgcgagcattgtttatcacctcgataacattgggtcttttaccgatgtcttcaaagattaagtcgatgcagtgtgccgtacacagagtctaatataagttatacttcttcatcaattgtttccctactttcatgaatgccgacccattatctgtgacaatttggaccacattttccttaccgacttctttgataatagtcttcaaaagctcatatatatacttgtggtctttgatatagttcgatgcatcgactgacttaaggaacaccgtggtccctttagaataaaccatgaaattaataatacttaatttcgtgggccctgtccatccatctgacattattgtgcacccatatgtcttccatttttccctttgttggttcacataagcttccatttctttgtactccatttccaagtatttgttctttatttcatatggagatggaggttcgattcccattcctgcacttcatatgtaaaacatgtcaaaaaatactatacttactaaaagtataacacaatataacatttgataaattagtaattacctgcttgttgtgcaccaataatcatattcttgaagtgatgagactttgcttttgcgggtgcgacactctcataaatgaagaatttgctgattaagcgtcccatcgtttctttaattgcaccacccttgaatatatctttgatatttttttgttttgctacagaagacttgtaaagcgaaggggcaatagggggtgaatgatgcgaatgtcgcatactctgtgattttctcatcgttgacggtataccagtagaagactctcccaatttgcgtttgcttcctacaatattctcatattgttcacgttcccaattagatgctttcgaggcacgaacttcagatcgatatgcatctcgctcatctaggtgcatatttgtcggatacatatacacatcttcatcctcaacatcttcatcatcatcatcttcgtttaccaaatgtgtatgatgcgtccccattgtgccacgtaattgactacgaatttcttcaatatcaacatttttctttgcttttgctttttgtttgtcatgcaccaacaatcgtatctcttctttcacttcgggcggcactcttggacactttttggtgttgttatgcaggtccttatgcattaaatgagacttgaatcgtgtgatacctccacgtttcattaccaacccacaaaaattacaaattgttccatttcgattaccctcaattggtgaacaatacttccaagccggatctcgccctggcacggcagaaccaccttcactagccatgctaaatctattgcaagaaaaatacacttaaatttaaatctatgttaattaaactaattaaataaattaactaagttaatttttgaaatctaaatgtaattttatgacaaatttactaaatattgaaattaatcataattgaatataaaaataaatcatgataatataaaaaaaattgagcatatttaatatttcatatatagtagttcatgttaatttaactaattaaataatttagctaagttaatttttaaaatctaaatgtaattttatgacaaatttactaaatattgaaattgatcataattgaatatgaaaataaatcgcgataatatgaaaaattgagcatatttaatattccatatatagcagttcatgttaatttaactaattaaataaattagctaagttaatttttaaaatctaaatgtaattttatgacaaatttactaaatattgaaattaatcataattgaatatgaaaataaattgcgataatataaaaaattgaacatatttaatattccatatatagtagttcatgttaatttaactaattaaataatttagctaagttaatttttaaaatctaaatgtaattttatgacaaatttactaaatattgaaattaatcataattgaatatgaaaataaattgcgataatataaaaaattgaacatatttaatattccatatatagtagttcatgttaatttaactaattaaataatttagctaagttaatttttaaaatctaaatgtaattttatgacaaatttactaaatattgaaattaatcataattgaatatgaaaataaatcgcgataatataaaaaattgagcatatttaatattccataattaaccatgttaattaaattaattacataatttactatgttaattaaattaattaaataatttagctaagttaattagtttaatgtaattctaaatgcaaatttaaataacaaataatcatctaaaataaatatatcataacctaaattaattcaataaaaattcacaaaataattacaattgaatgtaaacatactaattaattaaaaatacatgaattaattattgcaaacaaaattaattataatttcaaacaaacataccttaaaatgattgaataattgagcagtcttggaaaagattggagtaataagagagcaaatgaagaatcaaagcaaaaatggatgaaattgatgcaaaattggctatttatagatgaaatttgggccaaaatagccgttggaaccttaagttaccgtttaaaattaattttggccgttggatcacaatttggaagcaatcttgccgttggatctctttgttaatgttgggattcaaatctgggcgttggatcaacacgggcgtgatctgggccgtcagatcacgttggagagagagggacgatttttcgccaaaaatcgccaaaaaatcggcgatatatcgccgataaatcggcgacacacgggattctcaggcgatttattgataaaatcgccgatttatcctgtgtcgctgacatatcggcgatatatcgccgattttttggtgatttttggcgaaaaatcgccccaccgacttatctcctccatttgtcgtttcgccccccgccgacacgcgatatatcggcgatatttcgccgattttttcctccttgttcaatacctgttcatcttgtaggcaaaatccatgatcaacaccattggaaaggttaacaacaaataaatggatattggctaacattaagtttataatatagtcattttgttcatccttctatgtcattcgatgtagttcaactccattaatttatgcatcaattgttgcttttatgacctctcaccatattcatttactttatgtttataatttgcattacatattatcccaatgtgctacagttgagttcattcctctccttttaactatttattattttctttggattaatgtcactctttaatatttttattaagatactcatttcttcttaatttaaatgattagcaaaagaatatcctttaagatattgtgctttagcataattatgtctttcacatttaacaaccaatatctaatcatcattagttagtagttttatacccttaagagtaaatggacacccatatttctttgtttctattagtctctttttctctttcttttttactctcatattcaaaattagcctttcttgaatccttatatactccatttcattctcaagtaaaagtaatcctatcatatatatcctttactaattataataaccatttcatttcttttaccgatctttgacatccatttgattaatgctttcctagtacaattaattatatatgttgtgaagacaatcgagtagtttatcattgtcgaagcttataaatgctctatcatatataaaaaatttaataaaattcaattttcttttagataagaaataaagaaaaagttgttggaatgtatggtgttggaagtctttatgagtgtcccttaggaattccttacgattgtttagaactatacttctagatgcacattagggtgtctagaggtatagttataaacattttaaggatgtttgaaattataggattaaacaattgtaattcatcaaacccttgcaacttcgaacacctttagcaatgaaaggaaaactcgttgaccttgacctatatatttttggtagcaaacactacccattttctctatcaatctcctaccaaacttggctgtaatatacatattctctatcaatcttctaccaatctcggttgtaatttaaagatcagacatatcttttgtaactagtatataatacaatgaatcacaaaggaatgatatgctcttatttttctatcctttctataagcctaacatggtatcagagccatacttgctataagcaagctttgcacagcatgtccaacaaccttcatcatcattccaattttttttctctctattcacagttgtgaatcatggctaatgaactttcttcatcttttgcaaatcttgtagttctcacaataggaaacaatctctcatctcaaccaaacaccctcatttctatcaatgttgccacacaaatgccattcaaacttagcaaaatgaactatgcatcttggagagcccagttcaccaatcttctatttggatatgatctgttgtgcttcctcgatggcacaactccttgtcctcccgaaaccaccttgcaatctggttctacaacgcctatctccaatcctaagtgcaagttatggaaatgacaggatcgtctcattctccatgccattcttgcatcagtcacatgggatgttgccccacttatctcctctgcaacaacttctcatgaagcatggtagaaactggagaccacttttgcaaatcgatcatgaatcagaatgcttagtttatgtaatatttcgatgaagacaacaaagggttctcaatccattgctgaatacatgcaaatcatcaaaatcattattgatgattttgctctcatgggctatcctctcagtgaagatgaaattatccttcatgttctcaatgggttaggtaatgaatttaaagaaattaatgttgtcattcgagccagagactcaccagtgacattcgaaggacttcatgacaaattacaggatgaagaaacttttttgaagcaagatggcacaagtaaggaaactccaccaatcattgctcagtttcatcacaaattctttaatcataaaggaaatagtgaaaaatctggtggacatccaagaggcaatttcaacaataaagaatcaaccactaactttggcaatagaaatatctttgacaatcagagaaaaaaagattgttcaaggtaataaaaaattctccaatcaaggaaatcaccatccctaacacgatttcaattcttcacaacattcttggcgtcccaacaatggtaccaatcaacaccgaattatttgtcaactatgtgacaaagctggccacagtgccaaggtatgtcattcctgaccaccaccactcttctcaccttaagccaactacatggccagggatcaagccaatgacaatgactcttggatagttgactcgggtgcctctcatcacatcatttcgaatcttcaaaatctctcactacactctgattatggtggtaatgagaacattatgattggcgatggtaatggcattcctataactcatgtcggttccaccacaattgaagcacccacaaccactttttcgcttgagaatgttttgtgtgcacccttgattaaaaacagccttctttctgtttctcaatttttccatcaaataacacatctattgaattttttccttatttttttactgtgaaggatttgagcatgggggcatccttggtgcgaggttggaataaaggaaatgtctaagagtggccaacatcatcctcaacctccacaaccaaaacacatgcctttcttgctaacaaacccaccatgaagtcttagcatcgtcgtcttggtcaccccccatctcaagtcctcaccaagctagtttctactcaagctttgtccaatagtgtctttagttaactgtgaatgacaacaaaaacaacaacaataataatgatcatgcttatgaccacattattgttgtttagtagtagtaatagtagtaatattagtgttagtattagtggtaatggtatcatttaaaagtagtacagttaaatggagaaaagttgatctaagtttggatgttatgttttctgttacctacttaaagattaaccataagcattaccgttggtgggaagttgctcggctacataatgggattactctgatccaaaccataaatccccttgcccaaatgatggtggaaatagacatggttttgagataactcatccaagattccgtctgtactaaaatctgttggtctacgtatccagattagaccaaattaataccatatccataatcgcctgttacttcgaatcaaactgatcttctgaatcttccgaagttctgattttcatcataagtttttgggattgtgactgaagtttttgtttttgtg

SEQ ID NO: 13585 - DNA, 4905 bp, Vitis vinifera
  Intron number 4 from transcript GSVIVT01017602001 (locus G SVIVG01017602001) derived from phytozome v7.0 (chr-ID chr5 ; pos 1930140 to 1935044 reverse strand)
ctttatataatcctgccatttcttcccataaggatgctctttgttattttatcttattttatttttaaattttttaacctttttctttgttgcatgattatagaactgtgattgtgtttttaggttaagtgatgtccaagtttatctcaagtcttcttagcatgcaattacttcccagaaaatacagtgccttgtatttgtgtccccaccatcataatttcatcattcatatatttatcaatatctttcctagagtaactaaaaatagatgggccttgttgatgaatttggtatttttttcttgataggcaaaaggattatatatagaaagtaccaaagtaaaagatgcaacaaagtcttaacataatgtatacatttgtcaccaaaatgctttaatgtctacatgtgatcctatgtcgtttaaaatttcatcaattggtatcagagctcatacatggatgacatttgagctgtatatttgggttattttgggtttccccttttttggtttggaagccattttttggagcttttttttttttttgtttggtgttgattcttggttttcaaacctgattgatgttggagacttgtagaaaatattgtttggagcaaaacccattttttttatggtttttggagctcatttgatggaatttcgaaaattagggcttattttggttcttccttttatgcgttttttgtgtaatatttgggtttagattgatgaattgatgtttgaggatggaaacctaagtattttcgtcggaaaatgcacaaaattttggctgaaaaaaaaaaaattctccagaagaaccaggtcgtgttcagcctggtggagaagatgaacatcatgacgtcatatataaaaataaaaaaaataaaaactttttttttttgtctcaatattcttggaattattatgcatttgttaaatttggttttatcgggacaattattattattagtgctctttatggtataattttttatcttataccaataatgttgttttaggccttttttgttaaatatttaaatttattatggcaataaagaacatttgtgtgattgcctatcgcaattccaagtatgtcaagttgtgcaaattaaatatttgagtttatcatgacaatagtgaacatatatatggttgtctatcgtgatcctatatgtgtcaaattgtctttgttgagatattttatctcccacttttggttgttttattattgtgattactagggtccatacgggtattgtaattgtcctatcgatgattataatacttggttggatgcttagattggtgaaggaaattaattatatattatgaaccgtacgaattttctattgccttttcggtaataaaattagtgcatcttggttgcgatatttaattagttatccttaccgttgtggaatttcaaaattccaagctattgctaaattgaaaaattctagaaactagcaaataatttgatattgtagtaacatgcatattgtttaattttgctatcttccaactactagcagtcctggaattactttgcatttatctgccatcaagcctcttactggaaataactttgaggaatggtatgagtctttcaatgtgcatatgactatgcactatttagacttggctttgagagttgatgagccaagtaagcccactgatgtgagctctgctaatgaaagatccttttatgagagatgggagcactcaaataggagttgtttgataggattatcacccaaaatgattttaaagagaatacagttgaatgacaataaatgaaatgtttaccttgattagtgtcatggaaaacatgcatctgtcaactgtattctctttaaaaccattttaggtgataatcctatcaaacaactcctatttgtgtgctctcatctctcataaaaggatttttcatcagcagagctcacatcagtgggcttacttggctcatcaactctcaaagctaagtccaaattgtgtagagtcatatgcacattgaaagactcataccattcctcaaagttatttccaataagaggcttgatgacagataattgcaaagtaatttcaggattgttagtagttggaaaatagcaaaattaaacaatatgcatgttactacaatatcatgctatttgctagtttctagaatttagcaatagcttggaattttgaaattccacagcggtaaggacaactaattaaatattacaaccaagatgcactaattttattactgaaagggcaatagaaaattagtactgttcataatatacaattaatttccttcaccaatctaagtatcctacctagtattataatcattgataggacaattacaatacccatatggaccttagtaatcacaataataaagcaaccaaaagtgggagataaaatatctcaacaaagacaatttgacacatataggatcacgataggtaaccacatatatgttcattattgtcatgataaactcaaatatttaatttgcacaacttgacacacttggaattgcgatagacaatcacacaagtgtctttattatcataataaatttaaatatttaacaaaaaaatgcctaggacaacattattggtataagataaaaaattatatcataaaataataattgtctcaataaaaccaaatttgacaaatgcataataataccaagacaacccaaaaaaaaaagttttttttttttttttatataacgtcatgatacactgttcatcttctccaccgggctgaacacgacctggtttttctggagaaaaaaaattttcggccaaaattttgtgcattttccgatgaaaacacctaggtttccatcctcaaacatcaatccttcaatctaaacccaaaaaattacacataaaaggaagaatcaagataagccctaattttctaaatcccatcaaatgagctccaaaaaccattaaaaaaaaaaagaaaaaaaaaagggttttgctccaaacgatattttctacaagtctccaacatcaatcaggcttgaaaaccgagaatcaatagcaaacgaaaaaaaaaatgccctaaaaatggcttccaaaccaaaaaacgggaaaacccaaatatgcagctcaaatgtcatccctgcatgctctaataccaattgatgaaattttaaacgacataggatcacatgtagacattaaagcatgcattaaatggcaataaatgaaatgttttaatacatgtgatcctatgtcgtttaaaatttcatcaattggtatcagagcatgcatggatgacatttgggttttcagttttctggtttggaagccatttttttgggctttttttttttcattttgtgttgattctaggttttcaagcccgattgatgttggagacttgtagaaaatattgtttggagcaaaaccctgttttttttttagcccactcaaaaacaaatcccttctcttttctcttgcctgcccattggccttatttgtataccctgtgtatactttgttgtgccttttggcaagtgtttttaacataccttgctcatttacctattaaaaaaaacaaatccctctccttagttagaactaatgcaatctacaaagcctatcatggttaaagaatggtcatctatatcagtctgacccaatccaaaaaaagaattcatgaaagatagcttaattgcttgctttgttatatacatttgagttgcttttgatgatgatgaggtgcaatggaatggcattcgctattttctatgctccaattatgaagttcattttttatatatataaataaagaagattatatattaatcattaaaaaagggcaccaaaagagcaacccaaggtatgcaagataaatacacccacacccccacacaactcaaacaaaaacgaagtggcccaaaaggaggtgcaaaaacatccccaccctcaacgagggcccaaccaatcaaagaaactaattagcatcggaggaccatcctttacaaactccaattattattattattttttttgataagtaaacaagatatgcattagaaaaggctaaacgccacaaagcatacagggagtttacaaactccaattatgaagtccaggtgtagtcaatgtcctatttagcgctaccaatgagtccaaatctgtataaactccccctaaactttccactatcattgagtttcaaatttgtgaaatctcctcctaagcattcaatgtgggaaattttccagttattggctggctggtgtgaggagccaccagtgttatacttgattgtcccagcatcataaaccagttctagagataaggaaactgcatctagatgggatcagtgatgattttcttcaccagtgcaattagaggtcagtgtgttttttgttctatttcctgattactcatccaaaatatccttcagatggtcgtgaggacacaggcttgcaaatgtttgaaaacattaattatgtttttgattgacagatataatcttcaagttgtttctccatgcatcaacaattgcaccacttccaaaaatctttcttccattaaaattccattgtttttcttccttattctccttggacaaatttgcaaataatccttacctagataacacgcttataatgttacctgatgtaataatttttgaaggatgcagaaagttgataggtttgagtaacccatatcagaaaatatatatatatataagaagaaaggaaaatgatttttttttaaatgtgaatatgtgccatatacaacctgtatcaacaatttaaagtaatctaactgtgatttaaatgcatacgactctgtacttgggctgtttgtatcatggctttcctctcatgttagtcctcttgcttttgacctgcttataatccaggaaaagagctg

SEQ ID NO: 13586 - DNA, 5898 bp, Vitis vinifera
  Intron number 1 from transcript GSVIVT01009963001 (locus G SVIVG01009963001) derived from phytozome v7.0 (chr-ID chr1 8; pos 12863103 to 12869000)
ccatattcgtgctactcttaagccaaaggttccttcactattttttctcatttctcttatattaaaaaaccttttgtacatggttgttcctttactcaacaactcatgagacatgaagacaccggaaatggtgcatgcatcccaagctcgttctagagtttcacaattaaaaacttagctctagataatccggaagaggtcattagccattaacaattatcaagatgtttactaacaatcttaggactattggacatatgatatcatatgaagacctcatgtttcatattttagttgaccttgagtcaaaatataaccttatcatataaaaaagtctcttccactttcctaccaaatctctctttatcctagcacataaattaagggatcgaagagattatggcaaatcatgttcaccaagaaatgttttggtttgccacaaagttgggaatgctactttttgttgctactatcgctttgatcgtgctttcatgcttttcaaaacaatcaagcttctagattcatcaccacacctaagctagtctctaactagtcatggtacactgatagcagagccactagttatgttactgttgaactaagcaacctctctttggaatctaattattatatatggtaaggataaacttgtagttggcaatggtaataaacttcctattactcatgttggccatactaaaatagtttttctcttctctcatctttatttgagaaatatattattggttcctcatattaaaaatagcttgctaaatatttcttgtttaacaactaataacaaaatatatgttgaatttcattccaatgtttgtttggtgaagaatagaaatccaccaggtcatgctgttggaagggaagcttgaatatgaactctacaaactacatattttagagacaaaaataatacaaagtcagttgtttattcctttatgactttattagtcatctcttttgttgggttaagtttagttgagtaaaaaaaagggttgatgcctaatgtcatgagttttatgattcaattagtcttgatgtcttacatagaaggttaggtcatccatctagtagagttatgagtcattccaaaaatcttgtaatccaaataattcaatcaacaaaaaacttgactttagtgatgcttgccaatttagaaaacttcatgctctatctttcaactcttctatctctcaaaagttcttcatcacttgagttgatcaacacagatatatgagatctttctccaattgtttcaaactcaggatacagatattatattcacttcatagatgatttctcccgatacacttggatctatcctctttgaactaaaactaaaactatatgctcttttatcctttttaaaaaccaaattgagaaaactttggactctaaaataaagaaacttcaataagcttgaaatggtgttcttgcctacaacaatcttaaatttatgtccccattagaaaaactttacaaaaggaaactagattacacttttctcaaaacattcaggtgttcttgtttcccttacctcaagctatttcaatccaccaaattccaatttcacataaccaagtgtgtctttgtaggttacaacaactcccacaaaggtactggccacgattctctattatctaaaatactaagcctttttatgtagcaactttggcttaaaaaaactagagaaagattcactatgacttttgtagtactccaagtatcgtcctcaatgactagcatatgtaagttgtcaaagtaggtctaaacgattgctttttgcttactttttggtactaataatgtgaaattttgatttgaataaaattgaatttattaaaataaacctaattaaattacaaaagaattattgattccagattaggagtttcacaatccaatttttggtatagggcctcaagaaaaacaagggtataaattttagttagtcttagggtattcaaaatgtggggtcaaatgagatcaatctaagttccataactcagggttgcatctatatcataacttttaatattttatttcattattgaaataccaaatagatgaataggtatgaaaattgggtttaggtttaggattaggcctttaccactatgtaaatttgtcttaggatagataacaataacaaaacctcaaataattagggatcaagaattaccaaaaatctctaatatcaagtaatagcctattgtactatcccctaattcaaattaacatcaaagaatatctttgttttcaattattatgtcttaatccttcatttattccatttttagtttgattttacccattgttttccattggctttaacactaggttttcatgtttcacacttcaaaatggttttttagcctctcatgatggtgatttcattcacacaaactatatatatatatatatatatatatatatatatatatatataaaagaatacataaccattattagataaaagaaattagaaacaattgattaaaataaagaaaacaaaccaaaaatcttcaatatcttcttctcttcttaaaaaaacaaactactttgggaaaaacaaggagcaataatgtaaatcctaaaggcaacatttcaattctagaaccatagaattcaaaaaggaaggttaagatccatcatgtcttcattgaaatgcgcgcttagaataaaagaaattccatcatgcttaaaattcttagataatgatatttatgagagaatttccatctttttgaagctcttctaaacaaggtctatctccaaaattagagaaaaaatagccaagctcaatcacttataaatcaaatcaagtcaaaatccccaccaaccaagccccagcaaattttaaaatcaaccccaaaagatcaatggaaaaactaaatttcaaaatcagaaacatatcaagattcaaaatcaaccccaaaagaagaaattggcatatataacacattagaaagggtgcagatttttcaaccagaaaaaatgtgtacttgaaattaagtcatactaatttgcaagtttttacttttgtatatcattttaatgttagtaatatcattagttttgattctttcactttttttcttttgtaatagaacttattttaattaaagaaatactaggtaactactttgactagtgtgtcttcaacattagaccaaatgattaattaataaaaaatatttatttctatttttcttttttattaagtaaaaattacttgaaaatcaaaattgaggtcaaagttgcacttaacatttttgtcaaaaaaaatttgaaagaaataaaaatatcccaatacctgagcaatgaaaccagcaacttgaacatatttgcacttcatatgccaattccaatgatatcccaatgatgagaaaaggcaccacaattcccaattccaaaacttgcatccaaaaccccgtcgaagactaattttaaaaacaacaaaataatatgaaataaaaaacaaaccaaaagtgtagagcataaaaacaaactgtggacctatattatttcacgtgcatccccactcaatcagtgaaactcatttttattgatgaacaattagttttgaaaaagttgaagtcgccacttattttattttattttaaaagggaaaataaaataagaaagaaaaccctaaagaaatgacttcatagttttggaaaagcaagtcttgaaaaacccgagtcttggtctggggatcaggttacttattgggaaggtgcctcaaataggtagcatccctcaaagccctaaagaggtctttaatgactaagttgaggtcaagtgataattaatcaattaattgaaggtatctaggtagactaaggtgatttcgaaactaacatgccaaaaaagaaatcaaatcacaattgcaaaagaatgttaggatgtgtacctggactatctctcaaacgctattataagacattaaaattagtacagaaatacagcacacgacatgtattttatcagagcaaatcgaatagacatctaggcatccaaggatggagtcaaacacagatatggtttacgacaacatgcatgttcataaaattccgaaaagtaagtgatagagagcatacctgaatagcatgtataattgataaaattcctctttctctctgagtgaaaactctttcgatgagaattctttccctgaaaaactaaagagagatattttggctcatctctcctcgaaaaccacaaagagaataaatgtgttttcttctttcttcgagaaacaaaaaaagtaagaatataattcttctaaagaaacaaaaaagtcttcacttaaaattattcctagttttttccatgaaacgaaggttaagactcttatgctgtgagaaatgaatagttctcatattcatagttccattcataacttaaggcgagaaatttgactagtgaaacaaccaagttggatcttagggcattttagaaggtatccgagaagccttattgttcatcaaaacccatcacagctgcagagttaatagttcttgttgttagttagcttcgtagctgtccgttccatatgattgattcatatataattacgatgcttaatccggtccacttggatatgagacataaaacaactatgataagtattcaaaattaatatttccactcacgcgtctccttcgatgttgagtcacattacaatgaattgaatcaaacaaccattccacctacttgagcttagctttttgataccatcaaatggtcgagaaggccatgcactggaaccgcataaaatccctgaaccctgtgtacaatctacaagtctaaatcaaacggttgaaagggccacccactggacccaaaaggcctcctcttaaccaagcttcactcccttctatgaattagaaatgtcaatcacaataaagtcgaaatacatcattttattttatcctttcattcatcacacatagcggggtagacgtgtgtcttattaaggttaacggacccatttcaaactatgcaacctatatatagtttatctgtatccaattaaacttattcatatggattcattaggtcatggtgaattttgagatggaccattacatgtacgcggagacagttggctgatgctcactcacggactcaatgattggtattcacctgaaaagcaaagtctccggagtcacattatcacacctgccttacatttttacgtatatgattttgtataatttagcagtgaacccaaggaaattgccgtctagatgaggtcgcccacctacttgactacttgttttcaagatatcaacccctcttcaccaacaccaacaactttgtacaaaatctcctgtagtaagtatcttggttaattattctaatatttttttatcttatttattattattattattatcttcttgttttcatatatcaatattcaaatatttttgaaccctcagatatttcctagacacgtttttgtttttataattttccaacccatgaaaatagaaagttcaattattacctcttttttccttgattcctaatagtttaatatttcatggacacaaaaatgaaaaaaaaattcccactgtatgtggagtagtgttttaatggccacgtattcatttcttgcgtctagaaaacgagaaaatgaagatcacaagcatgatctttaaatacgaggctgggccgagggcatagaattcacataagtgatcactttttccatctctttttcttatagcttggagaaacacaacaaaactttccaagcccaatggtgtcatcttcttcgattattgttttctttctttctgtttttattattctatgtaccacagaagctctcgtaaagctaccgaggaacgaaacatttccagccgtgctagt

SEQ ID NO: 13587 - DNA, 3805 bp, Vitis vinifera
  Intron number 12 from transcript GSVIVT01020920001 (locus GSVIVG01020920001) derived from phytozome v7.0 (chr-ID chr 5; pos 17177249 to 17181053 reverse strand)
aagtagccaaagtggttctgttggttaggaaaaggatttaggtttcatcaaaaggttgagataagccttgactagaatgggaggttcattgcaatttcagagttcttgctgaatagaagaattctctttttgctgatccctaggaagcttcttcgtttgttcttatttttgcttctttggggcttgttctttggatgggcttggtccaaccatctgggccattgttgtgaaaggcgttcctaaagtacgcctaagctcaaggtggcgcgatgccatgctccggcgcctcacttaactctaggtgccactcattgaaggaggcaccaaccatttgaatgggcttggtccaaccatttgaatgcatgggccatagttgtgaaaggcatgcttaaagcatgctcaagctcaaggtggcacaacatgctctagtgtggcatgcctaggcatgatgcgatgctttggcgcctcgcctaactccaagcgccactcgttgaaggaggtgcttcttcttctcttcttctctgacatgaatgagttgcaaaggtgagattagggtggtttttttattttttattttttttttaaaaaaaaaagaaagaaaggaagaaggggtgaaaactgtgttgttctgcaaaagggcacaagccaacctgacaccggccctttaaatgatttattaacactaaactccatatcaatctctaatatttttaagaagtatcctacccttggagattctcttaaccctagttgatagggagtcctacccatgttaaggtttagaggtggcaaaaagtgccttgatccatgtaataatcttccatggttaggcttctcagggaggattgaggtttcatctccaagagctgtagacagaggatatcttaaccaatattttaaaaacagaattggaccagtcggttcaattggtcaagttgttgactagaccttggtcctgttcgattcattgtttgggccgagaaggacttcgaactagccttgaatcggactgaccggtggttggaccctaagttggtgaactggttactaggttctggattggcaaaattggcaagcccattacattgggttgattggtcatcatgggccacttgggccttaagcatcatagcatattatgcttgaagcagagtaattaaagcttctttagtcctttagttttgatgtgggattgacgctagatgatttcaaacaaaatcatcataaatgatggatgagggcttggcattgagactttagattaaaggaatgagaaagataccactaggctactaattctatattgtttaaatttgcagactaataaaaaaatgacataattcatttaatttttttttgtaaaaataaatatataaatgatatatgtaaaataatataatatttaaaaaaaaattataaaatcatagaatatataattatataacttccaatatataagaaaaattaaataatagaaattttctttcatttcaatatatatattttcacatttaaatattatattttatttaatagcatttaaaatattcatacatttaaattgataatattaaagataaaaaataaatattattgatttttaatttctttatttatatacatatatattaattttttataattatttttaattttaataatgcaaaaaataatatatttataatattaccggttcaaccatggtttaactaccaatcataaccattaaaacatgaatcgatagcttttttgattcaatcatcggttcggtttttaaaacattggtctcgattaacaatgtcaggttggcctaaacttgccctgataaatgatacagggtctcagttagccgcatgatatttcttctactttggcattgattagggtggatgagctggagctcatagctcatcaaggacagttatcgtggtgacagaacccagttgggacattggtcaagaaggtggatcttttttaggatagcacatgggccaagactttcttaaaatcacatccttttcatttgacagtctagatagtgcctcctaaactcactacctcatagtagatcttgatttatctgattctagaactctgaagctgagttggatgagaatggacagtttaggaatttcttcttctaatttctatctgtgttgttaacctctctgctttggaatttgagacaaccatttataccacttgcatcactttctcctccctcattttgggattcaagtctttcccttacctcaattttggcagttctattgcaaggacaatggtggaacctcaagttctagtaaccctatggtgcacattgtcacttctaggtttctctccaatgttgctaaggcagctctttcctctagattctatcctatagatcctaacctttcttcccctgaaggcctgcccactgagggtattgttcccaataagatttttgatgttgtatctcttctgccttctgtgaacctcagccttatcaactgcagggataaagcacatgctttgggccatggggctaggatgtattctaggataggctggatataaatccttaagttctatgttgcttattagctgaattgtatgcaggttagggtataggagtaagaggagtatttaggaactttcacaaggagtttagaggagttcctcttaagtgttttacaactcaactggattgcggtttgcgcttcaaaagtttgaagaatgttgaggtttctctttgtttttagatttctattgttgggagttttctcttttgttcagtttgtgtagaaaggacctctcatccttcccttggtttcttctctttcttttgtatcttttctttctcctgtatcttttcttctatcaatatatttttcttctattaatatatttttcttcgtttctgataaaaaaacaaaaggagatcctgaatgtcgtattgttcaagaaactaagatgtaattgattgataggaagctaatagaagtgtattggaggctaagaataatgagcagatagatttattgccttgacatcatggagatttttgctctatcttcagttctttcctggatagtttgaggcttaagtccaagggagaacctttttggcctgacatacccagcatgatatatgggagatactttaatttcatcagaagcagttcggagaaatctggatattcttttttaccctgagtatgagggattttgatagtcattatgattttgatttttgtagtaaaggtggaacataactactctatctaacccataatgctttgctaaatgcatgtagaatggttttcaaatagggtgcttgtatttagttcatatgttgtctttcatgtaattatgtgatatttttgaatggggttgcagaagtagttttgtgataaaaaattccatttatatggctaatgcttaccatggcttgttgcagccgtgaagctgtcttcctttgttggggatcaagttatgctaccttaaaaaattcccattttgcttcatttgaaaaatgtggcctcttatttctagtctgtttgttcttacttatatggaaaaatgagtcattcaatcatgaattcttagatgatgaaacatgtgcaatccttagatacaaggcctaggatataaaagccaaagtaatactgctgaggccaaaaagagaggaaggcttatgacttagatagatggaatatactatgattccaattcctgaacttctttatattctttttttatgtggataatattgcaatattttaagtgcatctaaccttgtatcatattgcttcaggttcaga

SEQ ID NO: 13588 - DNA, 7308 bp, Vitis vinifera
  Intron number 2 from transcript GSVIVT01031407001 (locus G SVIVG01031407001) derived from phytozome v7.0 (chr-ID chr6 ; pos 19006023 to 19013330)
tagagagatctcagcggggaattgctctcattcaggtgaacagattaacccatttccctctctctttctctctgattttgaaggtattttacgttggcatttgtacattgttatgtcttagagcttcattttgtaatcattttgatattaatacgtatgttttggttggaaactcaaacaagaaaccctttatagatttaggggaagaagtataattttacattattgccttaattttattccctggttgattctgtcgtaattctccctaaagaaaaaaaaaaaaaaaatccctcttttttatactctaatgagtggatgcttatggtgaattgtgtttaaaatcaagtgcccgaacacactgaaaaagttagatttttgatccctaagatgagtgaggggaattagggaaacgcagtttgcttatgcagcaagtgaaattctactagttgaaccagaaaatgtgaggaaaattatgcgggaactaatgtaggtacatcttctgttgtgtgggcttgtattgatgacccagattggtagtgggggcatttgttaaaacttaattgtagtcttgcttgtttcagcatgaattctgaagaatgtttaatgtcatatgcacaaagaagaggtgttatcagtgtcaactgtcggtgtatagtgttctttttaccaaattatttaggctaagttttattttttgaaaattggtaggaaagaaagtaaaagggaaatgaagaaggaaagaaaaagtaaaggaaataaaatctaaatttaaagtcaataattaatttttatatgctatttgaaactctttttagttattttgattctttcatataaagattaaataatttgaaaatgtataagtttctaattaattttaattatatttgattttctttcaaaatcaaatatgagaaaatcatttcctttataattttttctttccgcagtactttcctcgaaccaaaaatagcataaaatgataaaattttgggattcccattccttctcaagtatgctgaaatttatttacataaactgcaaacaaaccaaatgttaatctccatggcccttacccgggtagcaatggttgatgccatattgttaagctcaataagaatggttagtttcatgcatacttatctttgagtacctctaagttataaagttacctagataaaatggtgacaatataggattaattgaaactacttgaaagtcaaagcattgtgttttgtcatcacttatgtagattacaggattttgatattttagtagtaaccttgattcattagtcacttaagatggagcttattttacatcttctataaatgtatttattgtagactaagagctcatttgtactggcttttataaaacacttgtagcataaaaagcgcttttgaagaaaaatcaagcatttggcaaaatttataagacacatttaaaaagttgaaaaatcacttgtagcatttcctagagaaacatttgatatgtgattctcttggaaaagtttcttgaaaaaagatttcaattaaaagcacttaaaatagtaacactccaaactcactctaggagttcctttgggagagattcttggagggttggaagcattttctaatgctttgaaaaaaatagttgtttggaaaagttttacaaatattatttaaaagtctagagaatcacttgacatgatttttggaccagcacttggtaggtgcttcttccaaaattcacttacactttgtgactcatatctaaacactaactaatactctattgaaaagaaaattaagcttccgagtgtttcatatatttcaaaaacaaaaagattacaaggaaatatataaacaagctgtacagaaaaataggaatccaaatagatcttaaaaatatgcaatacctaaaattactcacaaatctaagacttgcctagagtatagaatataataagatttgagaaagtaaagagaaatatggtcaaatctacaaaatcaaccacatattctaacactccccctcaagttatggcatagatatcatgcattcccagcttccaacgatataatcaaatgtgatacttgggattccttttgtgacaatttcttctaattgttgtttggtagtcacaaaaggtgtagacatctttccacttttaatcttctcctttatgaaatgcctatccacctcaacatgtttagtccgattatgttgaactagattatgtgcaatattgatagttgctttattatcacaataatcttcattgggtctttaggctctatatgcaattctttgagtaggatcttaatccacattatttcatatttgccttgtgttaatgcttgaaaatcaacttcaatgcttgatctagctacaacaggttgttttttactcctccacgtcatagattttctcccatgaaagtgcaataatttgatgttgatcattaatcctttttagaacttacccaatctatatctgtgtatacttcatatcattttcttaacaacaatccttttctaggagtagcctttaagtatctaagaatcccttgaacaacatccatgtgtcatttccttggtacgtttgctatattgggcctgatatgtaacaaataaataagctttccccctagcctcttgtatctccctttatcaacaagattttcatgaacatcggatcctaatttatgattgggatcaataggtgtgttcataggtttacaacctatcatcccggtctctttaagcaaattcaatacatattttctttgagaaatgactagaccttgctttaatcttgctacctccttaccaataaaataactcaaatttcccaattcttttttctcaaactcctttgctagaagatttttcacacttttaatttttttacatcatcacttgtaacaatgatatcatctacatagacaataagaattatgattttcttgagtgatgagtgtttaacgaataaagtatgatccccttgactttgaataaagtcatgttttcaagaacttcgtgaatctctcataccatgctttaggtgattgcttgagcccattcaaaggcttctttaacctacacaccttattgttggacaaattctcaaatcttggaggaaagtccatgtatatttcttgctctaaattcccatgcaaaaaaagtatttttcacatcgagtgaagacaccaatctagattaacagctagagataaaaggattctcatggaattcagttttgccatgtgagtgaatgtctcttcataatcaattctaagagtttgtgtctcttcgtaatcaacttccaacatgtctcctttgtgtattttgatttatggcaatattcataccatctattatctttgtctctagccttcttttgccatggtttgaaggaacccaaaggacaagtagggttaccatcttgagcaactttgagggcaaaattttgttgagaggctagtgctaacatgacacttctcctactttctttactatgtacataagaataaacttcacttaagcatggaagaggttctttttgaagtcctctacttcttacctcatccaattcgagcttaagaccagtatgaaagtcaaatacacgatctcattccaacatcttggccaacattgacgcatttgttgcagattccatctcaaagtgtttatgaagatccaactcttgctataacatttttagggtgttgtagtaggttgttattgtgagatctttcttctttgtcttgtgaatcatagtcttcaactcataaatccgagtgacatttcctttctttgaataggtttgtaagacaacatcccaaatttatttggctacggagagatataagattggttttccaatttctagtagcatagaatttagcagccatgacataatcatggaggtctcagcttcccacgattcataagataaatcaaacttctttggttccttaatggtaccacgtaaattaatcattttcttctacttatgaaaaaaagtttggctgattgggaccgcttaaagaaatttctccattcaatttttatgttttgatctgcaaagttgaattatctagatgagtgataactttaatttgagatgaagagaaattagtaagggtatttttaaagatttctgacatggtcaaggaagataatggacaaaaaaaagggtatgaaaaactgatggcaatgaaggccaaaaaaaacaaaaatttaatattggcaatgaagaccaagaaagaagattttgcttcaaggagagaaaattaccgcaaatttttttcaagctctaataccatgaaaagaaatgaagtttttgaatgattcatatatttcaaaaacagagagattacaaggaaatatatctaaaacttgcctatgtgttacaatgaaataggaaactaaatcagatcctaaaaatatacaatccccaaaattactccaaaatctaagacttgcctagagtacaaaatataataagatatgagaaaataaaggggaatataatcaaatctacaaaattaaccacatattctaacatctataaaagtttttttgatagaagtgttatagacaaaagcgctatgttaaaagtgctttcacaagaatcactcccaaacgggtcctaacattggttatagaactatgaaagttattactttgttcacatgctaagaatggcatttcattgttttgctcacttgttttaatagacattgatttgttcctattctttttggtttgtagtttatggtattccggtcttcaaagtatgccaacagaatctgataaatggggatggaaacatgttagtgtgtttggtgggtttgacaagggaagtggtacaaaaagatggaaatgcaatcactgtaatctacgatataatggatcttattcacgtgttagagcacaccttcttgggttcacaggtgtaggggttaaaagctgcccagcaatagaccggtcgctgagagaagcttttcagatcctagaggaggagcgccttgctcggaaaaagaaaagaacttctggaagtggaaagactggcaagcgtatccggacttcacaaccaagtgttacttgtgtctggaaaactattgcaaaagaagatgtagatgacatagtagccagatttttttatgctgatgggttggatttcaatattgtcaattccccctactttcttgaaatgaccaaagcaattgctgcttttggccctggatatgaaccaccaacaacggagaagttgtctgatttgtttctgagtaaagagaaggctaagatagagaaagccatggctctagttagggagtcctggcctcacacaggctgcacgatactctgtgtcaatcggttatgtcgtacgcaaggcaggtactatactaatatctttgtctcaagtccaagagggcttatgttcttgaaagcactagatataaatgatggtgatgggatggacaacatgtttgttgatgttcttagtgatgcaatcatggaagttgaacctacaaatgtgcttcagataatctcaaatctaggccatgccagtgaatcttttgaatcccttatattgtcaaagttccgtcatctattttggtccccttgcacttcacattctatctgtgtgttgatggaggacataactaaactggattggataaaacccattgtgttatgtgctaaggaaatagatgaatgcatcctgacgtatcaacgttcctctctgtgtgttctcactctagagagctctgatccactttccaccaagtttgccccttcatattgtatagtcgagcgaatttttgagctaaagcaagcactcctaggtgtagttgttagtgaagagtggaaacaatggaagcttactattcaagaggatgtcctcaatgttgagaccgccattttaggggacaatttctggagcagggcctgttcattgttgcagttttttgagccctttgtaagattacttactacacttgatattgaaaaatctgtcatgggtgatgtttttaattggcgggttcaggcactggaagctgtgaagagtaagggagtcgatgacattctgttgaatcaactggaattgctgatagagagcaaatgggacatgttattttcccctcttcatgcttcaggttatatacttaaccctaaatattttgggaaagggcaatccaaggataaaacaataatgaggggttggaaggccactctagataggtatgagtctgacagtgccaccagaagggttcttcgagagcagctgagctcttactggcgactagagggatcctttggggaggaagatgctgtggattgtagagacaaaatggacccagttgcatggtgggagaatttcggttttgaaacaccccatctacaaacactagctataaaaattctgagtcaggtttcaagtgtttccatgtatcaagagacttggcaagataatgagtttttgtgtcaaacagcagtcaacgggttgggagtggagaggacggaagatctagtgtttgttcgaaacaaccttagacttcatagtcaaagaaatgggaattcaagctcttcacccggcaacaggaatcaaagttcaagcccagcatctggagataagacatgggagagtgttcatattgatcaaatgaaggggatagtaaatgtccataatatattgtaaatagaaactactactatatcgtcactctacttgaaacctggaagagaattacagcagaaatagtgatgcattgaagtcatgaattagaaagcttagtttattgcttctgtggacaacatacaataaaacctggcactggagaacagaaaaaagccggtttgtttatgatatagtctcaattgatgtgtcctacgtttccatctaatgcaggtgtctttctatgtatgtaaattgaaatgtatctcctctgtgtataagaaaaacattaggaaaaaaagtaacccaattttagttcaattaatacttctaattgtcattattagggagagtaccgtcaagatgagtgctgactttacacctgtattccattttgagagttcttgtgtgccttgaacacaattacaccaactccttgtaaaaagtgcttgtctatggtgattacagggctaacttctatgttgtctttgtttgtcatgttcttttatagttcccaggcagctgtttcttcagcattcttttttctcaatttgtgtctaaaaaaatcgtggttttttgtatccctaattattgcagcaaattaaaattttgaattcaaaagaatttcagaag

SEQ ID NO: 13589 - DNA, 14172 bp, Vitis vinifera
  Intron number 1 from transcript GSVIVT01035785001 (locus G SVIVG01035785001) derived from phytozome v7.0 (chr-ID chr4 ; pos 4265765 to 4279936)
cttaccagaatcagtgtcaaacgcattcttatagtgttgaaaaatcacttatagtatttcttagagaaacattttatagacaattctttaaaaaatgcttcataagaaaacactttgactaaaaacactttgagtagaaatactctcaagcatactcttagtctctcatatggtagttttcacacttacattccataagaaaaactaaagaaatctatattgaaaggtaaataagaacaaaggtccaatgaaatctatacacaaaagcataaaagccctcctaacctaataaaaagtatttatatcataaccttaaaatgacatttaacacattttcattagccacataaaccaaagtattctttaaaaaccctcattcactaaaacaatctctaaaattataattttttatttgaaaaatgcaatagtctaggtcaaatcaattttgtacatatctgaaattaaaattttgatgtgaaaccgatttctcttgaaatcttgaactcccaaataggtttcaagatctcataaatcaaaattttgatgccacatactggttgctcctccacatgttattctcaaattgatttgaaatcagaaaaccgatttgacacactaccttgattgaaacatctatcgttgaaattgattttttttttttaaatcgatttgttatggtccacactaattttgcattagtgatggtagttttgcggactatccgagtaacccaccctgccccactcctattgggatggttatgctcaatgataatcaaggatgggatgggtttgggaaatttttcaaaacccgaatcgggtttaaggcggggatgggttttgtaccaccccaccccactcgccttaccaagttacaaatttagcattcaaattttataaaatatcaaacaacttcctattataaataatgtcttttttcatatttgcctcataccagccattgctctcctctcatctctacatattgcccatttctacttcaagcttcagaaatccatcttcaaggataaagccaggaagagcaacaaaatcaagaaacattcatgaagaaacccttttctcttcttcaaatataagtggaatcacaacgatgattggctcgattgcaattgcaacaacttcgatattcattgtcaaagccttcaaagcctccatttcaagccctcttttctttagaaggtttgggttttgatttggtttttaaccctagttatattttagggttttatccaattggattgtgtagaaatatttgatttttatggaaattttttatgatttttcctttttaattttagttttggtttgataatcaactttcatcccatattattccaagtgtgaatctatctcaagtctcaaacccattcttttttttttttttccaatattttcttaagaccattgtggtctctccaaatttttttggtgttttttgctttttaagaaaagtgtataagtatgaaaattgtgaattttttcattgagaattttgtgaattgatgtaatgtccttggttttgggaaaatcatcctcctcatccaaatagaaatacataactaggttgagatatgcgggaatgggtttatcattttttctataaacaaggatggggactcatcaacataccccggctcgggtttgggacaaggatggggaaggattatataattgggatgggaataagataaggggtgcctcatcctaatcctgccttgttgctatccttattttccatgctattgttgatttttcttgcattttcttttcttagcactttgtagctactacttaggtctcctcctaagcatactcatacctccattccatcacgcatgctagggttgtatcaaacctctcacatcttctccattttctaacttttcactcaaaaattgtatgttatacttaaatatggcattagtacaaatctaagccaaaggtagtgatttgtctaagttcttctatctaaaacaaagccattaacatttttataagtttgaatttgggcataaatcatccctctcaattttatctttactagtccttagaaaaagtaaaaaagcaaaaatggagataaaaccatccatgcaagcttactaagatgatatattctcaatacaaaagtcatccatagatataataattcaagagttaggattaaacacaatgtaagtagctcataagtatgtcaatcttgtacctttacacacaagcatgcatccatgtttagtacttacctagaaagcatcacccatactcttagaacaagatctaattccctaatgatgtatgctcataaactatcgttgactcaagtttatataacgaacaaagtgttgatggtttcaaactagttgattttgaggaccacaatataaatgcactcgaccggtactctctcaggatgcttgctcaagcttacaaaaattcaaataaaatcttcttgaaataccaaaaaaaatctgcctaattctggtggattcaggacgagtacttgagtgcttgagcgttggataacagcatgagtggctccaccacttgagcatcccttgcttttccaaaatattaatttaagtatttttaattcaataaaaacatactattcacttaaccctttaaacatctcacttgtcacaaatcaaacatttttaaacttacctataacttttcagttgattgaacaataactttaaatcttcaatgaagagtaaattattacctaaaaagtttcttaaactaaaaaataaattaaaataaaattaccaacaaataatgtagacttattgtcctaacacttgagaattttaagaattactatcattatcatttgattttggtttaaaaagttagatgttcttaattcctactagcgcaaatgattacacccaaaaactaattttttacaatttgtgattatcttaatgttttaatttatctaagtataaaaataaataatcaatcaccttaagaaatgtgcgttctacacaaggttcgaaaaattggaatatttcgccgaaagcaaaatattggatatcggaggtggctgaaaacggccgccgattattgggctgattttttggcgaaaaaattcagaagcggctgcaagcgcgtgggaggatctcacgcaaaaaattggctattttttaaaaaatcgcatatttatcgcggataaatcactataaattgggcaatttttttttaaaaaaaatcgctgattttaactttttttttttttaaatatttatcctttttattttttaattattcatttctaatttatcttttattttaaatttatactattattttatttttagctacttttcatatttatctcattaatcatattttaaaaaatcaatatcactttaaaatattaaaaatataattttatttaaaaattgttgaaatataaaagttttaatattttataaattaaaattaatttgataagataaattattaatataatttttaataattttaattatttaaataaattaatgttaatagaaaaaattgtaaacacaaatttgtaataagattttagaaactaaggtagtgtttgttttttgactgaatagaaaaattgatatcaaacgggttacttttaatttaatagaaaaagtcaaatattttgactttttttattcaagcaaaaaacaaacatcacctaaatctcaaatgaattattttatgtagattaatttaactttttatttaaaatgtattaatacatgttttaataaaagttgtttttaatttttaaaataaataaatataaatatattaaagaaatttaaactaatttttttataaaaaaaattcataaatattatctttaattatatttatatcaatttgtggaccccgtatttcgctcatgtgcttcactcgatggggagctcgttttttatttaaaaatgattttatttttttaagaaaataacttggagttgccacttatttttgttttatttttaaaaggtaaacaaaataagaaagaaaaccttgtttttgaaaaggtggtttatgaaaaatcggatcagggctaggttacttattgggaaggtacggtaaaaaccgtagcacccctctaagtcccaaaaaggggtctctactaataaaatgaaacaatcatggaaattgataagtagatcactagataccgaatgaaaaatcaaaacaaaatgcccaaatgaatataagaggcaaagaacgtacctgagttatgaacgaatttatttctttggaagcaaaggttagtgaataaacatagaagcatatcatagaacaggacaaatccatcacgtataacaatcaaatcaatcaatcaatcataaaatcacatatgttgggccctcaccaatgcccgatcgatcttgtatgaattaatcgcacaaattccattagtttggaattatgaaaattgtctttgtgcttattgagaatcaagaagaaccggagattatttggaaaccagagtggacttaaaaccgtttaagagaaaatcggatttttgaaatttgcttaaaaattggagtctcgaggatttgtttgaaaattggagtcttgagaattaaatttgaagattgaaaatttagaaactgaatttgaaagaaattggaattgacaattatttgagaagtagaaactgtgaaaattttattatataaattggaatctttggaaattgttcgaatcgaaggtggaattcttttgaaaataaacaaataaaatgagaataataataataataataataaataaataaataaaataaatgtgaaaattggtattttggaaattggaaattaagttcgggaattagaaaactggaatttcaaaaattgagagttgaattcaggaattggaattttgaagggttatttagagaaagaattttaaataaatgaataagtaaataaacaaataaacggaataataataataacgaaaataataatgattagattaattgtgaaaattggaaattgaatttagaaattggaaattaaatttggaaattggaaatttgaagaattatttaagcagaattttaagtaaatgaataagtcaataaataaataaacagaataataacaattacaaaaataataatgattagataaataattgtgaaaattggaattttggaacttggaaattaaatttggaaatttgaagaattatttagaaataaaattttaaataaataaaataataataataacgaaaataataattaaataaatgaacgtgaatattggaattttttaaattggaaattaaagaattttgaaaagatatgtaaggattaaacataagagctccggcagatttctgaagagcgactgaggtgccgctaacgtggcaagtcatgggaatgtcgacatcgcccaggaacctaacccccaccatgacaatcgggatcgaaggacggcctccggtgaggtggtgcaagatggacggtgtttcggctttgctctcttattctaatctttgctttcacgttgtcaatggtgtcggagcttgcgacttccaaagtaaaagtatttccggtaagggttttgacgaagatctgcatcttgagactttgagagagacgttctaaagccgcaaaagagggcaaagagggtttttctgatggctttgaatatatggagtcaatgaaggagagaccatggagatggcagatgtggagacgggctctggggaatgaagggtggattagattaatatgaggtgagtatcagggttcaaagtatcggacgagtcgtatccgcctcgacacctgccacgacgagaccagatacggtataatacacgaactcgactgggaatcagttagactcgactgacttatttgagtttctgagttaactcggttagattatagagaattttcaaaattttcataaaattaaaaaaataaattaatcagagattgcccttccaaaagcaaacacctattctgaaattttaaaccatcaatgagaagatcaaagaagatgaagaagaaaaaaccttaaccgaagaaaccaccaaaggatgagggcatgatttaggatttacttacttgattttcctcaaaatcgagcattaccagagggtggagctttggtgtcgacagtggtgacttgtgaagtggactgaatatttcattagcgacgtggacaagacaacccctcacaatcagattgctcctcctcccatgttaggaatggttacaaatttgcgattgcaagtggtgttgtctgttgtgggtcttgacagcatggtggcgtgcgagggtgggagattgggagctttgttgtgggtcttgacaacaatggtggcgaggacgggagattgggggcttaaattaataaagtaaaaaaagtggcttttatatggatttacatggagaattaaggccaatttacatggaaaatacctttcatataaacactttaatatgatttaataataactaattaggaaaattaagtacctatgaaaggtatatatgaggtttaatgataaattaaaatatttatatggcaaagtgataattaaatcctcaatttttaatattatcataaataactttgagctaaatgtgaaaaaaaaattgttttattaaaattttcagcttatttaattataactattttattttttaatttatataatatttttataattttttgaaaattttaattatcttattttacgtatcactcgataccaaaccgagacaccgataccaatatgccttgtgaccctccgagtcaatgaccgatactgcgactttgaaccatggtgagtatggcgtggttacggtggttgtgatgtatggagatttagagagaggaatgggtacgagggactcggtgggtgctaaagtgaaaggatgatggtggctatgtgcatgggcctccatgcaggtggagaataatgcaaatgggatgaaggcgggtgtgatgggtggtgggaatggatagtatgtagggtgaatgatgacgggttttgaggatgggctcggttatgtggggggtgaggaactattgagtgcatggttcaaagttgcggtatcggtcattgactcggaggatcccgaggcatatcggtctcggtgtatcggtttggtatcggacgatacgtaaaataagctaattagaaaatttaaaaaattataaaaatattatataaatcatcagaaaaatatatacaattaaataaactcaaaaaattaataaaataaaattgtattacatttaacattatttaaatagttataaaagtatttgctcaaagttatttataataatgctaataaaaataaatatatcggtctcgaaatcaacttaaagtcaactataatcaatatgatctttagaggtaagatctatagacgggggtgcataaataattttttttttatcaatttagactaatacatcaacataattattattttaagcaattacttaaattattaacctccttccgaggtaatattaatacattattcttatatgattctttaaacaaattttaatttaatttttttatatataattaattttaattatatttgatttttttttatatatatttttataaaaaatcatgcatgaaaattttatttttcttaatatatttttgaagaaatcattttttttccataagcttaaaacaccaaatttttatttttttatttttttatatagaaatacatggaccatatgaattgaacttgggctggcctaatctggtgggctgaacccgtaaaaatatgtcatggtgctgagccacataggatcaaagacctatcttctcctatcttccctccactgaaagcagagagtgcgatctgcagagagtgaaaccgccatggccatctctctcttctcctagcttgccctccaccgtggacgctcacgacgttggttctgccggtggtgccatcaaatcctattttcttcactgcacaaagctcttctctgctcccaaactcggaatgagggttgtttagctggtgttcagtcaccgctgcggcaccagcagcgcaccaaagatgaaaaatcttcactcctgatttatctaaaaatgttgattcttgttgtgatgggtttcagaatctgttgattttttttttttttttccgagtccaccgagttaactcggaatattggtcgagtcatccaagtccaaccgattcaaagccgagtttaggtataaaatgtatctggtatcggactcctcgcggtcggcgtcgaggcggatattactcggccgatattttgaaccctgattgagtgcagatgaaggtgagactttttggtggcgatgctgagaacgaaactttcaagaggaacaacaagaaaagagaaccaagaacgggagtgagatgaacccatacatgcctcatttcttatatcaaccaatcaactcgagtggccaaaacgaatttcaaaggggtttcaaaaagtaaaaaacaagacatgaatggcagtgccacatacaaaaactcaaaacaaagttcgaaaaacaggttggaactcaagcatagtgcaggtgcaagtgagctcagattccataaaaatacatgaatccccaacacgtacactcaggcatcagaatgaaaatctcctcatgcacagaaaacatcctaaaatggtataaaaaaataaaggaatccagtttgtagagtctatacctgtgttacctgtgttattccctttcccaaaatctccagctatcttccaaacgtccccccttgctccccttttcatatgttcccccctcctctccagcaaaaaagaagtctcctctaatatctctcaaaacccctgtttttgtctccccccgcaagccacactactcgctccatgctcagggaagatgtcatcctcaaccaccaccatggccagccatgccatttgccacacgtccacgcagctagttttcctctagaaagaggtccccccactaaaaaaaaagatcgaaatattcaaccatccctaggtctcaaaacaaaagaaaggtcccccctttaaagagtctacacaattacatttacaaaataaatttaatatgtatattctttcttattttatcattttgagttatttttattcgctcatatttttattaaaatatccaccgatatttctctcatattttcaatatattcataaaatccaagtattcacctatatttcaaactttggttctaattatttcacatacagaatctcaaaaaaaaaaaaaagaattcttacaaatataaaatcatgatttaattgattacaaattaaatttactaattttgaaaaaccagtttccaaatctaaaaaaataaaaataaattataagtgcaaaaatcatggcttagttgactacatggtaaatttattaattttgtaaaacaagaacatagtttttcaccggtctcataggctacattatttttagggacttactctaaccaacatccacactatacttttacggccttggcataacatgctatatatactttagtggacaaccttaactccttggtgaacggatgccattaaccatcaactctactaaaaaatatgacaaaatctaagagtttggagatattttaatgaaggattgataatttagaactataagcatgtaatggttttgatgcaataaccatatttataaagaaaaattcttaatggttgaattgtactatcaaacttttcaaaacataggtaagtataattataaagcaaaaaaaaaaaaaaaaatggaaagtataattataattttttttatatattaaataacacatatattggtattatatatatatatataaatttattttttaaaacaaaatattttattttataaaataaataatattataaataaaatagatgagaaaaaaataatattaattatacctcaacttatatctcaacttgtgatcaacatatattttagaaaggatattaaaaaagagcacaaataatatatttcatcacttattttatctcatcttcgtttgtttcttattatatcttatgttatctggtgccaattcaaaactttttccaaaaaccacttggagatcataaaatcctattagaagtagaaagagtaaggttgcatccttgaaatatagagtctgtttgataatgattttaagaaacgtctttaatttttttaacacttgaaattttttgtcatttaagtattaaaaattttagaaacattttctaaaatccttctcgaacgcactcttacatgagtatctccgttctaattttgaaaagataacatatgagatgagatgtcaacattgaattaacatcgaaacggtgaaaacaccaaaggcttccaaattgattttgagccacaatcatatatgcattcacacttgttgtcaaggtatcaacatttctgctaggaatggatacacaggcatgcaggagtattcataatcatacctttgatacaccaaatgtactcttctgtttgctctccaagaaaatgttccttgttcaaggagaaagtgacccttttgtttataaaataggattggcatcagcagagctttgaactggtcagctggatgagtacatcatctcactcataagttaatacttattcaagttgtacatgaggaatttaattttcatatacatgatcatacgcaaacgtctcttgaatatttgtaatttgaaaatttaagtagttcttctaaatgattttttttttcttttgacttttgccttgctccttccaagtccatattgaagagatcatcatcttagccaaggtttgacagcatgcccaagagtggttttgttcttggagctgagaaaaaaccattattgttcttcttacttagaatatatatagctctgaattaattttccttttagctcttaccaattctgaatttgggtttggctaaaaagtttgaatcaaattgagggtggatgatattcctcagtgaacaggattgattgttttgaatttgtagttcaaagttcactgctcattcaaaaatagcttcattactcgattttctcttaagtgcacatcaccttcaaaattttagacattctctctgtttctttgaagctttaccattacatcactgtattaaaaaaaaaaatgctatatatgaaatgtctgatactatatataggctttcaagcagcaaactcttcaaacagaaagtcaatttttctcacaagtcctccacctgagagaaaagaaagagaaaaatggaatcagagagaattttgcttgcattttctgtgtgtatctgaatttttgagctgcaccagcactaaaattcattaacccaggagtctttattgtggaataggttggtggcaatggagagtggtgacattagcggagtagttagtggacgtataattgtttctaacatactgaggaacagctccgtggaagttttctcgagatcttctcgggaagaagatgatgaagaagccctgaaatgggaaacaggatcaaagttgtaattgtcaaagtcgtaaaaaatgcttcaggcccacactgccacaaccattgtgacaattgaggtttgccaatgactgttagtttggaagaagtggggatgaccacgactaggaaaatgttgaattccacgtaatccaattttaaagttaacttcaagttttaaaatatctgaatatatacttcatatatcctcaatatatcaaatatctatgaatctcgacaatatccatcaatattcgaaaattcggatatttgaccactatttcatagatcgtttcaacctatatttcacttatatttttggatgttttatcaatattttattttttctattctttgaattgttacatttgatttaatttattatcaaaaatataaacacataatttttcctaatatgtttttttatataatctatatatttattaaatataaaaaatataaatgttaaaaaaattatacatatattattatttaattgatatcatagaatacatttaaattaaaacggatcataattttaatattaaatattttttaaaattagacatattatccaaatattattataaaataatatataatacaacttaataataaatgtatatttataaaatttatatttttattgatgtaaattatatatatatatatatatcattttttttaaaaaaaaacctataaaatgtttatttttacttcttatataatttttttttagaatttttcttaatattttcataattttcattaattttaaaccaatattttgtgtcaaaatatttgtcaatatatccgttattaccaatattttcatcattgattaactcaatatcccactatagagtcaattacattctagtatcttgtaatattaaaacaaaaagcaagaactcgaatccatgacctactagtcattttatttggatttcctatgaaccggtattcatattatgaggttaatgttatcaacttctcaagattacctttataatctttaagtcttgaattcttctattatgtgattatttgacatactctagctcataaagagtgcgtgtcaaattttaattaaggaattaattatggctataaatttcctaatcacatgtccttatgattacctaatggaccgtgttgtcttaaattcataagatatcatggttgtctatcttaagtacatccattatcatcggcctccatcaacagtaacccaatctatcaacaacttgcatgacttttgattttaatttacatatgacttctaattatcaaaattaattttacattaacttctaactacataataatttgtacataacatctaacaattgtggtattaaatgagagttgaacaaagtttttggcatgaccaaataagataatttgtttataacttctagctatatataacaaaataaatgctaatagaaatatgtgacatatattctatagtaataatctcaaagtaaggatcaaaaaattatctcaaagcaaatcatgtcaataacgtgttataaaactaaaaacaaactaaaaatcttgtataaaggagagtttaagatgactagagaaagaatttcttttgatatataactatttgaatatcaaaatgcctatttaaaggtttacaaaatcacattaattgatacttcctaattcaattttaaataaatggaacaataaatataataattgtgacaaatggatgagaggggtaggtgttaaccaaactacgcccacacccaagtataaaataaagaagaaaaaaaattaacgtggttcaacgatcaatgtgatctctagcgaagcgcaactcccgcaagctaatcaggtggcttgaccccagacattctgagcaaagcacaataaaattgacttagacttcataatccaataatagggtggtgaaggtgatggtcatccatcgtaacattgaatgcattaataaatacatttacaatggatattatattttatggacgaaaactacattacccaacttcatgtgatatgggccaaacaataaccaattaggaaaattcaacattatgaattctttgtttcatttttcatttttggtagccaagcaagcaaaacttagattcataccttatccaaacatgttatggtaaaacccaaaaaagtaaatgataaacactactaagtgaagcttaatgataaattatttctttctttagcttctttcccaagtaaatagacaggaaaatgaggggaaagacaagttgagtgaagctgaactggcacaaaagtaggccgacgtcttcttcagtatattgaattagagtaacacaaatcaaacaagggtttggtatattatttggcctatcgaaactgttatatggcaacatcaaattgtcaaaacaaactcctttcctaagaaattgaattgagctgtggctgccgtcagctgaaatctctcttaacctatgtattcttttgtttgctctccaagaaaatgcatcttgttcaaggagaaagtgacatttttgtttatagaataggattggcatcagcagagctttgaactggtcagatagatgaggaatttgtcttgctccttccaggtccatattgaagagatcatcagcttagccaaggt

SEQ ID NO: 13590 - DNA, 1985 bp, Vitis vinifera
  Intron number 4 from transcript GSVIVT01027610001 (locus G SVIVG01027610001) derived from phytozome v7.0 (chr-ID chr1 5; pos 15066697 to 15068681)
aggatcaaggtgagatttatggcatgttacccatataatcgtgaagtaaacttaatatttttatttactgttaattgttccatactgttttttcctacctatgaaaggaactatgtattttaaaggagattaataacatgtatgtatgtacatatccatgtaatgaacatctaattgtgtgtgtatgtgtacctctatttatttatttatttgttctcttcttctttgctttttttttttttttgtgattaataactatgttgctcacttgctcttcaagcattgtaatgattgtcacattgtatcatatcaaatcgcaaatagttaaatattcttgtttcaactattgcaccttcctatgactaccctgatgcctttggatatgtcattgctagatcctgggcctgtgcattagctgtttgtctggctgtgtacagaagagggcatgcaattgcattacagttcatgtttagctgttcctttaccctggtatttattaattgcatttcattagcattctatgcctctaggcatgctctaatatcaaatcaacttggtcccctacgtaaagcattcctgttgaagcttgtcattgcttgatttcttaaggtatcgtaacatgaatctatatttctgtttcaaagtagtagttctatcttattaatattctgagagataaaaattgttagtgttaatctcaattgtcaacaacgttataggggcatgtgcaaggaaattctagatactgccatcgctatacgattagtaacgaatcttttgattaaaacccacttagaaagtgccaattctttctctactaggaaaaccaatattttatatataagcaccaatcaaaagaaggagtgcatctctaataggaagtgccaattgattttaggagacatctacaggttcttgtgtaggttctgccgatcaagggaggtgtagtggatgaatggagaaggaacagaggcaacatgctggcttgaatgtatagtaaagcgtagtctgggggagaatgaggatgagctgagagcacagggagggtgtttctcagaaggaagtactccagaaaatctgaagtcctggggtgctacatgggcaattttgctcgtcagaaccaatagcagcttgatcatgctgttattacagatatctagctgctcagtgctagatgctgtgttagaaaggccagttaaggctgtgggttgacagtgtcaccaaatggaggttgcagctgagttacctacagggaaaataattgctccattactagaggagaactctctttccctacaagcgagtggtagaggttgatgcagcctcagtgggctggggctgctttaacaaacatgtaaataaaaaggcccctccaggcattctattcgttggagctggggtcaatattacttgccattgacaagttccaagcttacttagcctcagtcatgctccccaagccagtgtctagcaagtagccttatctgtggtgcctggtgttttgtcacactggcatgcagtagtcctgaaggaaaagaaggcctttgccagaaagtcaccagggaaatgaccttggagacttcaggattgtggtgctgttgttttttgccaagttcagataaggcaccctagtgcaggtgatcaaatgggccacatgggtattgccttttgatgggatgggggggggagatcatgccatatggcgctttgtgatgccagagtttgcattgtgttggaaccttgtgaccttctctaaccaacttttgtacgcttaataatgccagaacatcttattaattactatgtaattgccattcttgcttatatgttttggatgcttccttcatattcttatgtttgtgttcttaattgctattacgttccaccattgcaacttcatgcatacaagtgtaacatcattatttgaaaaaaaaaaaaaaaaaactttgaaattcattttgttccaactttgatatggactaggt

SEQ ID NO: 13591 - DNA, 14519 bp, Vitis vinifera
  Intron number 2 from transcript GSVIVT01029404001 (locus G SVIVG01029404001) derived from phytozome v7.0 (chr-ID chr1 7; pos 16437516 to 16452034 reverse strand)
atttcattgactctagacagcaaaggaactcaaaggtttctttctttcctaagcttctggctgcctatgctatatatattttttttttgattggaacctatgctatattttcatgtcaccttctttttacgctaaaagaatttcagattcttagttgcattaaatgtcgaatcttcaatctggataggtatcatgttgtgtaagtttcatgatggaattttaattatatttgctcatttggcttccactgaatgcaagtaaaatatgagccaaattgaatatcaatgctccaaattatggcttccttgctaaatgaatttgaagtcctttgatttagtttatattgcattactctataaagtatatgcattaataattaattattgcacttgtaatatctcatagaacatcttgagaatatgatggcatgtattgattgatccagagaatctcaattttcactttattgaactttatggcctaaacatttgacatgtgatgcaaattagtgccctagcatttcctatttacgtaggttgccaattgaagagtatcttgtggagctgacattaccataacatggtcaagctaatgatccttgcaatgatgataaagctattgttgtcgtaaaagggagttctggacagcctatatttggaatgaaattttaaatttccgttatatgcttgaatgcttgttttttgaatgatcatcttatcttttgatagagtccaaatattgatgtcacacttactgcgtgtgcatgcacagcactatgtaataatgcaaaaggttaatataccttttggatgtttggaaagctgagatgatttttattagagattgagctgtccattttttcagtggattactccaagactactgtaactgcggcagttcatgtgctgtaataccatactaaagagaaccaaaaaaacatataaatcagctatcgaaaggcttcctttggactgttacttttgagatgtggatcataaaggaaactttttgcacaaggatctcgagggggaccaccttgttcaacagaagggccacagttatctgtcacttattaatggatgagagcattcaagttcacggaaaggaatgtgtatgtatcaagtaacatgtgtttttttttttctaatttaaaagggtgcctatttgtcactgtaattgtaagtgtttatgtaaagatgggtggatcaatcaagtttaaaagagagtaaatgattaatatttcagagagttatggtttgaggaagggttgaagtcgaaattgaaattggagagaagtagagaggaagaggtctgttgaaggagctgctgtgagtgaaaacctagagaacataagtgtgtaaacatgttcttcaatttaatattgaggaatgacccttttattactattgatatcagtacaatttggttaaacaaataaaggaatggatgtgtacaattcttgcagataagtactaatctttatatagactagataactggctacgtttcctagtgttgtataactcttggagataaactacaattcttagagataagctgcagttcgtgatcatatttttagtccattacacactccttcaagcaaaataggaacttgtgtcctttcagcttgtcttgtaacaacgaacttcagtattgaaagagccttagttgttgtgttgactgttttttcagttgtaggcacatacctgacttctaggtctttttggagaactttatctctgggaagtgaacatcactttctatgtgttttcttcttgtgtgaaaatggggtttgctgcaaatgaggtggctttaatggtgtcctaccaaataactggtgttgatggaagtttgactagtaattcttgcagtaaggattgaagtagctgtatgagcaagagctctgtatccatacaatgtgctggggcatgccaccactttttgcttcttgaagctccacaacactaggttgttgccaaaaaaaacacattatccccctgtagaccttctgttatccatgtttctggtcctgtcagcatccatgttagctgcaagagttagcgagctagcaagcttaaggtttatgctgtggctaagtgtttcctttatgtatattagaacctttttgcctaatcccagtgaatgatggtaggctgttgaatgattgattttgttgataataaagactatcttaggtcttgtgcaggtgaggtattggagagttcctatggtgcttctgtaaagagtagtttcttgaaaagtttcaccatcagtattggataatttggcagtcttgctagccagtgttgattttccttttgaaccattcatttcggttttcttgagaaggtcaatgatgtatttggatttggaaaggtgtagatctattgagttttggaatgcttcaatccctaggaaatgctgaagctcaactaggcttttaagtgcaaatgccttgtggagggagtgacaatcgacaagctttgattatactttttattgtttcctgtcaataagatatcattaacatggagtagcgctagtattagttgcttattggatttgaagatgtaaagtgaagcattttagtgagaatttgtgaaacctaattcaataaagctaatatgagtttctcaaatgagaccttgggtgatagttttagtccatacaataccttatgaaatttgtccacatgtcttgatctctgggagttaatgaatcttagtgattattctatgtgaactacttatagtgttgtatgcacaaattttgtaaaagtctttcaaaattagcaaaacaataggaaaaatcatgtgaacaaaaatttgtatttaaattaataattgtggggtacaaactcagatataatattctttacaaaagaatattttccctctgattttttcttttttatcacaattcaaaaaatgattaagaaagtgttttcttggatttgaagatcaatcgatggcccaaagtggcttttttcctgaatgaattttttgaatgacgaagaacatgtgtgtagcacttctgccatttattaaatttgtagggatattttatgatgccttttctttcttttgaagcctctttaccggtttgaagtcgttttgcggatctcgtttttcctaatcccgatttttctgattttgttttttttttttcttatccacttttttgttgatctcatttttctgatttttcgtttttgctgatctccctttcttggaggaagtcacctctatttatagttgaagataggaaattgaattttgaattccctatatttagttgctcaattcaagggatttggttccttgattttagcaacttttctctttcccgaggttttatcaacaagttaatatatatatatatatatatatattttattattatttagttggaggttagtttcccatttttttaggaaacttctcaataagagaatatcttttttttttttttaattatcttttgatttgaagacctaatttcatagtcttccaaaattgtgccacgagttaccgtttgagttgcatgtcatgtgtccagttgagctgaaatttgttgaaccatgaaattacaattttgaagaccaaatttagtggtaatttaatccactatatatatttgatgtttacaaatgccttcactttaagacacaacacgtacatgcattgtcacatgtatgggtgagtcttgtggacaatcttcaaaccaattcgaggaactctttcatccttggacgattttccaacttgtaagtcttacttagtcatttttttaatctatatatataaaattcttggagcacaggtgacactgagcacgttagcaagtatggcacgccatagtggagaattcatggtggtgcatgccttatagctcttgtgcaatggagagcataggaatggagagggccttagtgttctcgtgtgaagaattcatgagaattcatgggatgcatgccttgtaatttgttgtaatggagagcatggagcctttttgtataggtcatggagcctgtgattgtgacatcttgtcatgcaaattatgaggggtgccttgatatatatatattctcatatattctttagtggatgtttgtgtatatatattctctagtggataacaaacatttacgcgtctttatatatacatatgctctttttttattttttgaaagaagcaataagcttgccttccccaaacatgtgttgatctccatcacttgtagagacaaatttatttttaggtaatttttttttaaaaaaattaccttaacacttgaagaggaatttttaataaacttaaatattaaaaaaatataaatatttaaagtttgaccctcatgtaatcaagttgtagccctgatgcaaagtgatgttgtattttcaatatttatgtgctaaagtcttcattcatgcgaattggtttgatttgaatgcatagtgatattcaagttttaacatttaattaaaactgaaattacatttaatacctttcgaaatgagtcatagctttgacgctatgaggtgatgtatttttagtatttaatatgactcaagtgctaaagtcgtcactcatgcgaattgacttgacttggatgcatagtgacgttcaaactttaacatttaattgaaattggaactacagttaacacgtatgtaggtaagtagtaaccttgatgctatgcggtgttgtactttcgacactcgatgtggcttaagtgctaaggtcctcactcatgcgatttgacttgacttgggtgcatagtgatgttcaatctttaatatttaattaaaattggaactacacttgacatctatgtagacaagtcataaccttgactctacgcggtgatgtattttcagtatttaatacgactaagtgctaaagtcgttactcatgcaaattgacttgacttggatgcatagtgatgttcaaactttaacatttaattgaaattggaattacatttaacatgtatgtagataagctataaccttgatgctacgtggtattgtactttctatacttgatacggcttaagtgttaaggtcctcactcatgcgaattggcttaacttgggtgcatagtgatgttcaaactttaataattaattaaaattggaattacacttaataattatgtagacaagtcataactttgacgctacgcggtgttgtacttttgacacttgatgcgactcaagtgttaggtcttcactcatgcgaattggattgacttgggtgtatagtgatgttaaaactttaacatttaattaaaattgaaaccacacttaacatctatatagataagacataaccttgacgctatgcggtatacaacttttaacacttaattaaaattgagtccatactacattttttttttttttgggtgatggggattgaacttcggtaatttctccaagttgcctatctacccttcacagagaagggatcaagtcaaacgtagttcaaattttattttatttttaattctttttatgccctaacttttgtcaaaactaatgaatttaatcttgcgagcatgtgttaacttttgcctaagccatcttttcaagttttcaaccttttgtgtgtgtgtgtgtgtgtgtgtgtgtgtgtgtgtgtgatacacaatttgagcatggtgtgactcaagtatagtaactgaagaatttctgaataccttttattgatcattattcgatacacaccatacacacatatatacacaaatgactgaataagaaaatatcaatctaacttgattctctcctaaaattaggaaactgaatcctaaggaaatatcctaaatgatctctccttttttattcctaaaatactttcctaaattaaaatcctaactctgaatgccaaatttcaacactccccctcaagctggagaatatatatcatataatcccagcttgcaagttaagtcttcgaagttaggcctaggtaaagctttggtgaggatgtctgcggtttggtgcttggtaggaacgtagttcaatttaaccgtatcactagtcaccttctctgtgatgaagtgtctgtcaatctcaacgtgcttggtcctatcatgatgcacggggttctttgctatgcttatagctgcttgattatcacacatcatcagaatcagagatgaactcgtttgtcccaattcactaagaaccctttttatccatatcccttcatagattccctgtgctagagctctgtacttagcttctgcactacttctggctacaacggattgcttcttactcctccaggtaacaagatttccccagacaaaagaacagtatccaaaagtggaccgcctgtcaatgatgtttcctgcccaatccgcatctgagtatacttcagtgtcacgattctctgtctttatgaagaatagacctttccctggtgttatttttaaatatctaagaatcctgtagactgcttccatgtgttcctcagtaaggctgtgcatgaattgacttacaacactcattgcaaagccaatatctggccgagtgtgtgagagataaatcaagcgcccgacgagtcgctgatatctccccctatctaccggtgtactctctttctcgataccaagtttcttctgactatccataggagtatcaattggtttgcatccaagcataccggtctccttaagaagatcgagtatgtattttctttgagagactacaattcccttccttgatctaaccacttccataccaaggaaatatttcaaatttccaaggtctttaacttcaaactcttctgacaaatactttttcaaattctataatttctccatatcattcccagatagaataatatcatcgacatagactatcaatatggccattttcccggcatgagacttcttgacaaatagagtatgatcagcctgaccttgtttgtagcccagcttcaagactgcctttgtgaatctatcaaaccaggctcggggagattgtttaaggccgtacaaggatttttggagtttgcaaacctgattctttgccatacttccttcgaaaccaggtggtatttccatgtagacttcctcttctaggtcaccatttagaaacgcattttttatgtctagttgttgtaagcaccaatcttgattgacagccaatgagagaagaatcctgatagtgttcagttttgtaacaggagcaaaagtctcctgatagtctatcccataggattgtgtaaaccctctagctaccaaacaagccttgaatctctcgactgatccatctgctttgtattttatggtgaaaatccacttgcaccccacgggcctcttcccaaccggaaaatctgtgatagtccatgtcccattcttctcaagtgcatcaatctcatcttgtactgccttcttccattctgaaattttgaatgcctcttgtattgtgttgggaacttgagtatcatcaagagaagtaacaaatgctctgtaagatggtgatagcccttcatacgtaacataattcccaattgaatgatctgtacatctcctaacacccttcctcaatgcaatcggtagagtagaatcatcaatgctgggaattaacacctctccagccctatcctcacctatgttttcttcaggaagacctgaaatggagtcaatatattggccacatgttggctgtgatccgtgctctaattcctgtcttttcctcctcctgatgtaaacttgtaagttctcattagcaagttgtggggctataggttgaataggcatgggagactggatggtcacgggagaaggaacatttgtgggctgggctggctggactgatgacggtatgagtgtggacaactcagtgggcgcggattgggaaggatttggtgactctgagtgagaaaaaggtacagcctcaagaagagactcccaaacttgatgttcattcatgctctccccctgaacatgagatttgggatagaagaagacatgttcaaagaaagagacgtccatggtggtgtaaaatcttttgttggtaggagaatagcatttgtaccctttttgggttggagaataccctaggaaaatgcacttattggctcgaggagcaaatttgctacgattttgaggatacacatgaacaaatgccgtgcaaccaaatactttgagtggtaaatcagaagaggctgcacgggtgtgagggaattttttttaagagaagttgacgtggggattgaaaggtaagcactctggatgacatacggttaatcaaataggtagctgtgagaatggcttccccccagaaatagtttggaacattagaggaaaacataaggcatcgggcaacctccaagagatgtctattcttgcgttcagccaccccattttgttgtggggtgttaacgcaagaacttatgtgaataatgccgtgattttgaagataaatactgagactactagtaaagtattcctttgcattatttgacttgaggacttgaattttggaattgaattgattttgaaccattagattgaaggttagaaaaatgtgtccggcctctgacttttctttcataaggaaaacccatgttacccgtgtatgatcatcaacgaatgtcataaaccatcgagtgccagaaatattttttatccgtgagggaccccacatatcacaatgtactaaagagaaaacagtcgaaggtttgtatgggatttgaggatatactgttcgagtatgctttgcaaactgacaaatttcacagtgataagatgctggatttttattgataaataatttgggaaacaattttgcaaggtaaacaaagctaggatgaccaaggcgatagtgtaacattataatctcaccatctttattgaccttagaatttgacacagaattgaaagactctaacatactctgagactgtacgcaacttgcttgagagacttggtttgagaattggccagatgggaggagatagagcatggaacatagttcagcactgccaatcatcttccccgatttcaagtcctgaaaaacacacgagtttggataaaatttagtaacacattggagatcacgggccaatttgctaatggacaaaagattataatccaagtttggaacatggagaatagagtcaagatacaagtctttagtaagttttatggaacctgtcccgacaatttttgactttgaaccatcaacaatatggacagatgaatgaccattacttggcttgtaattttgaagaatggcagcatctcctgtcatgtgatcagaagcacctgtgtccactatccacgacttcattccttctcgattagcagtgaaggttatcccggtagtactgccactgccaacttggcttaatagtttctgtagcatctccatctgctctttgttgaatggactcagctcgggaacagatgtgctctcagagttggcagccacgtgtgctttgccatctctgtcaaaccgtggctttggtttccaatcagccggtttgccatgaagcttccagcaagcctccttataatgacctagtttcttacaataatcacaccaaggcctatcccgtttctgacgatctccaccactactattaaatgaccgagcagcaagggcagaggcatccaatgttggggtaggttgctctttggatcccatcatcactttctttctactttcttcacgcctaacatctgaaaaagcctcactgagacttggcaggggtttaatgcccatgattcggcctctaacatcatccaattccctgtttagtcctaggaaaaacttgaacagtcttttttgttccacaatttgcctgtatgttgctgcatcatccgaacatttccatgagtgagtctcgaataagtcaagttgctgtcaataccttgtgagtgtgttgtaatactgagtaactgactgctctccttggctgaagtcatatagggctgattcaacctgaaaaagttctgaagtattttcagaacttgagtaagtttctttggctgcatcccatatgtccgttgcagtcccaaacagcaagaaattttcacctatgtcattgttcatggaattgataagccatgacatgatcatgctattttcaatcttccacttcctgaaacccggttctgtagtttctggcatggctgcttctccagtgaggtactcatcctttcctttaccgcaaatgaacagcaacacagattgtgaccactgtaaatagttatggccatttaatttgtgtcctgtgatgagaataggagaggaatcactgccaccaaggtttggaatttcagaactgccccctgattctggtgtcgtgacgctggatacttgtgatgatgccattccgtattttgtcatggagatgaggaagacagccgaatatggttgctggaaattgggaagagagaaaaccaaagataccggcctaatggaaaagaaaaacaactgtggcaccaccggaaaggtagaagaacacttcccaaggcacgtgcagggattgaggttgagaaaaaacaaccggaggacgccggaaaaactgttcggagggcccgcggaggcaaaagaaccccaaaagaggcacgtgcaaggctcagatggcagaaataggtatgaaaggtggctagtcggcgtcaggcgaggctggaggaggaagcgcgtcgctggaaagtggctcacgcgccctcacccgttggcgcgtgagatgcagtcgccagcctgaaaaacgcgcgtggtcagcatgtgggtggttttctggcttcggtgctttgggaaaaattggagatctcctccaggtgctccttgcggtgtgggaaaaaaacgtcgccggaaaagtcgccggcggtgaatgttttctgatgacgatttgaccgaccggaaagtcgtttcccggaattgatgacacgaggaaactggaaagaattaggttttctcccttggctctgagaacaaggactgatggccggaatgagagatggccggaatgaatgatggcctgaataagaggcggccagaagggataggattagggtttcagaaaactggctctgataccatgaagaatttctgaataccttttattgatcattattcggtacacaccatacacatatatatatacaaatgactgaataagaaaatatcaatctagcttgattctctcctaaaattaggaaattgaatcctaaggaaatatcctaaatgatctctccttttttattcctaaaatactttcctaaattaaaatcctaactttgaatgccaaatttcaatagtaacattttaagaatttgccattgatgagaccaattcttaatccatcttcagtgataatcttataagcactgttggtgtaaacttcctgcaccacataaggcctattccattttgatgtaaatttgcttccagtcttatgtgtggtgatgatgggtttaagaatagcaagaactagatcaccaatttgaaaggatcgaaggcgaacccttttgttaagagctcttgaaaagcgtgcttgataacactctaagcattgttgggcttcaagttacttttcatctaatgcttctaattcttaaagacataacttgacatcatcttcatcagttagtgcttcatgtataacaatccttaacaaagggatttgatgcttaagggacgatacaatttctacaccataaacgaggggtaaggggttgcttgtgtgggcgttcaatattttgtttagtatgcccaaattgtttttcttactcattcatgccaatctttctttgacttattaataattttcttcaataattgcaaagggtattgttaaatgcttctataagaccattggtcgatgcattgtacattaatgaattgtgttgtttgaagccgaacctttcacagagattgcttatcaatttattgtagaagggtttctcattgtcagtgattatgtaccatggtaccccatactgatagatgatgttgccgcgaataaagttcaccatagtttctttcttcacttccttaaatggcacaacttccacccacttagaaaaataatttgtcgccaccagtatgtgagcatgcccagcggaggatttaggagtgatgggtccaaccacatcaagacctcatgcatcaaatggccatgatgcaactgtaggatggagcaactcaaggggttggtgtatgaagtttgcatggaattgacatgcttgacacttcttagcatattccatgcaatccttaatcatagttgaccaataataaccaatcctttcgattcaataatgaacctttggccttgactggtgagccccacagatcccgaaatgagctttttcaattgtttgatttgcctcttcttctcctaagcatcggagaagtactccatccaataagcgactatagagtgtttctttgtaataaatgaaatgcggagtttgatgtcgtatatttgttcgatgtcttggttcatcgagctacttctcatactctaattagtcaatcaacgattgtcgccaatcttcgatgtcaatagtgagcactgatgtagtggtcacctcttcttgttgtgtaattgataaagacaacaatactcacctatggcaaattgggatgtttattgtttcgtttttaagcagtgttaaacttgcagctaaattagtaagagcatttgccatttggttatcttttcatggaatatgaactaatgagatttgtttgaactttttcatcaattgggtagcatattggaagtaaggaactatgtcatcacttttaacctcatacagagttaaaagttgattgattattaatttagagtccccacatatttccaagcttgtgattttcgttttgatcgccatttgtagttcgacgatcaaggattgatacttaacgacgttgttagagcatcgctcgctaagaataaacaaatatggtagtatttgtttttgtggtgagacaaacacgacccttgcacccgttccatcatagtatgctgacctataaaaaaacgtcatccacaaaggaaaaaacgttaatgtaaaagatctctttgtcaggcagatcatctaagatttcctagtttgtaggaataagatgatctactaggaagtctataagtgcttgtcctttgattgtcttttaagggatgtagattatttcatacttagtagcatcccccatcttgtcagtcttcctgaaagaactggctttgataacacatatttaacgggatcagcacgtgctattagatgtatagtgtatgcttgcctataatgtcttagttatttcatcgagaagattaaggcgagacaagccttctctattggggagatttagttttggctcaattagagttcgactaaagtaatacaatgctctttctttgttctcttcattttcttgtgcaagcaatgctccaagagagcattcttgtgcggcgatgtataatatcaatgactttcctgcagtaggagcacctaaaattggcggattagccaagtttttcttaatgctttcataggcattatgacaagcttgatcccaaagaaatgggacatcctttttcataagtcgattaaagggttgacatcgttctacaaggtttgaaataaaccgtcgaataaaagcaagtcatccttgaagacttctgagttcttgtagattccttggctttggcatatcccaaatgatggtaattttagattggtccacttcaatgccatggtgttgaacaacaaaccctataaacttaccggaagtgacactgaaagcacatttaagtgggttcatcttgagctggtaccttcttagtctatcaaacaccatgcaaagatcttgtagatggtcccttctttttctagactttaccactagatcatcaacataacattcaacattcttatagagcatgtcatcgaagattctttgcatggcacgctggtatgttgcacatgcattctttagtccaaatgcctcactttgtaacactaaatgccttttggagtacaaaatgcaataagctcttcgtcctttggtgccatccgtatttgattgtacctcgatgatccatccatgaaggataaagcttcatgaccagtagttgcgtcgaccatgagctcaatgatcagtaagggaaattcatcttttggacaagcattgtttagatctctgaaatctacacaaacatgaacctgtctattttttttcttgattgggatgacatatcgggtattttacctcatccttcattcttttatacaagttcttattttaattaaattcaatacaaccatagtttcttattaaaaaaatgttttttcctttgtactagtaaaatggagttattttaatgcatgaaagatgctagaatagaggggataagtatgaacatttcaagtatgagaagatttacttttatatatattgatagataatttgacatatcttgataaagcatactcatgggttccgaattattatgtttgtctacagtttcattctgctttct

SEQ ID NO: 13592 - DNA, 2049 bp, Vitis vinifera
  Intron number 2 from transcript GSVIVT01032876001 (locus G SVIVG01032876001) derived from phytozome v7.0 (chr-ID chr1 3; pos 12416 to 14464)
aaagctttgagtttatactcccaggtttcgaatatagtttctttcctactcgttgcgcttttttttttttgtttctaacttggtttatgtttttttctttccccttaaagtgaagtattacaaaattaacattcaaaatgtgaggggaaccccttttgtttatacgcatcaaatgggaaaaggaagagaatttctaaaaagaacttctagttaggggttacttgccataacttctagtggtgtgcttctttaaaattatctgttttacacaagatgttacagtctgatgcatacaaggtcttaaagtttgaaagcttcctaatctaaatgaaaattttaaattctgaaagcatcctgatctatgtttaagcatcaaatatattctaccttagaaagtgactaaatccaaaacaatttgaaggggcacggatttctcattgaccatttgttttgtttgcaaatgaagtagtagtactagtttagattgttcctgattagcacattgaggaagtctagggcccggtaaaacaattttttttggtattttctataaacaaggatgatgtttgggaattgccttttaaaatcacattttaaagaatccaaaaaacaaaataacaaaaactcatttatataaataaattgcattttcttttgaaaatactttttctatttttgattttttttaaatattgtaaaaatcaattttttaattctagtattattaaaaataaaaaatacttttgtaattacaaactacaaataaattaaaaaataagtaccttttagtaaaatatgaatgctaatgttataaaatatgtaaataagccaagttttcattaaatatacatatttagtatataattatgacaaagtattttggactagttttgatacaatcttcaattaaatgggtcaattctttgaatttcaaactattcttaaaaattagattgattaaagaatttaaaacattaagtctcgcttggcttggtttcacttgatttggaatccacttgcctagtgagaaaagctgaaggagtatagttgtgtgacgggggagaaacaataaacaatagtcatgactaattccaaaccagatctattatttttttttggtattgatttgagtttattttttagtttcaaattattttagcagactcattaataaatctaattgattgtcgataaaaaaataaaaataaatctaattgattaggtctcccttgatttcaagtccatttgtctagtagcaaaattcataaaagcttagttatatgcaaaggagaaacaacagggtcattttggattagttttagtccatcaatgttaggttgtaattagtttttttgttttttgttttttttgagctccaaattatcttttaaagtttataggaattcaaaacattaagtcttatttgatttggagtctatttgtctagtgagaaaatttgaaaaggtatggttctacacaaaagagaaataatagaatcattttaaaccaatttttatccttaaatttctaaattaattgggtaggtatttgaattttaaataatttttaaaaattactggactcattaatgaatccaacacattaagtcctacttgatttggagcttatttgctgaatgaaaaaatttgaaaaattatagatgtgcataaagaagaaactacgaaagtcattcaggatgagttttggttcgtgactttttaatattaattagattggttttgagtcatgtgactgttttctattaattaaattgattttttgaggatgttcatgatttttttttttttttaaaaaaaaaaatcgatgaaaacttctacttgttttctttgcaaactattttttacttcactttgttcttctacttgttttctacagacttttttttatttcactttgtttttcgaaactgtttttaaatcagaccatcaaacaaagtcctattatacttattgtttctgctttctttgtcctttttttcccctttgttgttggtgtccaatgaataggcactacgtgttgctcctactg

SEQ ID NO: 13593 - DNA, 2363 bp, Vitis vinifera
  Intron number 1 from transcript GSVIVT01010836001 (locus G SVIVG01010836001) derived from phytozome v7.0 (chr-ID chr5 ; pos 23228100 to 23230462 reverse strand)
gagcttgctctcattgatccaaagcgtgcaaagaggtagtcttttctagataaacctacgttgcctcgagttaccacttcataaaataatatatgaattaggaaaaccaattagatatagtttaattcatttatgtgatctattttgttttaagtataataattacaatcagatgttaatgatcttagtgctcatatgtcaaatctgaatttgaggtttagtgtttgtgaatgtgtgtttccatgtgtatccatgtagtgaatgtgtgtctccatgtgtatccatgtagtgaatgtgtgtctccatgtgtatccatgtatagaagctgattcttcaaacattttggtattctgaggttttccatattttggatagctgaaataatgattttatgtgaggtatctaaggaagggaactaactcttcttaagagagtataccatcaaaccttcccatcttcttcatgtcccttttttcaattccaagaaggataaatggttgtggtggtttgccaattagtatgacagtttgtggagaaagttcatccaagccaaaaatgggcactggatggggatggagcactctagaagcaagcgggtctcttggagtaagcttatgggaaatcaggacagttatccaagttcaaaatggtattaatactaaattctggtgagaccaatgggtcagcaagaatccgttaaaagtgatgttcccattgtttttcagtttagcctctaaaaagggtgctacagaagtagatttgtgggaagcgggaaggaatggagggcattagtctgttagtttcagaaggcaatttcaggattgggaaatggatgtggtgtttcatttcttcttcacactcattcattcgatgagagtgcaaggagtaaggatggacagcttacaatggaaagtagataggaaaggaaaattctgttataagtcctactatagttctttatgtggtaggagtagagagatgttcccacctaaagaaatttggaagtctcatgccccattaagaacctatcttttgcatgggaagtagtttgggggaagatcataatcataactagcctcatgagaagaggggggatgatggtaaagagatgtagcctttgcaaagatagtgaagaaataagttataatctaagtcactgtaacaggagaagagggtggacaatggtaaagagatatagccttcacaaagatagtgaagaagcaagttataccgtaagtcactgtaacaggactagaattgtggattctttagccatctttgggttgaagtgggtgtttccagacacagtaaccttatctgagggtggaaagccaagtggaaggagaaaaggcaaagaaagttgttttgcatggttcttttatgtttattttggtgcatctggaaaaattgtaattgaaggatattctattaggaagagatgccagatcaaagattgaaggagacctttttgaaacccttgttgcggtggtcgggtgatgcaatggggatggaggttgccacaattttggagtttttagatagcctaaattgtgaatagataggtcgttttgtgggctatcttattcagtagatttgctggcttttgagccttttgtatgctacaagtgtacattggggctgcccctctttgttaggtggtattctattaatatattttctatttgcctattaaaaagaaggtttttgtgtctgtctgagtagtattgtttttggtttttgtagtagccttgttagagaaggcatgcataagcctatgagaattatatttaagatcaactgtagctggttgtatgatcatgtcccatcattagtgtattttgatatagcattactaaattatgtgaatgttgatgttgtttctttgacaaacttatttttggaatttattgtgttttgcccctttgtgatagattttgttttgttgggatgtgagatgaagttttaatgcactttgttactctcctgtggttgatcttgtaaattttgttacattagtatttactaattggaattcttggatgcatgctagttacttgaatgtatgttgaaatgtccattatgcatcagaaaactatatctccacagtaatgccttttggttgtttggatcttctgactcatatgtggggttgctcagcaaacatgttgctacgactttgtactttgtttcctttagttagatccctatggaaaattttccttcgtataaatttcattcatatcacaaggaaaaaggcatgttactgcccatttctgtattttgcattatcagcatacttatttgtgtcctttattttccacgtaataggatttgggcaaataggcaatctgctgcaaggtcaa

SEQ ID NO: 13594 - DNA, 4389 bp, Vitis vinifera
  Intron number 7 from transcript GSVIVT01032266001 (locus G SVIVG01032266001) derived from phytozome v7.0 (chr-ID chr1 1; pos 14271569 to 14275957)
caactcagtgaactaccacatcaatcgacccttaggtatttggaattgattcagttttacaaatctaccaaagttgctattttttttttataagtaagcgataaattttaaagaccaaaaaaaaaaaaaaactatacactaagatacgcaggacgtacacaatgggtatcaaaaggctatgtcatagagaaaacacaaaaaactgttccctcttagtcagctcccgcctaatctacaaaatcaatcaagtgcattgaatgtttttttatatatacatgccgacccctaacttgaatccaagggaagagtagttcaatgctattttcttattctaaccaatttctttgatttgataagactgtaaatttcagtcccttattgcttggtattctttttctccttacgatttgtttttaccaatccatatgtgcttttaagcatattcttaagattggattcttttatccattgccttttttacaattggtttaaaagaattgaaataccatacaaataaaattagataaacttcttttatctattgcatttttttataggtaatttttcttttttgtccctattgggacttgaatctagaacctcccataaacccacccaaccctttaccacttgagctaggccatttttacaatggtttaagaattgaaatgtcataaagataaaattagctaatttctttctttttatttatttttttaatttgagggatagactcaaatcaagcataattaatttacaattgtaatccaatgagttcatgcttattttcaatatcaaacattattccctataacagtgattattctctataaaaagagagatgcatgtgttcttctccactagagtcttttataaaagaaagaatgaatttcataacttgagtgaaggaattaattaagtgtaaggagttcatttttctcgagttaaacaaacacaaaatattacaagtttaagaaaacaattttattttcaatttctttttaatctcttctaattgctttggaagacccaaaaaaatgtgagcgtaagatattggaagagaaggttgagtaaaaaaaatgtggatttgaggtatttagaatgcggtcgagagaataaaaaagagatggcttgaattcatataagttctaagataaataatttagatttgaaaaaataagataaaaaattcaagtagtatttcttacctgtcatcatataacttgagtcatcatctgttataacttgaatcatattttcttcactaaattgttccatccatttgtcaagtaattcaaacattttttcttgtcttaatcatcaaagaagcatcaatagatttcataaacattgttccctttgaacaattagccaaaaagttcaccaacatccatccaacataattgaacatccatttttttccattccaccatacgattgttcatcaaatcctttgtaagagtcaattttttctagaggttattaactcttacctcatgaagatttagtcccttcatacccacatcgtattgatcaatagcctcaattagtagttgaaaacccagatgagtgattgcattaaatggaataccaggctatgggccttacacatccaccttgtgataagcatacaagctctttctcttgcttctttctgctcttccaattttgaacaaccacctctatattaagagtgaagaaaataatccatggaacctttttctctggatctttttaatgaaaattgcattgtcctaccactacttcccctttagttactacctccactagaaatattagtgacacctattctactatgtttttttttaataagcaatagagaatatatgtcaaaagcgctgaagggaaggcatagcacagtacacacgaaagccattctattcttaatctcatcaaaatcttcatcttgaaaaccaaacaaatcttcattcacattttggttctccatgttattttgttcttttttattcttttttgcactcatataatcttctatttcttctctaacatgttctggacgttttgtacactttttagcatttatatccattgataagatgtttgtgtgtatgtatgccttctgttaatttgtcacaaaaaaatgcatataagagtttcaagtctttttcatttggcaaatagacatatttccatctgggatttatccttccacttgcacttgaacttgacgttgagtatttgtccttggaaacaaattatttatactagaataaaagaattacaattaagaaaaaaaaattgaaaagtaagttgtatatctaatattacataagataggattataggaatattacatagtatagcataaaaaagtaactaaataagtttcactacttaaatccaacggcccctcactattttgtttgttgctctgaaatctaaacattgaagagtgaaaaagggctcaacaaaatgtagaaacagggaatgtaatatttgccggtttggctagcatccaatggttcaagttactgttagttgagcagtaaactgctaggatgggagcagatattataccatagtattcttttttctatcaattagagtcgtcataccaatatttatttctataaaaataaaaaataaaaatcaaatgagaaccaaatagaaggggttagaaaagaaaaggaacaagaaatagagaaaaataccaaggggctgtcaaagaaactgagaaaggcacgtctcctcttcttattctcctcctctttggcctttgactctctcagtcgagttccagccctaatctgattttttttttttgttaaccaacaaaacgcaatgtttggggatttttgtttaaaaaaaaaagaaaagaaaaaagaactggggtcaaaacaatgtcatttatactgttctgggaggaaaaaaatgcagaagttggcctcttcaagagccttgcacttggccaaaggtgcatgcctttcatgcctaggcagcaccacctttaactggctgcacctggagtgaggtgatgcacaggagctttgtgtcgcactgcatttcagctaggtgcacctgttaaaaccatgtatggcggtaccctaagccttcaaaacacccttagttgtttaacacttggtgagcatgcatatacccaccatgccacgtgcatcagttatcataggccatgcgcacagcccatgttgaggcttgatttggttgagatttgtcggtggctggcaagatggccctcaaaaatcagacaatgttgtggcaacattgcaaaaggcttgcaccatgggcacagtgcagtggacagccggacaaaggtcatgggcacagttccatggtgcatcagtcatggggttgggcatgacatccactgctaaggcatgcagaacaatgttggtggcacactaagaccatgttgatggtacactggggaaggttatctttggtagtgcatatacaggtggaaagtagccacatgcaaggtaactgttgggaaccaatatgctggttggctgaaggcagacccagaaatgtgtaggcaacacaccatcagaaatcatttggatgcaagacacaagaggcataaggatggtggtttaatggttgggcagttcaggtggtttaagtaactgcccaacttcccttaactgacaaggacaattgttagagtctggttgtctaatttaaatggacaattaatggtatagggctgtacctgggatgcatatatatgctgatgtaataacctgatatgcatacaacaggggacttgtcttgtgataggcaaggtgtgcagtaagcaattttgcatcttgtatcaacttgagttaatacaaattgggacatttgctgctgcaaaattctggctgttgatctttcattgctttacctagacaaatcacacagagaaggctgactaagtgggacttagcatcacacttcacaggaaaagagaaaaggagaaaacaaaaccaagacactgattttgtgtgtgacaaaatagctattttgattagctgaaactaactttcttgctacataattactgaaatattaacgtctcattcattgctaattaaattaagtgaaatactcccagtacaataatttcaatatccaaaataaacctaacttctctgaataaaaaagaaataaaaatcttgtctttcttgctagtgtgctctgcaaaatctggtcaaagcttagcctgatttgtggtgtgttattttctattactagactttgtggtttggttttaactgcaaaatatctcaatggattctatcctctttggatgcacagccaaaagctaaatggtcatacatttttccatcaaatttgaaactctgtttattttctgtcaagtagaattcctcggtgaagaagagcagg

SEQ ID NO: 13595 - DNA, 27557 bp, Vitis vinifera
  Intron number 6 from transcript GSVIVT01026766001 (locus G SVIVG01026766001) derived from phytozome v7.0 (chr-ID chr1 5; pos 6652278 to 6679834)
gtagatttcgtattgcaacagagaattcggtactcctctctcttcatataaggttttaagtatcatgggattttgcttattttaagagaacatggttacataaattgcatctttgagaattttatctgtcttacttcatttggttgatgagattttcttagactattagttctgaatgcctgtctttcgacttaaaaagtatatgaatttcttggtttaggactttctattattttttaaatcttgttgtatttaacattctaggaaatactatatgttttgcttatcattttcatgtgagaattatcaaggaatatctttatgtataattgtgtgttaactagcagtgaatgcattatgaagatgctccatgagatcctttcttctttctaggggaccctagtctcagctagtcatgttgtttcatttgttaatttatggataacaaatcattggatgggttttagatctaggcaatgtaggtggatagatttttgccttgtatggtggtcgggggtttgtatgtcctcattggtttgttcgactgagccctttgtaggcagttgagccccttttcatttactatggtgttggatgtccatggtaggatgatcaagactgaaaagtgttattgtagagggttttgtagttatgagggattgtttgactatctctcatttacaatttgcagctataaatgaagagagaacttgtaattttagccccatgctttaaaatcattgggatggttagtggcacacaagaaggtaaacactaatgacttgctacaattgaaaagaccctacaaagctcttagtcctgacatttgtaagttgtgcatgaagcaaagagaatcaacaaatcatctttttctacattgttccttgtccatggggttgtggcacagattatttcagctagccaagatggattgggtttctccgagaagcatttcagacatgatgtctatcaattataaaggttttggcacttccaaaagagggatagttttgtggcaaaatgcgtgcattgctttaatttgggttgtgtggcgggaaagaaatgctaggatatttgaggacaaagctaggaattcagagaatctatgggattccattcacttcctagcttctctttgggcttattgttccgcggtttttaagggcattccccttaacgcgttacaaatagattggctagcagtgtgtagttccaacgggatggtctagccaagagagcttgttcgtagttttcatagtgtagtttcttgttcttttattgtgttgtttagttttatctttggtgggaggattccttatccttcttttgtacttcttattctttcaatatatatatttgttgtttcctatataaaaaaaaataataataataaattcaaaatactaagtgtcaattcgaagttcatttttctaagatgaatttttttaaaaatataactatgtgtagaaagaaataatagaatcattctacactaatttttatctataaattcccggtatgggtttattatttgagtttcaatttatttttaaaaactagtggatttgataatgaatctatgtagaagagaaacaatagaatcgttctagaccaattttcgcctattaattttttgtattaattggatcgctttttgagttttaagttatttttaaaaatcactagattcgataatgaatctaatgcattaagttttgtttaatttgaagttcatttgcctagtgaaaaaaattggaaaataatgattctacgtagaagagaaacaatagtcattttagaaatttgtccataaattttttgtattaattggatcactttttgattttaaaattactagattcattaatgaatctaacacattaaatcttacttagtttggtgtttatttgcctagtgaaaaaatttgtaaaattattatatatgtacaaaaaaaactaaccaagtcatttaaaataaattttggtctatgattttttaatactaattaaatcggtttttgagtttcaaattattttttaaaattaataaattttatgtattaagtatagtatgatttggaattttgcttaactaaaatttctacagaaattttaaaaatttagaaaaacacatgtaatttaaaggaagatcatatttgaatatttatgatattggtatcagattgtagaaagagaaaaaaaattgatattgttagataatgtatggttatttagattatttccttttccttttccttttctttccttactgtattgtgggtcccactagcatgtatatatatacccaagtccaatgtgtattctttacagtttttcaataacaataattagggattctctcttttctctctctctcttcacatggtatcagagcctagggagaaaaaaaccctaattatttccggtttatccgtgaatccattttgggaaatctttcagtgaccgtatttcattccggtcacccttcccatctcctaaagcttccgatcaaccctcaccgctgtcagaaaacactcaccgtcggcaaattttccggcgaccttttctggcgactttccggcgaagtcctttttcgacaccgaccataccatcaggtgcgcaaggaggagatcttcaacttttctcaaagcaccggaggaagaatcccagccatgcgccgtccacgtgcgtctattctccggcggcctgaatctcacgcgccggcgcgtgagggcgcgtggggcactttccggccacgcgcttccacctctagcctcgcctaacgccgtctagccacccttcatctgcgcttgtgtcatctgagccctaaaagtgcattttttggggttttttgtctccgctggccctctaaaccgcctttctggctacctccggtggcttcctctccaccccgagccctgcacgtgtcttaggaagtccgcgataagccgtattaaggctctcttcgatccaaacgcatttcattcaccagataagtagatatgactactaaaagttccactttttcctctgtcatatctggatctcctatgattatttcagagaaattggttggcagtgaaaattatttgtcctggtttgcctctatggaactttggtttatgggtcaaggttatgaggatcaccttgttacgcaggaggcggatatccctgaggttgacaaagtacaatggaggaagatagatgcacagttatgtagtgtgttatggcaatcagttgattctaagattctgcatcatcttcgggcctacaaaacatgctttaaattttggaattaggcgaaagggctatacacgaatgatatccaacgtctttataaggtggcttgtcaatgtcaaacaacaagacatggatttatctacttatattggccagattgcctctcttaaggaggaattcttgaccgtgatgcctcttactactgatgttggggatcaacgcatacagattgacaagttcttcgtggttcttacgtttattggcctccgtccagatctcgagaccatccgcgatcagattcttggcagttcctccgttccatccttggatgatgtgtttgctcgcctcctccgtatctcctccactcagactttgccatctgataacacttcagattcttctgtgttagtttctcaaactaactctcgaggaggacgcagtggtaaccgaggtagagaccaacgtcctcattgcacctattgcaataagcttggccacactcgtgatcggtgttatcagttacatgggtggcctccccgcactgcccacgtggcccagtcatctgatcctcagtcgcctcagcctcccagttcctccacatctcagggtattttcctcactgatagtgagtatgacgactatctccgctatcaggtcaccaagtcagtttctgttgcttctgttgcccagactggtaatgcttctgcttgtcttacccacacatcttctcttggaccttggattctagattctgatgcttctgatcacatatctggtaataaggatcttttctcttctattactactacctctgccttacctactgttactttagctaatggttcccaaactatggctaaaggttttggtttcgctcatcctctcccttccctatctctccattctgtcctttatgcccctgagtgtccttttaatcttatttccatcagcaaaataactcgcactcttaactgttctatcactttctctgataaatttatgaccttgcaggaccagagtacagggaagacgattggcataggacgtgagtctcaaggcctctatcacctcacctcgccttcacctgcagtttgcatttccactgatgctcccctcctcatttacagtcgctgggccaccctagtctatccaagttccagaaaatggtccctagtttttcatctttgtcgttgcttgcgtgtgagtcctgtcagcttgggaaacatactcgtgtctcgttcccaaagcgtttgaataatcgggcaaagtttccttttgaacttgtccacattgatgtttggggtccttgttggaccgcgtctactttaggatttcagtattttgtcactttcattgatgactattcttgatgtacttggttatttttaatgaaaaatcgagctgagttattctctattttccaaaaattttatgctgaaatccaaacccagttcaatatttctattcgtgtgttgcgcagtgacaatgccagggaatatttttctgcaccatttacttcatttatgtcccaacatgggatcattcatcagtcttcttgtgctcatactcctcaacaaaatggggtagctaaacgtaagaatcgacatcttgttgagacagctcgtactctctttctacatagtcatgttccttttcgtttttggagggacgctgttcttacaacatgttatttgattaatcgtatgcccttatttgtattacacgatcagatttctcattcccttcttttccctgaccaaccactttatttccttcctcgtgtttttggttgtacttgctttgttcatattctcactcctggacaggacaaactttttgccagagtcacaaaatgcatcttcttgggatattccagacttcaaaagggttatcgttgttattcctctgcgacccatcgctactttctctccgctgatgtcactttctttgaggactcaccgtttttctccacctctgagtctcttcctgtttttgaagtcttaccccttcccattatctccccacctgatgcagtgccttctctcgcccacttcaagtttatcatcgctgtcatcgtgtcgctgttcctccttctttggccgcggtacctgctgactcaccttctatcccttcggcttctcctgccccggctctgcctccttctgctgacttacccattactcttcggaaaggtaatcgatctactcgtaatcctcatcccatttacaattttttgagttaccatcgattatcttcaccctattctgcatttgtttatgctatatcttctatttctcttcccaagagcacccgtgagactttttcccatccaggttggcgacaggcaatggtagatgaaatggatgctttacactccaatgacacttgggatcttgttgttttaccccctggtaaatctacagttggttgtcgttgggtctacacggttaaggttggccctgatggtcaggttgatcgccttaaggcccgcttagttgctaaaggctatactcaggtttatggttctgattatggtgacactttctctcctgttgccaagatagcttttgttcgtctcttgctctccatggctgctatgcgttcttggcctccttatcagttagatattaaaaatgctttccttcatggggatcttgctgaggaagtttatatggagcaaccacctggttttgttgctcagggggagtctggtttagtgtgtaggttacgccgttctctatatggcttgaaacaatctcctcgagcatggtttggccgttttagttctgttgttcaagagtttggcatgcttcgcagtacatcagaccattcagttttctatcatcataactccttggggcagtgtatttatctggttgtttatgtggacgacatcgtcattacaggcagtgatcaggatggtattcagaaactaaagcaacatctttttacccactttcagaccaaagacttggggaaactcaagtatttcttgggattgagatagcttttgttcgtctcttgctctccatggctgctatgcgttcttggcctccttatcagttagatattaaaaatgctttccttcatggggatcttgctgaggaagtttatatggagcaaccacctggttttgttgctcagggggagtctggtttagtgtgtaggttacgccgttctctatatggcttgaaacaatctcctcgagcatggtttagccgttttagttctgttgtttaggagtttggcatgttccgcagtacagcagaccattccgttttctatcatcataactcttcggggcagtgtatttatctggtagtttatgtggacgacatcgtcattacaggcagtgatcagaatggtattcagaacctaaagcaacaccttttcacccactttcagactaaagacttggggaaactcaagtatttcttagggattgagatagctcaatccagttccagtgtggttctttcccaaaggaagtatgctttagacatcttggaagaaaccggtatgttagactgtaaaccggtagacactcctatggatccaaatgtcaaacttataccaggacagggggagcctttacgagatcctgggagatatcgacaacttgtaggtaaactgaactacctcaccattactcgtctagacatttcttttcttgtaagtgttgttagtcaattcctacagtcaccatgtgatagccattgggatgctgtaatccgcattcttcgatatatcaaaagcacaccaggccaaggtgtgttgtacgagaataaaggtcatacccaagttgttggttacacagatgcagattgggctggctcacccatagatagacgttccatttctgggtattgtgtttttattggaggtaacctaatatcttggaagagcaagaaacaaaatgtagtggccagatctagtgctgaagccgagtatcgagctatggctttggcaacatatgaactcatatggctgaaacatcttcttcgggagttgagatttggaaaggatgaacagatgaagctcatctgtgataaccaagccgctttgcatattgcatccaatccagtcttccatgaaaggaccaaacacattgaagttgactgtcacttcattagagagaagatcgcatcaggatgtgtggcgactagttttgtcaattcaaatgatcaactaacagatagttttactaaatctctcagaggtcttagaattaaatacatttgtaacaagcttggtgcatataacatatatgctccagcttgaggcggagtgttagataatgtatagttatttaggttttttacttttccttttccttttctttccttactgtattgtgggtcccactagcatgcatatatatacccaagtccaatgtgtattctttacagtttttcaataacaataattagggattctcccttttctctctctctcttcacagatatcatgttcaatttttatttgtttattttgttttgttttgttgttgttgttgtttttttttgttttttttaatttctctatgttttccttttgtttttgtaattagtaaaaacaacttctacttttttttaaaaaaaaattgttctctatttcactttgtttttaaaaactggaaacaaagaacaacggccaaacggtgtcatgaatttttaaagacaattttctgtttataaaaacagaaaaatgttttttgattacatggccaaataggctcgaagattttaggaacatgtctttcaacttggaactttgatagctctgcctcttcaaacattctgaatttttctcctttcaaatgcaacaatttaagcttaatggcatggattttcgcactatacttctttttgatacaaagccattatactagctaattaatgtttcctttactgataaggtagcactataacaaacattatggttacctttagaacaaaaaaacatttataaagatttaatgtggccagggttcatggaagggagcatgaaccatttaacatgctggagtttagtatttgtgcctaagcttgagggagattgggtttggaggtggatctttgtgaggaatggagctttctttggtaattgatgatgttggttccttagagagctttacttgttatggaatgcagttattagaagcatttatggttgcatagctacatgcaggatgttaactttgtggtgaagaatatgtattgcaaccttggaatttatttccttgaggctattaggatttcatccattgtttgtgatcaaattgcgattggtggatcaaagatctattcctaaagtgtggtctggagactgattaagttatttaacatgccctccctcgttctattgcatttgaatggtaagagcctcctccaattccagcttttggtctttcccttaataatgcccttttttagtacttaaactttccaaaaggctaaattgattgcaaaattgatctcctcttctccctttttttatttcttgaagagtgcttatttacctctctttttcttaatgggagaagacttggtccttgaactctttaagaccttttgctttagggtcctgtttcccaccaaggagtaataatgcaagttttcttctccctctccaatcgtgttgattaggaagcctagggctcctccaaatgcaaaatctttgcatggttggatgcttagaagaaggttgttggacaaaaaagtttcctaaaaagctgatactattaggattagggtccacaatgtacgagccctattctgcggtctttgggggggaacgggacttcttctcttctactccttcttctgggtgtgaccgagccttagtggtgggagatgttttcggtttggatgtcgccgctgaaggtgctagtaaccaagctccattacgcgcagtgttgtctgatggaaatccgtgggtgatggactcagagggggaaaaggctattgttgataagccggaggctgttgaggaaatgcaagatagggaggattctagtagtatttgggatgaaagtaacctgttgaagttcagtaaggcactggggttcgcggcagaaggcgtggaaggggaaatcctaaaattattgctaagactgaagaccagaagggatcaaggcaagaaaaagggatcgctaggattgactaggtttgatcgggaagttaaaaagttagaatggtcggttaattacgatggaaaaaccagaaagaaaagttcggatagaagagggggggatagatccttgtgttttaaatgaagattaagattctatcttggaatgttagagggataaatggtagaaataagaggaaactaattaaagccttaattagttcccataaagtggatttagtttgcctgcaggagactaaaatgactgagatgtctttaggggtagtgcgaagcctaggtgtggggagatttttggagtggggagctctgaatgccaggggggctgcgggaggggtggtagtttattgggacaatagagtgttggagttaatggggatggaggtgggccttttttccatttcttgtcgttttaagaactgtgaagatgggttcagatggattttttcaggagtgtatggtcctacaatgaaaaaatatagagagtttttatgggaagagttaggggccatccgagggctttggaatgacccctggtgtattggtggagatttcaatatgatcagatttccgaatgagcgtagaagaggagggagactgtctccttcaatgcgaagattctcggaggtgatcgatgacttggacttgagggatctgccccttcaggggggtccgtttacatggagtggaatgttgaacaaccaaaccatgtcaagacttgatcgattcctggtgtcggaggattgggagggccattttaatggggtggtacagagtattcttcctaggccaatgtcagatcactttcccattcttttagatgggggaggggtgaggagggtgtcaaaatattgtatgaatgaccgaataccttggccttgagttttgtatattatatatagactttacaaggatgctttacatggaaagcaaataaaagcaaataaattccagcatgattctagccctatacatgtaaactataatctgtcaaataatatatgctaactgtacaaaataataaatgaagaaataaggaaacaattgtgggctaaaataaggaaagaagggtgggctaaaataaggaagaaagtgtgacagcaaagctgtcctttgatagctgtcctttgactagcaaagctgtcctagtgtggacagcaaagctgtcctttaacaaaagctgtcctttgacagcccccctcaaattgatgcaggttgatcaacaagcatcaatttgctacttagcaagcaatgtcgatgacgagggagagccttggtgaagatatcagcaatttgtaagtcggtggaaatatgtggaagagtgataacacgagcttcaaaggcttcacggatagagtgacagtccacttcaatatgctttgtgcgctcatgatagacaggattggccgtgatctgaatagcgcttgtattatcggcatggagaggtgtaggatcggtctcagaaaaatctaactccgcaagcatacctcgaagccaaatgatttcagaacaagcaagagacatcgcccgatactcagattccgtagatgacttagagactctgtcttgcttcttacttttccaagatatcaatgcatctcctaagaacacacaccaaccagtgatggagcgacgggtatccgcacaacctgcccaatcagcatcactataagcagcaaggcgagtagaattgcctgcagggaagaacaagccacgagtagaagtgccttgaacatagcgtatgatcctacgaacagcagccaaatgaagatgacgaggagtctgaaggaactggttgacttgctgtacagcaaaagaaatgtccggtctagtaatggtgagataaacaaggctacccaccaacttcctgtataaactgggatcagcaagtaagttgccctcctctttgcgaagcttgacatttaattccatgggagtatcaacagaagtagccccttgtagaccagctgtagccaccaagtcactcgcatacttatgttgattgagggaaataccagagggactatgatgcacctcaagaccaagaaaatatgtgagaggtccaagatctttcatatgaaaggactcggagagatgagttttgagctgaccaagtaaagcagaatcggaaccagtgatcacaatatcatcaacataaaccaaaagaacaacaatacccatgtctgatttccgaagaaacaaggaagtgtcatacttgctctgcctgaatgaaaattgtaataaagtggtgcggaatttctcaaaccaggccctcggagcctgtttgagaccataaagagagcgacgaagcttacacacatgtgaagtcggagagggaaacaatcccgggggtggcttcatataaatacactctttaagatccccatgaagaaaagcatttttttacatccatctgatgtaatggccaatcactggaagcagcaagagctagaatcgtacgaacagtagtcattttagccacaggagcaaaggtctcttcataattgacaccatattcctgattattcccaagtgcaacaagccgagctttgtaacgatccaaacttccatcagatcggaccttgactgagtaaacccatttgcaacccagaggaacaatagtgggaggacagggctcaatgtcccaagtgtgattggcctctagagcggcaatttcttcttgcatagcttgtcgccaacaatcatgcttagtagcatgtgagtagcatgtgggaatatcaaatttggacaatgcagcagtaagggctgaaatagaattgccagaactggaagagggaaatccatacctattcggaggtacagacactcgagaagagcgacgtactgaaggtgctgcaactgactgcatctggagcgtggtaggatcagatatcgggtgagccaccgaaagagactgtgggtgggagcgtctcgtatacacaatacctggttgaaagcgagaactgactggatgaagatctgagaactgttgctcaaaggagggaaggaccacagtagaagaggatgacacagtagaagaggatacaggaaagaaatgttgattttcaaagaaaataacattcctagaaatacgtgtacgatgtaatgtaggatcatagcaaacaaatcccttttgacacatattatatcccaagaaagcacatcgaacagattgagcagataatttatgtcgctcatggggaggtaaatgaacaaagcatacacaaccaaaaatacgaaggtgatcataactaggttgcttagcaaataagcggaaatagggagactccatatgtaggacttgagaaggtaaacgattaatcaagtgagtagcagtttttagagcctctacccaaaacatggatggaacagaagattctaacaagagagtacgtaccacatctaaaagatgacgatttttgcgttcggcaactccattttgttgaggagtagagggacatgaacgttgatgaataatacccttagaagccaagaatgcttgaaactcagtagacaaatactcaccaccagaatctgtgcgtaatgtcttaatagaagtagaaaattgattgtcaacatacgctaaaaactcagtgaaagtacgaaagacctcagatttagagcgaagaaagtagacccaagtaaatctgctatgatcatcaatgaaagtcacataatatttaaatttctcatgtgaactaaccggggaaggtccccaaacatcactatggataagatcaaagcagtgagatgctctacttgcatgcaaagggaagggaagagttttacttttaccaagtttgcaagaatcacactcaagagataaagaataacgatccttattaccaggtaaatcagagttcaatacatgagataagatttgagtattgggatggcctaaacgacgatgccacaccgtactaagatctgaaacattattacaagcaaaagacttaatagaagaacgtggagaaaaatctggaacaggtaaaaatagtggaaacaagcgccccactttaggtcccttcgcgatcggcttccccgttacttggtcctgcacaacacaaccattaccagaaaaattaacagcacaattgttatcaactaattggccaacaaaaataagattcgtggaaagctgaggggcaagaaacacatcagtgaacttagaagaggcatcgccgatagcagctatgggcaaagagctgccattggcagtctgaatggaagattgaccagcgtagggccgaacatgacacaaagcggtgggattattagtcatgtgattagaggcccccgagtccacgtaccagagtttagtagaattgttaccttgaaaccccattgctgataatgctgaaattaatatccgttgcaccatttctggggtgcagtaatctggtgcaggaggtgcaggaacagagcacgcagctgaaggagagtcgtgtgttgctacaggagggacaataaccgaagtctgaaatgcttgggcctgacgattctgggggcgaatacgacattctttgataatgtgacctttcttcttgcaataagaacaaaacttcttagggcaagtggcagcaatatgcccatattccttgcagcaaaaacactgcaagtttttagaatgcataggtggtccgcgtccttgggcagcataagctacagttgtcgtcccggaactgccatgagattgctccaaaatagcttgagtactaaggcgttgctcttcgcgaagtaactcaccaaaacaaatatcaagagagggaacaggagatctattcagtaaagaggagcgaacagattcatattccggacgtagtttcataagaaactgatcacgccgggtagtcgcgtgaatagtctgaatagttgagagagcggcaataggaacatctgctgtaaccaaatcagcatattcatgccaaagattcagaaatgccgagtagtagtcctggatggaaagactaccatgttgaaacatggcaatcgcatgttctaattgaaagcgacgagcatcgttatcctgatgataaactttcttcaaataagcccacatagattgagcggagcgatggggcccgcaagtgggtgacaatatgaggctccactgaaccaagaagccaagacatgatgcgtgcatcaagcacagcccatgaatgagaagtcccaacatcctgagatttgtcaaaagtggatggtttttcaacatccgtgccatcaatatgaccccaaaggtcttttcccttgagaaaaagttcaaactgaaatgcccaggtagaataatttgtgcctgtaaacttaacacacagcggtgcggaatccatagaaaataaatagaacccgagacaaaaggatggaccaaaaaaaatcccagaagaaaactgacccacgacagccacagaaatactgagaaaaatggttgtggttgggtgcagcacggatcaacacagacttgaccgaaagacacgagaggcacctccgaaaccgaaaagacagaaaagaatttgagggaagaaaaattagcaaccttgctctgataccatgtcaaaatattgtatgaatgaccgaataccttggccttgagttttgtatattatatatagactttacaaggatgctttacatggaaagcaaataaaagcaaataaattccagcatgattctagccctatacatgtaaactataatctgtcaaataatatatgctaactgtacaaaataataaatgaagaaataaggaaacaattgtgggctaaaataaggaaagaagggtgggctaaattaaggaaggaagtgtggacagcaagtgtgggctaaaataaggaaggaagtgtgacagcaaagctgtcctttgatagctgtcctttgaccagcaaagctgtcctagtgtggacagcaaagctgtcctttaacaaaagctgtcctttgacagagggggcctgtccctttccgttttgaaaacatgtggcttaaggaggagggttttaaggatttgttgaaggggtggtggcaaggtctaagatttagcgggtcttttagcttcatccttgcagagaaattgaaggctttaaaggcaatcttaaagtcatggaataaggtagtttttgggaaggtgggagtgaataagagattggctttggacaaagtggatttttgggattctcaggagaagaagcgtacattatctttggaggagctggaagccagaaaggaagctaagggggactttgagaaatgggctcttatggaggagatttcttggagacaaaaatcaagagaagtgtggttgagggagggtgacagaaataccggcttctttcataagatggccaattcccataggagaagttgtttgtctaagattaagattaatggtaactggttaacagaagagcaggatatcaaggggggtgtggttggagctttcgagaacctgctaacagatcctggggattggcatccatcaatggaaggtttggattttaataggattgatggtgaggatgcagcttgtctggaaggggtttttacagaggcaaaggtcttctctaccctctcagatctgaacggagacaaggctcctggtccagacggcttttctctcagcttttggcagttcagctgggattttgtgaaagatgaggttatgggctttatgaaggagttccacgagcatggcagatttgtgaggagcttgaactcaactttcctggtccttatccctaaaaaaccggatgcggaggaccttaaagatttcagactaatcagcttgataggtggattgtataaactgttggcaaaagtgctagcaaacaggatcaagaagaaggtgggaaaggtggtgtcttcagctcaaaacgcctttgttgaaggaagacaaattctggatgctgccctaattgccaatgaggcaatagactcgttgctgaagagaaacgagagtggggtgttgtgtaagctagatatagagaaggcgtacgatcacttgaattggaattttctactattggtattgcaaagaatggggtttggggagaagtggactggctggatctcctggtgtatctccacagcgacgttttcagtcttgattaatggcactccagccggttttttcaatagttcaaggggtttgcgtcaaggggatcctctctctccctacctatttgttatcgggatggaggcttttagtaggctcatccttagagcagtgagggggggttttctttcgagctgcaggataaaaggaagaagtggagacggggctgtggtaactcatctgctgttcgccgatgatactttagttttttgtgaagcttcccaagatcagatggctcatttaagctggttgttgatgtggtttgaagccatatcaggtttgaggattaatttggataagagcgagattttgccggttgggagagtagagaatttggaggctttggctcttgaggttggttgtaaagtgggaaggctgccaaattcttacttggggatccctttgggggcgaatcacaagtctgtggctgtttgggatggggtggaagagagatttcggagaaggcttgccttgtggaaaaggaattgtatctccaaaggcggtagaattacactaattcgcagtactttgtcaagtatgcccatatacttgatgtctttacttcgaatgccaagagtggttagtttaagattggaaaaaattcaaagggattttttgtggggggaaggagctttggagaggaagcctcatctagtaaattgcgattccgtgtgctcggacataaggaagggtggcttgggagttagacgtttggctactctcaatagagcccttttatgcaagtggaattggcggtttgcgaatgaaagggaggctctttggaggcaagtcattagtaggaagttcggggaggaagaagggggctggtatactagagaagttagggaggggtttggagtaggcttgtggaaggaaataaggaaggaaggagctttcttgcaaaacaaagttgtcttttctgtggggaatggtagaagggtgaaattttggaatgataattggtgtgggaatttctctctcagtaatttgtttccctctttgtatgcctttgcttcatttaaagaggcttggctagtggagttatgggatcattcgggagatgaaggggtttggaatcctagcttctctcagtcctttaatgactgggaggtggagggggtggagagattacttctgacaatccgaggtaggagacttaatcctcttttggaagatagaatgctgtggaaagagactaaagatgggattttctcagttaagtccctttatagttcgctagcttcaagaagagatgttcaattcccttatagtaatatttggagtatttgtgtgcctacctaagtgagcttctttgcttgggaagcttattggggtaaggtgctaaccttggatcgacttaaaaagaggggccggtctctagctaacagatgcttcctttgcggtatggaagaagagtcaattgatcatattcttattcagtgctctaaggcaagagggttatgggagttattgtttgctctgtttggtgttacttgggtcctcccttctttggttagagatactcttagtggttggagtggctttaagttgggcaagaagcgtaggaaggtgtggaacgcagccccgttgtgcattttttgggcggtttggaaggaaagaaacatgatagctttcgataatgaagagttatcaattcataggttgaagaattcttttgtttgtaatctttggctatggactaaattggttgtaaatgatggtcctcttcctttgatcaatttttttgattggctaggcgctagttgagggctggtattgtatctctttttctttttgggcctattggcgcctcttgtatacatcctgtatgcttgggtcagcctcaaggcgcccttttctaatatatttttgttgtgtgtttgcctataaaaaaaaaatgtatatcatgctctataacacccaacatcatgtgtgactacttacctacgcatggagagacaaatatgcctataggccaaccaaccataaacaacctcctttaagcttaactatgagcttaataggaaagtgacatgtgatgaggttcaaacatagagcttcccaccaaatgaggctttgatacgatgttgcacaactaatttttctaaaaagcttaagctattaggattttggcatataatgtatattatgctctccaacaaaattcattactattacttaagataaggagatcttacaatgctaaaaaccttgggagatgtgtgttgtatacatagagcagaagatagtagatattagggaatgatttatattatgggcctacatgctaatagcttaacgtcattctcattattgtatctgtgcactggttaacggaggactctgggttcaagtccttcccttatctatttatatgtagtcttgtttgtgtttcccatggtagatatgaggttgcatgttggcctagagcatgatatatattgtgggcctaaatccaataacataagcttttagcaaagtatttgtccattgttctttagcacttgcaatatgacaaatattgttttcttctttaggatatttttagtggccctaggatattttaactctttcagtgatatctttttagggtttaggagggaatctaagggaaatcatgttaagacattgtgctttattattcactctttatgtaatttattttgagaagaacatttggaaattttaaagataggattttcactaatgaattgtgggaaaatatttgttagatgtttgcttttgattcttgtcatcaaagagttcactaatacttgcatttaatattaaagacaaaagaggacaaaaatccttccaagatgtacaattgttgatcaaatgatagaaacatatattgctccaccaaaatgtaaaactatttgcatagaccattggtagaaaagtaatgaagacaataaaaatgctttatacacctagtaatgaaaaatgcctctaacaaaagaaactaagcgctttgcttcttttttggctaattgtcgatcgccttcttgctctaactcctcaagtctatataactcaattcaattaactaagcaaggaacctaaaagaaggggtatcccaccttcctgccaatatctataattttgtgaaaccaactattaaatttccatgagcccctctcctcttttgacattcaagaagtaacaacaatagaatctctctacatttaggttggacggacataaagctttagcctataacaagcccttcaataatgttattctcacccttgatagctaaacccactctagcttgtttagagtaagcccttgatattgattatttagagaacatttttcaaaatttagctttattgaacctattagagaaagtaactaatcaagtagtctctcatgtgatcttttagagtggcaagcatttttccaatcttgctatgataggttaaagaagtaccttaaaaaagatagtgacaaaggcccaaaggtaggagaagaagtaaaccaaatcctaaatagccttcattgatttcctattgtcctcaaagatcctaacatttccctcctgtcataaattaagtctattgctaatgctcttgaagagaattactagcaggtcttcaaatcctctagggagcacttgatcaatattggtaagatcgaacaatccatgccaagctccgtaagctatagggtgatgaggaaagaggcgatcaacgaattcactactctccaagcatgtaacacattagtctaggttgataactttataaggtcttctaacccatatcatattgttagtattaaccttcttattagtcaaaggccatgcaaaaggttcaactttagatggaacttttgaattccaaaagaatttagcaagagcaaaaggggtcgagataggagaaattgtaagagctctaagaaggaactcactgagaaaagtctttagcatcctagttagggctgcaattcaggtgggttaggttgggtttatacctaacttgagcctaatccgaattaataaacattcaacctgaaccctacctaacctaacacaacctttgaccttatgcctaacctattcccattttttcaagcctgggtggagttcaagttaggcttgggttgattgggttaaacttgggttggataggctatacaggttggtttcggttgaacccacctataatgacatttttaactttattttttatatatttatactaaaatttaagtagtaaacaacacattagtttgaaataataacagtagatatacatacaagaaaaatgaaataatacataatataattaaatttaatatatatttttaaattatttgaaaggatataaatgaagtattggtatatataatattacaaatcataattattataaaatattaaattgggctcaaattaggcttgggatgcccaaaccactggccttagcataactcaatttgaatttgagttgagaaaactcaacccaagcccaactcgagtatttaaaatacttggttggattcagctaaccggcctaagttgcacttgttatcccaatgagtcgaatcctcatatctagatgggaggtgaaaggtgcataggtgattagaaaggaaaggagggtttttagctcctcaatttttaaatcaaaatggctttgacaaacataaaatttcaacaaggagaggtagaggaactaaaactaagtaaaccgaacatctctagtccttgaaacactgaaaagttttaaaaattgaagtttgagaggccgatcgccctgccatatatcctcttaaatgaatttttataccatctcccatagaccaacaagtaaaattagagaaatcagtcaaaatttaagcaaaaaccttccaaggataatagtataaccacccaaccacaatcttggcatcccaaccattgaaatgtaatctatagatgcttaagatggctctaagacccaggtttgcacacatgcttctacctaatgaggtagtctctcttagttttcctaatctgaccaaagaaaatcctcggtcaatctctaagcttagcaaccatttttattgggaccttgaatatagaaagcaaataaatgaagattatcacaacactagggttattctaccttctatggaccaaaaagctttttcccaaccatttgaaggactagaaattctatttaacactaggtaccaaaatgatgaaaactgaaaaactattagagctattatccaagtaaactacaaccaagttactccaaacactgtcagggccaagatttcttaaggaaaaatcctttgcaaaagctaaaccaagaacttttggttaatcacttcttacaattttttttggataattatcaaaagttcttacaataagcaagttcttccatttcataatgataaccctcaactactttctgaaggtttccaagaaacaattagtagcctttaattaaaaaactgacctttggacttctaatttaataacaaccttttccatgcaaacctttgatgttttcaaactaccataaattgtctaatactgaccacatcattctcccctccttagaagaagtttgtcctcgggtttggtgctgctggaaacatcttttatgttttcaccagtgtaaaatataaatctgaaatgtttaatattgaatctattcccatatgttttggcagatctaccacataagcattctccccaatcttgatgattttgtagggtcctatctttcttttacttagcttggaataaaaaccagctggaaatctttccttgcttaggtgtaccatcaccatgttgccctcttgaaagctttggctgtgcctcttctgatctgcatatttcttatgcattcgactcctcaatcttcaatctgatttcttcatgcaggtttttcattaagtcagccatgttttcaccctttaaaccatttcttcccatctctggtaaaggagctaaatcataaagatgcactggttgcttcccatgaacaacttcaaaaggacttttgcctatagttcgattcttggaatagttataggcaaattctgcttgcacaaccacaacttcccgttgcttagatttctgaataggcacctcaataaattagccaaacttctattgacaacctcagtttgtccatccgtttgaggatgatagcaagtacaatactgcagcctggttccaaacttcttccataaagttctccaaaaatgagagagaaatttggggtctcgatctgatttgatagattttggaactccatgtaatcgcacaacctctctaaagtaaagatttgctatatttgatgcatccatcatttttgcaaatctgtcaaccaccacaaagatggaatccattccctattgacttctaggtaatcccaccacaaagtacatacttacatcttcccaaggagctgtaggaactgtcagcggagtatacgaacctatattttgaacttttcctttcaattcttgaaacgtttgacactatttaacaaatttgtaaacattcctcctcatttttggccaaaaggacttctgttcaatcatagcatatgttttatttgtcccaaaatgtcctcctaagcctcaactatgcatgtcttgaatgatcttttccctcaaagagcaatctggaatacaaagttgattccctttgaataggaagccatcatgcaacaaatactttcccggttgcctattagtacaatcctttcaaattgaaccaaagaaaaggtcaccaggataaagatccttaaaggagtcgaaacctttaatagtaacaatcatattagtcaacaacaaacttcttcgactaagtgcatctgccactttgttacttgctccggacttgttctttatcacaaatgtgaactgttgcaagtaagaaacccaatgggcatgcctcttgcttaacttttgttacctgttgagatgctttaaagcttcatgatctgtatgcaaaataaattcttgatgtatcaagtaatgctcccaatgtttaagagccttaatgatgaaataaaattctttatcataactgttgtatctacttcttttgtcatttaatttttcgctgtaaaatttcaagcctgcctttttgacttggaacagctccaatcccaatttcggaagcatcacactctacttcaaagaccccttcaaaatctggcagcactagtaccgtggccaagctgagcatctctttcatcttttgaaaactcttcagctttgttctgaccattgaaacctccctttcttcatgcaatcagtgacaggagcaattatagtgctgaaattcttgatgaagcgtctataaaatgaggctagaccatgaaaactgcacacttttcccactatttttggcattggtcagcttctaattgcttcaaccttactgtcattaacttttatctcttcagcaccaactatatatcccagaaatagcaaagaatcagtgaaaaatctgcacttcttcatattggcatgaagcttttctcttttgagaacttctaatactcccttcaggtgttgcaaataggactccttggatgggcttaagtatattatcaaaatctaccaccacaaactttccaatgaatgactccagaatttgattcatcaaacgcataaatgtgctaggtgcatttgacaaaccaaacggcatcacaatccattcataaagcctatgtttagttttgaaggctgttttccattcatcaccttcctgattcctaatttggtgatagccacttttaagatcaaatttagaatatacctttgttccatgcagcatatccaacatatcatctagtcttgagattgggtatcgatgctttatcgttatccgatttattgcccaactatcgatgcacattctctaggtaccatctttctttggagttaatagtactggaactgcacatggactcattgattcccttttgcatcccttctggagcaactcttccacttgtctttgaagttcttcatgttcttttggaggcattctgtaatgtggcaggtttggtaggctggcccctggtattagatcaatatggtgctggatgcttctttttggaggcaatcaacttggcagttctataggatgtacctctgaaaaatttccagcaatgcctttggttcattagaaacatcttgctggtcttctaagacttctcttgccaacagcaaaaaggcaactccattggcttcaaactcatttagaagcattgaacagttacataagatggttcttgtttggcgttagactaaacaaactcttcttctttcattggggcaagtactacctttaagccaatttttgtagaaagcataaacattcttctctccatggtggacaattttattgtcaaattgccatggccttccaagtaacaaatggcaggctccatttccaccacatcacatagaaccttatttgaatcatttttcccaattgagaagggaacaaaatactgctgcactacttctacttcacctcctttggtgaaccaagcaattcaatatggctttgggtgtggtagcacttccaagttgagctttgtcaccatttctttagaaacaagattctcacaacttcccccatcaataataacattgcaaagcctcccatgcgaagaacatctagttttaaaaatattgtttctttgcaatcgctttttgatgtttttggagttaacatggaacgtcttaccactaaatttggacgatcatggtcttcatatgtgacttcctcttttgtgaattccagcaaccttccatcaccttgaggttccatctctacctcattatcattgttctccccttcatcttcattgattagtaaattgttggcctgtttttggcaatcagaagatttgtaaccctcttttcctcatttataacatattattctgcatcctgctggctgcaatgagttgctactatttccaagaacatgatttctcattgttgcatgcccttggccttggttgcgagcttggaagtgagtatttgatctagaattctacaaatcatcggtcgctgactcgctgccactgatttctgccatctccctcctgcctattatcctccaattgattaggccctcttgcacttctaatcaggtggttgttggaccatctttgttgattttcaaccttcattgacaactgaacaacaccagatagtgtccaacatggttgcagctccaccaaatttctaacatttggcctcaatcccatcaaataacaatgagtgacctgcacttccatttcggttagttgtactctagttcaaattttgtaaaactcactagtgtattctcacacagaatgttggccttgctgaagtgcttggtattgctgaaaaagaatcccttcataggtcaatggaaggaattgactttggatttgctgctacattttagtccagctctggattttctcctttctagattggactttgtcatctgcacttgctgccaccaagaggaagtataccccttcaattttataaccaccatcttcacctttttattttctggaagatttagaaactcaaaaaccctttcaacttcattcaaccaatctaagacctcctctagttgctcctctccagtaaagtgtggaatatttaccttaatgtttagattttgatcacaatctgtagtacaatgaaacatcaattgcttctccaaaggtaaaactccactgtcttcatctgaaaagtcccttacagtttgctggaagtcctccatagcaggctgatttctcacattcctctgttggtaagttcgaaaattctgccttgtttggcctccaagggtggaatttggagcaccaataataccagcttgctccaatctggcacataattgattaagctgctgctgcaagtttgcaaactcttctctagttgggccgcttcctgctagttgtgatgctgcagcattcaaatgatccccaaacccggccattgattcaaacaataacaaatctggaccaaaggctctgataccaattgatgaaaacggaaaagttattagagctattatctaagtaaactacaaccaagttactccaaacactgtcggagccaagatttcttatgggaaatctagtttgcaaaagcttaaaccaggaacttctagttaatcacttcttatatttttttcggataatcatcaaaagttcttccctttcataatgacgacccccaactactttttgaaggtttccaagacacaattagtagtttttaataacaaaaactgacctttggacttctaatttaataacaaacctttcccatgcaaacctttgctgtttttaaactgccataaattgtctagtactgattgcatcacaaaatgaagcagctctggagtttctccccaaagggagacctaaataagttagggacaacaagagaatctgtattcttttttcactagaactctcaacaaatttttgatatattagaaattgatttacttgtttagtagaaagagagatggttttagtgcatggttggatgtccccacatatgggatgcggcatgtcctattatgatgggtgcctattggataactcaaggaaaagagcattgaagatctttttggaaaccccagagggttggcttgtaaaagattaagaacttgacgtatgaaagacattaaaaacattactttgacttcaatgatggtttggcaggtttttgttttttataagttttcagtcattattgtttaatgaggttaatgccagagaagttgatttggccatagtgcaagttattcattttgttttgactcacttatagttttgctcttggcattaaagaatactattttcagctagtgttggtgaaatccttggcaatatttggtgctattaattgtgatcaatgttcattttatatgtttattttaaataaggaaagcacttaaatgctatcagttgttttattttttcgaattccatttattttgaaaacttaaagatagtcaccattgtgcccttgtcatcctgttccttgaactggatttgcaggtttttgca

SEQ ID NO: 13596 - DNA, 3166 bp, Vitis vinifera
  Intron number 3 from transcript GSVIVT01017407001 (locus G SVIVG01017407001) derived from phytozome v7.0 (chr-ID chr9 ; pos 8084773 to 8087938)
ctataatcatttggaaagctttcaactattgcaaggtacttcattaacttgctaaaaaaacttacgatattttgttattaaattaaaggtaagattaacaaacaatttcttctcattagttacttttctttgtaatatcattaaatttgatataatgtagtctaaatcatcctttcaatttataagttttaattaaaacgcatcaagcatgcacaagatgtttaatataactaatattttcataagtaattgaattttttttatgaattaattaacttgattatcaataaatgcttacatgtataagattaatatagtttcataagtattttaaaattgtcttacaacacacacacacacacacaaggaaaatgaaaggtatgtgatacctttatgctatgtttggttctcaaaaaaaattgagggaaaatgaaaggagaaaaaaatagagaggaaaagtaaaagaaaagaaaagaaaaaaagtgaagaaaaatataaaattgattaaagtaaatacattatttttatatgttactttaacttgtttcacttattttaattcttcaatgtaaagatgaaagatttgaaaatgcataagtttctaattatttttttattttattttatagtttttacaatacaaccaaacataataaaatcattttctttaattttttttcttttcttaatacttttcacgaacccttaagttatgtttggtttgcagaaaatatgaggaacagaaaatagaaaagaaaattaaaaggaaagaaaaagtgaagtaaaataaaaataaatttaaatttaataaattatttttatatgctactttaaacttatttcacttattttaaattatttaaactcatttctaataaataataatggaaattgtagagaagtttgtgttattcaagctttgcaatgacttttcaaggtgaaggaaaatattcttgctgaaattgaagaaggaaataccttcttaaatagcctattgaccgaaaacacattaccctaacatatacacacacctttattatttatacaatcatttaatacttaatcccgttagtgggattctagtggttgtttctatcttggtttccaatatttctgattgatagtgttggattaatgaaatatcataaattttgaccccaataaggaccaatccctattaaatgtaattgggttgacctaagactaaatgttagacccaactaataaaaacccatctgtttgttggagtctaaataacccagccttaggtagggcccatgccttattattttaagatgtagtccaactggtttgacactggattgagtaaagcccaacttatgagcatctgtgcatttccatccatccacaacctactggcatggacaaactttggtcaattaaacctattataaatgtatacaaaattttaagttcaaaagataatttttcttatttagttaggattcatattaaaaaggcacaaagcacgaattttcatgtttaaattcacaaatatcacgaaagctccttcaagctctatggaccattttatttgtaacattatattactcttaattatcaaattaaccaacaaattcttctcattagttatttttcttttgtagtgtcataaaatttgatgtaaagtaatattggtcatcatttcaactttcatgttccaattagatgcatcaagcatgtgcaacatatttgatataactaatatttttataagtaattgaatttttttttctataaatcaattaacttgattatcaatgaatactttcatacatgatattgatgtagtttcataaatatttttaaatagtcatagaagtcttttatctgattcactagaaagaaaaataaactattctaatgaaaatacttgatgatttgaagtgattgcttttgattttatttgattgctaccattattaattgttagaaattggcaacaaatacccattttgcatcacttctatatgcatcgagggaatgaattatatttcatagagctaacagggcaaaactcatacttttggaattatggaaaaggttgctagaaagctaattaacaatttatattatgattaagactagttgggttagaaataattcatatggagattaaaaaaaactatgtaatttagtttagtagcttgggtgctattgtaatgattaatgatctgcaacttgaacacatctactagtgctttctacttgtatagctaaatttatgttaccactttgaactacagtacttacatgagaagaaagcttttccttagtgataatgcaaaagaaattaagtatcaatttttgttaaactaacaagtgatagtttagatatgttttgaatacacttcctttcttctatttttttattttgaaaaaaaaaactctttaatgaaatataagaaatcttatatgtataaaaagtaaagacttaaacaaaaaaattcttcaaattttaaaaatttcgagaagtatttttaagaatttgtatttttagtataataattcctatattttgtataaaagcttttgttcaaaaaaatagaagtgtatccaaattaaaaattaatggttaaattaagaatgtttctcagatcaagggataatgaaagttgtagagagtttgcattactcaacctttgcaactactttttgaaggtaaaagaaaataccttcttacataacatacaatggcaagttctggtttgtaagaaactaataaatgattaagaatatgaataagacttccttaataatagatatgtagagaagaatagtggatgataggaggtgaaaatcttgtaataaaatatcaatatcggttataagataatcaacattttcttgtacctatgtgattaagaatcttgtagctcccttattgaaatataatataaaaatataaataaactatttagaagtgcatgtagttttcaacatgaggaagttcaaaagcaagttaattatgataattttctatagtctatattgaacacaaattattttttctaaaggttcaatcgttctatgaaggttaaaagtttgaattgtttacatatgcaaatgtgaaatttgaaattttataatgttttataattttcttgtagattcaaaaaacttgtccatattcaaaaagctcgag

SEQ ID NO: 13597 - DNA, 5405 bp, Vitis vinifera
  Intron number 22 from transcript GSVIVT01029870001 (locus GSVIVG01029870001) derived from phytozome v7.0 (chr-ID chr 8; pos 834752 to 840156 reverse strand)
ccttgcagttgcggaaactactagtccttctgaaggtgaatttgtttaaatcttattttttcatgttttcaaagtgtttgtttgtctttcttttttctattgttagttatgggtattttgctttctgtatactcacaacaatactgtcctttgatattctcaagcttattgactctcttatgtcaaaattgctagcaacattttctttatatactctgaaggaatgcgttatgtattatatctggtatttttgcctttcagaagctaaagtagtgtatttttagaaaatatttaattttttgtttaaatttaaaaatatgactctattgtgtcaatattgttggcaaccttttgtttaatatactcagaaagaatgtgttatgtgctatgtctggtgctttacccttttagaagctaaagtggtgtattttcagaaaaggtttaaattttgtgttcaatttgatattttaaaatttagctgatgagtatttgatatttgtatatatatatataaatatattttatgttttaataaaggaaatggtgaaaaaaaagattctgcttgggaattttgctagatttgatttaagcaaaaaacactatggcaggagcatcatcgtgtggaacagcaggatgcttcattcagttcaactttgtcgtataacttaggtttctctgccaactaaataaacttggttttttagcttcccagttttcagaatttgtaaatttggaatttgcaagtaatgaagataaagatgttaaattacacttattttagatgtaaatataggaagtgataatattttgtttcattatttgtttaagggttgttattatttagtgacaaagttttattagagttaatttatttatttattttttatttttataatattagtaaaattagtgtcctattagagttaggattttttatctatatataggccaagtgatgttaaacactctagactttttgattaataatattcataattatctggaatctctctcttttacctctatttctttcatttatattcttttctctctactatcctacatcagctagcttaacaagtttattgggtattaattatgattgttgaatctgtagtaccacaatcattttggcagagaatcataaaccttctccaagccccaatgtcattttcatcattcaactcatgggtgtaatcttattattttccttctggtagtactgacttaccaataagttctaatgcctctctctttttatggtacacttgatgttattttctagcatttggacaaaattgttgtgactaaactgttcaatctagaattttcagacactttgaagccatcttaggtccataatggtgcccaggaaagagctactgttactactggaagatccattagtattcttggtattaatggctttgaatcattgataggaatagcttcgatcagttctggataaattatgcaaatgagacatagcggcaccacttcaaccatcgattattcaggttagatcaggagagggtgagtggttcaagtggaaatgaaatctgaaggaatagaaaggagatttatgatagatttgaataagaagtttactctctgatgcttatctttagcattgaactgagtgtatactattgaaatctgtgctgggtgggttgaagtcaagggccatccctttcatttctggaagaaagtgtttgaagtggttgggaatctctgtggcctggtgatggccattgactgaagtttttgttttctggatatataaagctttttttggtagtggagttcgaggactaaaagttgcatttatttattgagctatggatcatggatattcgttgttattttttcagttgaaaatgaataatgattcaagcttcaagtcatgctactggactgggttgacccattgagttgcggaagaaaagagagaataacatggcagcatctctaagcagtgagccgatcatgtggctttggataagccacatacatagacatttatggagctgagagaagggcttaggaaaggatgcttttagctataggtacatttctcaagctggttaaaagattggttatttttaagagatctgtggcaggttaacacgctaaggtctcttaaatcttaggtgcaagatgcagtggatggtccacaattgagcaaaataaggagaaaactaataaactagtgcaatgctaagagaggagcctctactctcgttgattttatcaggggtctactgttccttgagtttggtgctttatttttctaggagtgattttatttttctttgtatacatccttgttcaagttatttttcatccttccttttcctgttattcttacttttatctagacaattcaagtatagtttctaattttaaaaaaattaaaaaatctctggtgattgagagtagagtttcttatttaacaccactttcttagattcttcttcctaagaagagaggggaagaagacattaaggattttaggccaattagccttgtaggcagtctttataagcttctaacaaaagttctagcaaataagctaaaaggatgatcggaaaagtggtgttagataaccagaatgcctttgtgggaggtaggcagatccttgatgtagctttgatagaagatgaggcaattgatttgagaaaaagaaacttcaggtctattttggtttgtgaattggatatagaaaaggcatatgatcatgtggcttggaaatttctcttttcaattatggaaaagatggattttggtcctaaacggagaaagtggattcctttttgcatttctactataagggtgttagtcttggttaatgacactcctactgatttcttccaaacttcaagaggcttgcagtagggggagatcctctttccttccatcattttgtgatagtcatggaagcccttagttgtctattatcaaaggctaaataggatgggtttattaatgcttcaaagtcaaaggtagagggggaggagttatgcacatgtcctacctcttatttgcatatgatgctattctattttgtgaggccaatttggatcaactaagatattgggggtgggctgtaattggctttgaggtcatgtcaagtttgaaaataaacttgcataaaagtgagcttatttcaattagagaagtggagggagtggatagattagcatctatgtttgggtgcatggtagggaggcttctcacttcttatcttagtccgcctttgagaatgcctcacaagttttgtgttgtgtgggatgttgttgaggagagattcaggaggagattggtcccttagaagaagcagtacttgtcaaagggaggaagattagtacttataaagtgcactatctcaaggttgtcgatctcttttatgtctcttttttgtaatgccctggaaaatgaggattagattaaaaaaaaaatttagagagattttttgtgaaataatctattagaaggtaataagatacatttagtgagctggtctacagattgtaaggatagaaggtttggaggcttgggcatcagaagattggaggtctttaattgggctttacttggagaatgtttgtgggagtttgcccttgagtaggagagtctgtgaatacacgagagacttgtggaatgagtttgtggaaagcaagaatgaagatatcgattttgatggatatattggtaacctaattttatggatatattaggatatattgagaaatatcgatggatattttgacacaaaatatttttttttttatcagaaacgaagaagaatatattaatagaagaacagatataggagaaagaaaagaaacaaaagaaagagaaaaaaccaagggaaggatgagacgaaaattgatcaaaactaatgaaaatgttaggaaaaattctaacaaataatataagaagttaaaaatagacattttgtagttgttttgttgaaaaaattgatatatatatatatatatatatatatatatatacagatataaatatgggaaacatcagtagaacggaaattgataaaaaaactcatagaaatattgggaaaaactccaaaaatgatagaaagattaataatgcatatattgaagttgttttaattttaacaaagaaattgatatatattgaaagatacaaaagaaatgatgatatatatgtagaagcattttttatttaaaaatgttgattatttaaaattttatatttatcatgtatttaattactatataaaatacacaataagataatcaaaattaagttatttatgataattttatttgaattactttatgatatatagtatataaaagattagtatgtgtagacatatataatgttatgtaccttaaaaacaaaaaaaacatggttgggttattggtatgggcaacacatctcttggacaaggtccctcgttcaaacccctttacttgcatatttagggttgtttttctgtttagctttaaaaatgcattcctaatcccacatcggaaatgggagagagagtaatgccatttttattaggttagtgcccatagggtggcataagcatgttgggctcatgtatgatggaggcctaagattttatagagcccaggcccactaccgttaagagttttggagggaaaattctaacgtggctgaaatataggggaaaaatcactcaattgagatttcgacggggtttattgtgtcaacatgggctgatacatgaaatatcagcgatattatgacgaaaaattgcgacatttcaaaccttggtggaaagacattagaaaatgttggaatgatttcagcttcaggagagctattcagctcaaaaatggtaaacgaaccaaattttggtgggatatgtgggtgggggagaatcaattgaaagaagcatttcttttttttgtatagacctgcctcttctaagcattttatagttgtcaatttgtgggaaaggggaggaagcagatgccatagttagtgcaattcaagagacctttgaagattggaaaatggatttcccagccaaagaaatttgtagggcttgctatttgttatatgtgatgcttaacttgcttaagcatgtgggaattgattaactattctcataccttatgaaatgacccaattgataattggttaacaaagggaaatagataatttctcttttggcatataacaaaggattggcatgaaaaaaatctgttttctcattttcatgcttgttacattgttagggcttgctctatattctatgtgatgctcaacttgcataagcatgtgggaattgatttactgatctcattcttcatgaaataagcttatgatttgtgtcctgttttgcagtcactgcactgcgagctgtcaagaaaaggttaatt

SEQ ID NO: 13598 - DNA, 11073 bp, Vitis vinifera
  Intron number 3 from transcript GSVIVT01003352001 (locus G SVIVG01003352001) derived from phytozome v7.0 (chr-ID chrU n; pos 9260953 to 9272025)
ctttgcgggtattgagttcatctcatttattagttgatctaattgtatgttttaactgcttagagttatcaatgttctatttactttccaaaatcgcaatattgcaatactatgaaaatgaaaaatctattcctatttcagaaataattgccccagaaacttgaaactaccggacaacattcacaaagagaggcacccttctatcatacatttacagggtcgccaagttttgatggttgcaatatagtgtctgatttgttgtcatgtgcagtgtcttcttttacatgcctaaaaactcaaaatcaatacacagcataaaatcaaataaaaggatacaattaagtaatattaataataaagtcacactaagatttaataagagtagagtacacaattacatagatcaaagccaagatatagtgatacacaagattgagaatggaggaatggaaggatcaagaacacacttagaaaatagactgtaatgtagacgtgcctcctgcaaacaaccacacctctatttatagattcaataaaccataaaaaataggtctaaaacttgggaaggttgggttgagttggtgactaacccaagctcaacgtgaattaagaaacaacaatcaattcaaatccaacccaacttgacctctaatcgaaagtacttaatccaaccttatttttctaaggtgaggttgattggattatatttgggttaattaggttgtatgattcaaaatttatccataattttttttttaaattgatatatttattccaaaatttaaacagtaaatgagacaaaattttaagatgacaaaaaaatataaaattatttatcattatagaaaaatgaaaagtacatgatataattataattttatattttcattaagaacctaaaaataaagaataaataaaatgaatattattagatgggataatataaattataaatattataaaaatattaaatctggttcaagttggatttgggttgttcaaaccttgacctaaacttaacgcaaattgagtttgggttataaaaacttaaccctattccaacttgagtataaaagttgattgcccaagccaactcaaaagtgaggttaggttgagccaaccctcccaagtttcacccttaatcaaaagtgaatacttaaatcttatacatgtttatgacaagattccttatcctaataaaggcacatgtcctaaaaaggtgaatttgtgttgtcctcacttgaactttagttagcattctgaaaagataataagtctccaactttttgatgagaaagagaattctaaagcagttttaaatatgtggagaccctttagtgagtggtaaaggaattctaaaacagttgtcctcatttaacagtgcataatcctgcgcatctttttctgttatcatggttgatgatgttgtggatgcattatcttcttctaaagctataaaaagtaccctcttaagttcttttttggttaaggagtgtttttaagcacaaatctctttcatctgtgttgataaatctggtacatttgttagtctagctactagtaagcttattggagtggaaggaaggaaagataaaacaaattttataggaacaacttgtggatacaatgctaagaaattgaacttttccaccatctaactaagatatgccactcaagataagagacatagtcccaaaactcatccttaggaatgacttcataagttcatttcaaaatccatgacattttgtataaggtgaagaatcagaataatatttgtctattattcacttacttattggtagatttaaacttatttaataactcctttaatagaatggcaagatatattgaattggtcccaaatattggaccaacaattgaaccaatttggtatgtctttttagaatctaaagtctaaattggatataccaattatgagtaaaatgttcattttgatattataaaacatttctcatgcccttatatagtgaaaataagtacacacacaggtcttggagttagaaagcctaagaaggtcaaaatcgcaatctctataggagactacatatagagtttggagctttgagcatgctataaatccaccaatatccattaattatatatatataaatccacctataaccataaagattgcttcatagaaaaaaaattgcctgtcttcataaggaactaaatggcctctaagatacatagaggcaatttttagagacttcttggatctcatttgggatagcttcctattttgggctttggctaaaagctaaagccaaattcataattgttttaaaaaggcaatatgggtattgtaaaagttttaatcaaacatgaaagaacttcttgccaagccaaaataaagcatctatacttggtttccatattaaactcttttttcaatccataagatctttgaacaaaattagccaaacgagcataaatcctcttattgagtttaaaagcgaggttttagcttctcaaaagtcgaattaaatagggacttagaagtatcctcattctctattattattacaacaaccgcttttgagtttataaaaggggcatttacaccttgaaaagaaccatgatttttagtctacaatgggttgcttagggcaatattttagggagatttcttttatataacaagaggcataacaaggctcttataagtaataatattaaaaaatgaggacacttctaagaagcctaagaaaattgcctctctatatgttaaaagccatttagttccttatgaatgtaggaacagaaatatctacaaagtaatattaatggatacaggttcaatcatccaccacaatctgaggaataaagagagatttatagcacctatcaaaataaataaataaagagcgatttatagcatactcaaagcttcaagttttggaagattttggatgtaatctcttataaaaattagggatttgaccctaaaaagccaggatatattaggctttctaataccaagtcctatgtgtatactctttttgactatgtataagggcatggaaaaatgttgtgtgttattaaaatgaacattttgctcatagttggtatatctaatttaaactttagatcctaaaagatatatcaaattagttttaatatttgttaaatatttgggaactaattcaatatatcttgtcactcctattaaataagtttaagtttgtcaataagcaagttgataatagacaatcattgctctagttctttcccttatatgggtttgatgaattttgaaacgggcttatgaaatcactttgtgggaaaagaatgcttgtagatgtagatgatgtggtggtttggaacgaatcaaagagcggcaaattctcggccaagtcttctaccttgctctagaagcggactgccatgttttgtttccatctagctgtatttggaatgtgtgggtacaacccaaaattagtttctttgcgtaggaggctacatggggtaaggctttaaccctagatcttgttcagaaaagaggatggtccttagcaaatagatgctttatgtgtcttgagaatgaggagaccatagaccatttgcttcttcattgttaaaaaacaagggccttatgggagttactttttaccttggttggggtgtcttgggtgttgccctctttagttagagagtctcttcttagctggcatggttcatttgtgggcaaaaagcgtaggaaggtgtggagagctgctcctcttcatatattttggacggtttggaaggcgaggaatagattgacattcaaggatgatgagttgtcaatccagagattgaaatattcctttatcctctctctttggtctgaggctaagttgtttatagtcgaatgccctcaatctatggttaattttattgattggttgggatccttttaaggctgttttttgggctagttggtttttgggtcactttctttttctttggcctttttggtggtgggtgtatagtatttttttttttttgataggtaaaagagattctattaaaaaaagagacaccaagaaggcggcacaagatacacaaacctatacacccaccttcaagaaaacgctaaataaaacaaaaagccccaaaatacaaccctaattagagcccatccaatcgataaaattagctatagttagagggcaatcaactatgaacaattttgtttcagcccaaagagaaaggataaaagagtatttcaatctttgaattgacaacatatcatccttaaaagccaaacaattcctcgccttccaaaccgtccaaaaaatgtgcagaggagccgctctccacaccttcttacgctttttgcccacaaaagaaccatgtcagcttagaagggtttctttaatagaagaaggcaacacccaagataccccaaataaagtaaaaagaagatcccataaaacctttgttcttgaacaatgaagaaggagatggtctatggtctactcattctcaagacacaaaaaacatctatttgccaaagcccatcctcttttttgcaccttgtccaaggttagtgctttgccccacgtagcctcccatgcaaaaaaactaatcttgggctgcacattctcattccaaataaggcttgaaggaaaccgagtcgaacaccccgcttcaagggccaagtatagagatttaaccgagaatttaccactcttagtttcagtccaggataccatgtcctccacatcctcaataactctgttacgatgtaaccgctccataaaacttgacgcttcctctacctcccaatcattgaaagctcttaaaaagcatggattccaacccccccatcccccctccgccaaggagtcccaaacatctgccacactttcttccttatcaacagtcaaagcaaatagagacgggaaggacgaacacaaaggagaatccccacactacttatccctccaaaacctcaccctcctcccattaccaacaatgaagaccaacctattgctcactaattcccaatccatccttatccctttccacaaccccaagccatgagcctctctcacttcccgagaggaccaaccccctctctcttcttcatatttccctctaatcacttaattccataaagcctctctctcattagcaaaacgccaattccatttagcaagaagagccttgttgagaatagataggttttttacccctaagccccctttcttcttacttaagcacaccacctcccatcttactagatgaggctttcgctccaaattacccccaccccaaaggaagtccctttgaatcttttctaatctccgtttgactacactcggtaagcacaacaaagacataagatagattggtaaattcgataacgtgcttcgaattaaagtcgtcctccctcccttggataagtatcgtctcttccacatacctagccttttacggaatcgatcttccactccatcccaaactgatgttgatttgaaagaagcccccaagggcatccccaaatatgtggacggcaagctacccactttgcaaccaaactcccaagcaaggtcatccatattctctacccttcctacaggaatgagttcacttttttccaaatttattctcaatcccgaagtggcctcgaaccacataagtaaccaactaagataagtcaagtggtcttgagacggattacaaaacaccagagtatcatcggcgaacaacaaatgggatataaggaccccttcttcactcctccccttgaccctacaccccgataaatagcctccctctacagcccttttgagaaaaacgctaaaaacctccattgctataacaaagagataaggggaaaagggatcaccctgccttaatccctttgagctttggaaaaaacctgtaggggttccattgaccaacacagaaaaacttgcagtggagatgcaccatttaatccacctgatccatttctccccaaaacccattttctgcataactgtgagaataaaagtccaatccacattatcataagccttctctatatccaatttgcataagatgacactctcattatttttcagagtcgaatcaatggcttcattggctatcaacattgcgtctaggatttgtcttccttccacaaacgccccttgagccttggagatcacctttccaaccaccttttttagcctattggctaagaccttggccaaccacttatacaagcttcccaccaagcttataggcctaaaatcccccaagtcttcagctcccactttttttggaattaagacaaaaaaagttgcatttaggcttttaacaaattttccattttcatagaactccttgaaaaaacacaacacatccgccttcacgaaatcccaagcaaattgccagaaagccatagagaatccatctggccccggagctttatccccattgcaactcaacaaggcattgaacacctcctcttccgtgaacgggctctccaaagtactagcatccaactgatccagagtctctaactgcagcccggatatagaaggacgccaatcccccgaactggacagcagtaacttaaaagcattgacaatcccttccctctaattccattctcctctatgcaccaagctccattaatcttgattctgtccacattattcctcctcctgtgagcgttggccatcttgtggaaatagcccgtatttctgtccccctctttcagccacacttccctagatttttgccccaattgatttcttcaagtaaaacccattttttataatcttccctagcttccagctcttccaaattcagtctgctaattttctcctttgcatcccaaaactgcacctgctccaacgccgcattttttctgagctcaatcctaccaaatgagtctctattccactcctttagcttagccttcagaacttttattttttcatccaaaataaaacttgctgatccattgaatctaatccctcccaccaagacttcataagctccttaacaccttccactttcaaccacatgttttcaaatctaaaagggaagggcctcttctcacaccccctacatccagcataatcgggaagtgatcggagactggccttgaaaggacacactgcctcacgtcaccaaagtggttgtcccaaccctcattaatcaagaacctatccagccttaagaaggtctgattattcacccctccgttccaagtaaaagggcccccgactaaaggcacatcctttaactctaagtcttctataatttctaagaaccttctcatgttcgaattcaggctcccccctctgttgcgctctttaggacttaggatggcattaaaatcccctgcagcacactatggcccattctagagccccttaatggcccccaactcctcccaaaaactctccctttctctcctcaatattgggtcatatacccctgtaaacatccacatgaagccgtcctcgcagttcttaaaaatataggaaatggaaaacaaacctttttgaatatcaaccaagtccaatactctgttgtcccaaaacaccactataccaccaactgcccctcttgaatccactgccccccagtcaagatatcttcccacccctaggctgcgaataataccctttgacatgtcttggatcttagtttcctgaaggcaaaccagatccaccttatgcttctttatcaaagcttttataaccttcctcttgtcacaattgttggcccctcttacattccaagtgagcatacggaatttcatttagacctgtacgtgcttaccccttcttctcctccttcttctccaatatagttcactatccattccaattttctcaattctctttcaaattttgacgacttcaattttttcctttttttgcggtctaattttcctttctgaatcttcctttctttcattcttttcagtaataacaaaatttccctttcgaatccctccgtcggcattccaatatagcggctaaacttagccaaactactagattgccaacaaggttccccctcttcttccctctcctccatatcctcatggaggatcctatccgtaaccccctctgatttctctccgaaaacccctgcttccctacccgccatttgcaatacctcggcctccctcccatccgcccatatcatccttaaaggacccataactgctcccccaacttcattcgagctactgctctgattgaagaccccagccatggctacactttccccatctcgaccagaaggagtagaagaaagagatatttcccgtttccccaaagaaaacaaagaacgagaagattgatctgaatacttggatcctccagcaaggcttcgttggtgaactctgtgagattgacggccggtgaacgcgaccccatctgagagcctatcatttccctctcaagctctccactgacgcccagtcccctgtcgggagccctagcctcaatggatcgttccatcaccacctcagggcctttatagggtaaagacttgggccggcccatttccattaattctttgtggccttcagtcacttggccctcctccgcgggccttcgccccaagtccacctccatttgtcggcccaacgaaaagaatttcccaggcccgcaaatagttttcttcccccacgttatttgctgctaattgtggacctgtcaccatctgctactttttccgacatcgcttcagagaacgcagctgcctttctgcatcccctttcaccattttcacacggcacgtccacttttgcaggttctccatgcgtctgtacattcgccattttgaaaccaacgcgtgagtctccttttccttcatccctaacctctcgctcgttgcccatctcgtttctggtcactgggaccactaccgtcaaccctggtttcacctctcaccatagctgtattgaataacaaacaaacccaactgccacttgcaatgagctcggccactctaagccttccgatctcactaatagtctggcccattttaattccttaaattttgcagtgtcttcatccactgcgaggaaccccccgcaacaatcattgatttttctgagtatctcctggctccaaaaatgcaacggcattcccacaactctcacccagacactcttatccctctcgccattatgagaacaccccacctttgggtcccacctttccaagttcaggaatgattccttaaaccaccggtgtatagtattgtataccttgcataggtttgtataccttgagttgcttttctggcgtctctttataaatgaatttttctttacttgtcaaaaaaataaaaataaaaaagacttttggaactatgtttcttatctttagtcaaatatctctaattagatggtgggaaaagttcaatttctggactttatatctggaagttatttccataaaatccattttgtctctccttccttccacctagatgggtttagcaatggttggatcaatagatgtaccatctatattaacccatattaaagagttatgctcaacaaaacttcttatctaaagaagaacttaagagaaagattttgatggctttggaagaagacgagaaagattttgataatgcatccacatcactagaataatggaagaagatgaggaggattatactcagtcaaatggggatgattgctttgggattcctttaccactcactaaaaggtctccacaaatttaaagtcgcaatggtccctttctttttaaaaagttggagattgtttttctctttaaaaggttgattgaagagaaagtgaggatgacatgactccacctctttaagacaagtgtcttcatcaagataagagatcttattacactcatgtgtaagatttgggtgttcattttttctactttattgtattcttaaaaaggggtgtggttgtttgtacgaggcacttttgttttctaagtgtgtttttatcctccccttcctccattcttagtcttgcacatcactatagcttggcttggatctatgtaaaatttcaatatgatgtattattaatattactgtgaaattgtatcattttatttgatttatggtgtctgttaattctgagtttttattctatggtgtatgttaattttgagtttatatatacatataaatatatataaactttatggatatatgtatatgtgtatgtctctatgtaagtgtttatttatcagttcatttttttgtcacctttatgtgtataatcgctattggaagagtaagggcctgcttggggacatttttggaagcagtttttgagaatagttttcaaaaaatgttctttgatgttatctagaacaaaaatttgtttgggaatttggaatatgctcaacctgttttctatatttccgaatagttcttaaaaacttttatttgtggtgttttattttcaataattctccatatttgtaaattattttttaaaaataagtgaaaaccaatgaaaataattaaaatatgttctcaaaaaacattttatttttgaaacaagttctcaaaagattggtttctataaaaaaaattactaaacatgttttcaaatctggaaaacagttcccaaacacgctataatgcccttgttgaggtgcacctatagctatctctttgctatgctataggatataatttttttttttccttttaaaattttcccttttatttaatatgattaattattgatgagaagccttccttcagattgaattaggttgccctgggaaaactgtgttctatccattatatatatacacactaaaaaaaatgtcagtataaaaactcctaacacggatctgacatgcaaccaatttggctggtaagctttgacttagtatgtgcaagctcactctttatatcgcttattaaaactgttctgcttttcttgcttaattttcaaggcttggggcagaagtgctactttttttgcttgccaataattgactgttcttgctccttgttagctgcttcttattagtttttaactgcatttacataggagaagtacaagaataaaccttggctcttggagga

SEQ ID NO: 13599 - DNA, 5300 bp, Vitis vinifera
  Intron number 3 from transcript GSVIVT01020652001 (locus G SVIVG01020652001) derived from phytozome v7.0 (chr-ID chr1 2; pos 3419773 to 3425072)
tattcttcttctaaacaaagtagaccgtcctgcaggtgtgactttctatagcatatatattttaaattttatacatgaaatgttatttttatgcaatttttagtgatgttcttttgattatcaaagcaaaacatagataaataaaataaaaagataaaaaggcaagatgatgatcaattgcttccataaagacaaggtctttaaaaattatgttttcgcactaccacctgccatttcatcctctcccttgcattttttttttttccaaattccaacttatgatttctcgtgttttcttttgttaaacattgtacccttacacatatgcccttcccttttacaattctatgtaagattagattttttttttccagtttatgtcttatagaagattcaaagtcttcataatattcttagctagttaacttggtttagagagaggaagaattggtgctatcggttttttgtcatctcaaggcttcgactgcttggctgtttaccttttttgatggggttgtggatgcggaaaatttccattagagcaggtctagatctggtcacgagagtcttttttgcccatcataggccatcaaatgaggttgattgttccttttaactttgttggtctatggtagaaggtagttaatgtttatttcaaaaggagactcccctttaggaattaggatgggccaggatggtttcttcgtttttgttgccaccacttgaaataaaagtcttatctgaaagctatgctggttgagaagtggcctgttctactgctaaacgtgtcttctccagggggtgaggtgactaaaatatcctgggagttttgaatagttgcatttgagagtatggtgtttggtggttaggattggtgccatgtatgctatttctttgatggggcttcctgaagttgtgggtaaatgctttatggggggtttcttaagtggttaagatttatgatgtgaaggactatttcttatgagtgggctaatcatgtgttggtggaaaagtagggtttatttaatggtgagcattatttcttgactgatgagtgcagttcactaagtgttttagagaagaggtttcttatgaaattgttgttttagtagattgggtttccaatcctccatcttaagggaggttggaatgagttggaaactgatagggagaatttgctttgtcaacaatgatactgctcaatcttgtataacaaatgggcttgtatgttgatggaggcctggaaaatgtcaaatcctttttcgaattccctttggggctcatccaatcactttcattgttcatgtttggtgagaattgattgggagagtgggatttgttatggatttctttgaggatcaaatactagaagagatttaatggaaggtgctttgcaaatgatggaacatttgtatcttggatgtggtggatgcttgacatgataacgacactgtgatttgaatatcctataatggtaggattagggtacaactgggaatgttattttttgagtcacatggaaaattttcttaatgtggctagcttaatattggtaatgtgtgatctcaaaaatcaaatattattatttagaattggattctatggatggttgtttgattctctttcattgtgatttatatttgatctttgtctatcaaaaagactattttaaaaaagaaggcttatattacgtatgagctaggggaaaataaagtcctaagcacggatggctttccaatagtttcttggtaaagttgttggttccctatgaggagaaaggtgatggactttctcaaggagttccatgtgatgagaactttggaaataagccttaacaacactttcttggttccaaacagttgatgtatttgtgatgggttttctaatgctttgaaattgtttcgcgcttgaaaatggatcttcaaaagagcttgctaattcccatgggggaggtttcaatagttgggagttgtgtccttgggtgttgcttgggtgagttaaccatcatttatttgttttaataaccgaggaaccttccatgaccaagcctttaggactcttcatggagatccaaacctgagggtgtcgaccgccctgcaacaactagcatcgggtaaattcaaggtatcattagtgacaagattcaaacccaggacatctgatcaaaaaagattcaaacccaggaccatgtgccacttgctgagaccacacttcttagtgtttgtcctgaccaattgggctacgtaggattcaaacccagtgtttgtcttgaccatgtaccacttatttttcgcttttctgtaagggcttctttaagattctatataatgtggtggacaaacatcccaaaaagactttcctcttggaagaagcaacatttgttcaagtggggttggtcaaatcttatcaaaagcactcctcttgctcgttggtatatttcagtctttgttgtcatccttagggtagttagaatctgattagggaaaatctaaaaggatcatatattaggaaaccattttttccaaaaaaacaatttagtaaagtagacctttgttcctaggaacaaatgggtgttagaagtgtttctaccctgaacaaagttttgcttggctagtggctgtggaggttttgcaaaagagcaagattgcttattgaacagggcaataatgggtaaatttggttctttctcttggattccttgttcagctaaccaggtcgcatatcaactagccaaactacaagcaaagcatttgacctcctttgttggagattgcctttccccatgagtgtccaatgattgtaatcctgtatgtatgtgggtttttatgaggagggtctagtttttatggttctagctcggggttactttctatcatatttgtacatctttgaagggttgcttatccttcttgtattttatcaattgattgatgaatgaaatgtttattttttgaaggaaaaaaaaataatgggtaaattttgtgtcattgtggggttgaggagttttggtctaaaacttgcatcttggttgggaatggctacacaaccatagatggtgtgaggattctttcaaagaactagtgtttgtaaaatatttagaattgtttccaattgaaatgtgagagtcatagcgccttgggtggtgaaggagggcaggggtctctagagacattgtttttgtaggaagctccatgattggaagttggaggggggtagtgggctttcgcaagcatatccacattttgactttacaagggattcttgaggataagttagcggagagggatgcttagcacgaacaattttttattaagtcttttttttttttatgattaattttttattaaatcttttaatttatttttttattaaatcttttaatttattttttattaaatattttaatttatttttctttatcttctgaaattttcttgcaatttcttgcaaaggaggtgccaaactcatgggtgcctctaaaggtgtgcttttctacttgggaaatagtttgggaaaagatccttatagttgatctaactcataaggacgttgggtttatggatattgtttcttaaaagatatagagttaagaaatcatatccttctctgatgttcaaaggtgtgaatgctttgtgatctccttacttttattagttcattaggtcaaggctatggtgtgcaggcttggttcctttccttttcatcttttccttcttgcatttcatcactctttgtatacttttgtataatagggggtttcactttcctttcttaggcattttttccctctaatatcttattcattttcatatcgtatcaaattttctttttacaggaactcctctttaaaaatttttttatgggtgatgttgatttcataagtctagggtctgcttaggaactattcttgaaaaaggttttttagggcttgtttggtaactatttttgaaaacagttgtttgttctctagaacaaaaaaaaagggaaaacatgtttgacaactagaaagcagaaaacagttttctattcttaaaaatagaaaataaggtgtttttggataatatattttaattgtttttagttggttaatgtacttatttatttaatttttaattgagagcctttttgtgatgaaggataactctttctagtttagaagtggggaattatttgggtccttccaaggctgctgttagtggtgaagataatttttttatgcttgagcatgttatcaatagaaattagatatgccaaattggtgatgcaaggagtgatgaagaattggttaatcttttatactttgcagtggctagaaatcagaggccttaatattctctttgtgatgtcagttagttcatgccttgtttggtccaagaatggtttgacgggtggtggatcaaatttggctgccataagaggaaggagtatattcagaaaacatttgagcaagttaaaagatgtttttctgaaatctttcctttttctggaatcccaatggtagatttgtttgacagaacttcttttgcagaggttttggatttgttttaccaatcttaattcaaaatttgcttgtgtatgaccttgctacatttgactaataaatttttagcctctatttgaatcacagaaagtacttaggaaagaaaacaagtaggaagagatcccaaatctcttgtttggtttgccttaaaaatatgaagaaaatttgaaaatataatgaaaatgttctaattcttcattgtccacatataacaggaataaaaatttgaaaagactggagaaaacatttattaaagtcaaatgcaatttttcttttctttcattttttctttctttttccatttttcccctttccctcgtacttcacatgatccaaatggaactttaatcttcaaaaagtaaaaactctctggatatgggaatatgctaatcctccatgtggataatcttgaaaggaagccaatagcataagtttctgttattttacatactggaaaattacttaccaaaagaaaaaaaaattgtacatactgaaaaattactctgttttactttcctgttgaatgataggtatttctattgaattgaaatgtaggcaagtttgttcacctaattggaagaaacacatgaaataaagttgaatttatatagttaaacattgccgccagtagttcctagggccagattgccgaaacattctctcttctgaatttctttactgaatttgcaactttttctttggcgtgcaccaattcttctgttcttgattgttttttttgcagttactgaggagaggtgtg

SEQ ID NO: 13600 - DNA, 5100 bp, Vitis vinifera
  Intron number 1 from transcript GSVIVT01036588001 (locus G SVIVG01036588001) derived from phytozome v7.0 (chr-ID chr1 3; pos 18724087 to 18729186)
tcaagggagtaaacctcgtcgtctacgaaggtgaggttcgtaacagtcttctccaccgcccaattatacatttttttttccctctgtttggttgctaagaagagccaggaaacaagaaaagaaattgactggtgttatttttttgctatcaattttcaattcctccacgttgggattggatagctgttctttcctgatacatatttttggcctctttggacaagacatttttatttttttaatcgatttctattgttgttgattagctagaaattgccccattttttccggaaacatcctctgtgtatgggtttcattatttcttgtatgcatacagaaaataattctcaatttcactgccaaataagcccccataaatttttggaattggttggaattattcatctttcttttgattccaacgacctattgtggcaaatgctcttcaaaaacgcattttgtaactaatggagcaggtgattttggtctattattaggcatagcagctcttacacatgatactactaagatagcagtgggaaagcttcctgattttttcctctttggacataccttaaatgatatatctatatctttgataagaacataatggtattaagctttggtcctcataaacaactagacaaggaaaaacaagtagttaatatagtatggttaaacgaacagaagatatattgagaaataggaaagaacttgtacgtgttccaaactcttcatttttctatttaataaagtgagacatgttggggatagattggaagaaatatttgttgggtttgactggtattttgttttcctccctttgttttgcttttccttttgcctagccttttactttccctctcagtttatggggaccaagcacttgagttgcattgtgggaaattttttgaatttggattaatgttatgaattgacataaatattttgaagtatggaataaaaaagaacataatatctgaaatatctaatttgggttagacctgaagaacatatggaagagcctagaataaataatccagtaatttgtaataattgttatggtttactcttagcaatttttttataggccataatgattctattgaaatgcagctaacaaaaggggactgatcttacatacacaagaagtatacaataagtgacataggcactaacaatatcttaaatcctgcctaaagtgatgattaaatctagtgaggaatcaaagttacaatttgacatcatgttagactgcaaaagcaaagtacaagtagagcgattttcaatatcagtttgaacctctccttgtcctaaaaacatcctctgttatgctctctccagaccaaaacaaatagaggggtagtcctcgaaaacctcttcctactcttttccacaaagttcccatgacaacctaacaacagttccttgattgagcatggtaaaacccataaaacaccaaaatgagagagaaccaagaccataaactttgtgccaccttacagtgaatgataatatggttggttgatacctcatcttgcatgtataggaaatgtgaacttgctaacaacctagagaatattgttggttaataataattggctctactttgtattttctcgcatttgtttccttgtagttttgtttttatttggtgggaggattcctcatccttctcttgtacttcctttttatcaatatattcctttgtcgtttcctatcaaaaaaaaaaaaaaaaattggctctattgcaatgtggaggaaccttgtcctacccaatatggggcaatctggagcgaaagcctcatttagtaagatgggagttggtgtgtttaagtaagtcgaaaggaggattgggggtcaaaagcctttcccttctcaacaagactcttcttgctaaatggaattggcgtttcgcaaatgagagagaggccttgtggaatcaagtgattagagggaagtatggagaagatagagggggttggtgctcgcgggaagtgagagaggctcatggtatgggtttgtggaaaggaataagggtgtattggaagttggtgagtgataggttggctttcatagttggtaatgggagaagggtgagtttttggagggatagatggtgtggggagtctcctctgtgtatgtcctttccctctctttttgctttgacggttgagaaggaagcgtgggtggcagatatatgggatcccttggctgagggggttgggggggttggaacccctgttttttaagagcgttcaatgattgggaggtagaggaggcagaaagatttatggagaggcttcagagtaaaaaagttattgaggatgtggaggatatggtgtcttggactgaaaccaagagtggtaaattctcggtcaagtctctctatgtagcccttgaagcgggtggttcatctttgtttccttcaagctttatttggaatgtgaatgtgcagcctaagattagcttctttgcatgggaggctacatggggcaaagccttaaccttggatatggtccagaaaagaggatgggccttggcaaatagatgctttatgtgtcttgagaaagaggagaacataaaccatcttcttcttcattgttcaagaacaagggcgttatgggatcttctttttgctttatttggggtgtcttgggttttgccttcttcagttagagagacccttctagttggaatggttttttcctaggcaaaaatcgcaagaaggcttggagagctgctccttttcacattttttggacggtttggaaggagaggaatagattggctttcaaggatgaatcgttatcaattcagagactgaaacactcttttatttttactttctgggctaaagctaagttgttcatagacgattgccctctacctatagctaattttattgattggttgggttctaagtaggtttgtggtattcggttctctttgtcttttggcctttttgaaggcgggtgtataggtattgtatatttagagtcgctattttagcgtctcttttttttaatgaaatttatttacttatcaaaaaaaagttcccatttgtagtaaggtatattttattttattttaaaaaatttgtcatgtggttactaaaaaagttatcggagcatctttttaagtacaaatatattttgaaaaattgtctatttaaccttgccatctaatagggtaggtggaggttcttctatatatgtgtagagctaagtatttttcaaaaagaagacagccgtatacatatttctgagagttttacgtctgatcattttattaaagggcatgctttctttacttaaggcatatgaaaactgatgtatttttgtactgtggaaggttgagcttgttgtgcttgttcatgccttaatttaccttacaacttttgcaagtaagaaagttattattattattattttgtaattatttatttataggagaaagaagaaagctattagatgtaccttcaaattaacctaaatatgctttcaacctagcagtagctgatgtttttaccttcaaaatgttatattcatggagaccgagaactatctcttatgggttcagtttgtggaaggatattcagaaagtttgggctgaattttctaaatttgtgactttaaggtatggaatgggtagaaggtatttttgtggactatctatagcatggggagcaggctttggagttggattacatggagttgtatagatcaagaagcattaagtagatgacttggggtgggatggagtgttggcttccacttgttaggggttttcaagattcaattctaaagttgatatctgatttcttagaggggattttgcctagtgaatgtaagatgggagatatggatgtaattagatggaagggagctatttaggagccttttttgttaaatctttttacaaatttcgaagaggctaacaactcaagtggcacattccctaggaaggaggtttgaggcactcaggctccactagaagtctagagctggcattcttttccttgttggcaactaagaaaagaatttaattggtgctccaactaaggatgggaggcatgacttttctgaattggttttgtgtggaggggtggtgaaacaactaattgtctctttcattgaggtatctttaatgaattacgggcattcattttcactttatatgaagtgtcttgggtgctaccttgtatagtgcaggattttgttttcaagttggcatgggcattttggggggtgagcgatgaaaaagtatgagggatgagggttttttttttttttttttttttaattttttctggtggtgtatttggaacacaaagagcaaataccctttagtagtaggaattgtcaatttagaaatttaaaaatattctttagatatttattttgtgagtgttactagtgctcaagttgctaatgttgttcagcttgattggtcctcagtgtgtagaacaaaaggggttgaatggaaacgaaaggagttttgtagggctagtggagatgcatttgtttttcattttagtttatactggttggctaggttaccttgtattgtggtagagtttagccatgtttgatcagtttttgtagctttggggaggactcttcatccttctcaagtacttttatccacttctaatacaattctgtttctgattaaaaaaaaaaaaaaaaaaaaaaactggtgcttaagttgcttcctgaatctttactattagaggtttattaattataaattgttggagggttgagtgctctgagaagtccctagcaggagctatgcatgcttaatgcctaatgacggtgcaatggcatttgttggccaaaaaattgaatgtcatatggcaccctattactttattgaagttagagttaattctgcttaataaatggatattgcttgtatttatctgattatctcattaaagttcattgtttcatgatgttttggctattatggtgcttttaggtttttattcattcattcattttgacatcaggaaggtagtaatcatgtaaaaatttcatgtatttctgatgtttttgtctaatgtggcttaaattctccatttctactaggtcc

SEQ ID NO: 13601 - DNA, 14253 bp, Vitis vinifera
  Intron number 20 from transcript GSVIVT01023021001 (locus GSVIVG01023021001) derived from phytozome v7.0 (chr-ID chr 12; pos 16785753 to 16800005 reverse strand)
tactctgtcgtgaggttcctataatttttcagaaggtgaagctttggtttggtttggtttagtgatgagttgttatgattaatttgactttcataacattttagatatatcataaatcttctgatattaaatgtgccttaagctttgtggctgattctcaaacttgtgcttgtctccatgtttagaggtgttcaaatgagtatattttcttgttattgggaggagttgatcttgtgacttgttatccccaatgatatctttataattaaacttctggagaaatatatatagaattagtgttgattggaatcttgtttgttgagtctgattggtctttatatttcagcttgaaaaatcgaagaagtatgatacgtgaagaaagctttggagaaattcttttgtacttttctgaatgagtacaatcctttacataatgcataatacgtgaagaaactaatagttgctttattgtcacaatacagcctcatagacccaccattgcctattgtggattccttcaatagagactttagctacattagttcacaaaattccttgtgccatagatctgaactcttcttcagcacttgatctagctacaacctattgctttttgcttctacaattcaccaaatttcctcccacaaaggtataatacctagaagcagattttgtatcatatatagaggctgcccaatctgcattagagtaggcttcaacctctaaatgactcttcttagtgaagataagaccttttccaataattccttttaaatacctctggatctttaccaccacattcatgtgttctgttgaagcattcaagaactggctaacaacactcgcaacaaatgcaatatggggtctagtatgtgacaagtaaattagttttccaactagcctgtgatagccttctttattaattgtggtacatcatgttgctccatttttgtggtttacatctattggtataactcctagcttgcattccaacatgcctaatatctttcaagaggttaaagacatactttcgttgtgacaaaaaaattccttttcttcatctagcaacttcaattctaaggaaatatttgagatcacccaaaattttaatttcaaactccagtgcaattggtttcttttactggtccatttcagtaatgccattatcggttaatattatgacattaacatacacatttgtctccttcaacatggttctagaacatataatgatcacttagctttgaagatgcctcttttacaaactgatttagtgaatttttgaaacagtgcccttgatgattgtttcaagctgtagagtgatttctttagtctagaccatttttctcctaaaggtttctttgaatctgaaaggagttccatgtatgcttcctcttcaagatcaccatggaggaatgctttctttgcatctataactggtgtaatagtcactccaaattggctgcaagagacagaagaacttgtattgtgttcatcttggccattggtgtagatgtttcctaatagccaatcccataggtttgagtaaacccttttgctacgagtctagtcttgtatatatcaatactcccgtttgctttgaattttactataaatacccatttacaagccattgccttcttaccataggtattgttctacgagatctcatgtctgattcttgagcaagaccctcatttcctccagcattgcctctctccattctggactttctaaaacatcctatgtagttttaggagtattctcattggaaagattaatagtaaagaccttcaaggatggatatagtctatggtaagagacaaacttggcgatgaggtattgactacatgactgaacactctttttggacgaatattgatacatcaagattggactcattcatgataggatgaaattgtgactcaccaaagttaaattccaccatgtcaagggtagaggattggccatgctcattcttgtgcaaggcccttgtttcctccaacattgcctctctccactttggactttctaaagcatcctgtgtagttttaagagtattcacattggaaaggttagtagtaaaggccttaaatgattgatttagtctatggtaagatacaaacttggtggtgggatattgagaacttgaccaaacactctttttgagtgctattggtacatcaagattagacttattcataagtgcatgaaattgtgactcaccaaagttcaattccaccatgtcaaaggtaaaggattagccatgtcaagtaagattttcagcctctttatttcttctggagtgcaactatagttgtggttaattgggaataggcacaacacaaatataggagtcataagtaaatgactcttaggcacacgaataggtaaaacagactaaaactgatcttcccttatactttttgcatgtagaatagaaagggaaaatagtttcttaactaaaattaattttgaaaaaatacatggaaataaataaataggctaagtctgtagcttaaccatgtaactaattaccaagaatctaggaactaacaagcacaattctaggacttaactatcaaaagacctaaatatccaaagctgatcaataattagtttgaatttattggaaataaataacaaaaaacttagcaacaaactcctaataatccgacactccccctcaagttgatgcatagatgttcatcatgctaaacttgctaacaagagtttcaaacctaggcctagatagactcttggttaagacattgactatttgttgttgtgtggtaatgaatgacatgtagatgacttcactttcaagcttctcattgataaaatgtctatcaatttcaacgtgctttgtatggtcatgctaactaggattgtttgcaatgctagtttctgccttgttatcacaaaagagtttcataggagattctgaattcaaacttcagttcttcaagaattctcttcagccataaaatctcacatactccattagccattgccctaaactttgcctttgctctactccgagatacgacgctttgtttcttgctccttcatgtaacaagattgccccaaggaaaagtacattaacgtgatgtggatcttctgtttgtaactaaaccaacctagtcaacatttgtgaaatcctccacatctcttttgctatcggtgtactttttcaaatatcttagaatttggtatacaactttaagatgttcttcatatggtgaatgcataaactgactcacaacactaattgcaaatccaatgttaggccttgtgtgggaaagataaattagcttccttacaagtcgttgatcctttcctacttcagctagcactcccttggtttgttctccaagtttatgattttgcttgattgaagtatcactcggtttgcatccgctcattcctatttctccaagtagatctgaaacatactttctttctgaaataaagatcctatttttagatctagcaacttccgttcccaagaaatgccgtaaagaccctaaatctttaatctcaaactctactacaaggctcctttttaatctagctatttcatcttcatcacttctagtaagaatgatgtcatccacatggatgatcgaaatagctgtcttaccatctccaaaatgctttatgaacaaggtatgatccttttgtccttgactgtagccttgattcttaacagaccttgtaaacctttcaaactatgcccgaggagactgctttaggccatatagagacttctttaatttgcataccttggttccaaagttgtcctcaaatcctggtggagcatccatgaagacttcttcttctaattcaccattaagaaatgcattcttgacatctaattgatataggggccattccaagtttagagttagagaaagtaacacatgaactatatttagttttgcaattggagcaaaggtctcccgataatcaataccataagtctgtgtaaagcctttcgccaccaacctagctttataatgttccgatgacccatttgatttgaacttcacagtgaacatccatttataccccactagcatctttccattaggcaagtttacatttttcccatgtgccacttttctctagagccttcatctcctcaaagatagcctcccttcatttaggaacatttagagcttcttgtataatcttaggtacatccacactagatagttgtgagataaaactaaagaaacaaagtgccaaatttttataggatacatgattggaaattggatgtttagtgcattttctagtggcttttctaagagcaatggggatattgacagaaaaatcagttttttggtttagaagtatagtaaggatcaagagaagtacttggacatgaagtttctataacatttggatatggtctcggattggactcttagccttgtaaagctgtaatatcatctttcccttgagtttggcttttccttgagtagacaatttcacatcctccttttttcctagttcctgaatcattttttgttctagtgttaactccacttatgggcattgaagtaggttgccttacttataaatgtaaagtattcgagtctattaaaacatttggcttcattaaaacactagaatttatcaattctaatttttttattagaaaccatgccattctcttccgattcatgtaacgactcttcataaccattgtcccatgaagaggagtattgttaaaactttgagcttcaaaaaatgtgacatccatagtaacaattttattttaatttatttttattttattttatttttggatcaaaacaacggtatcctttttgaaaaacgcatttcaatgctcatgggtctaactttctatggtgatgattatgcacatgtttaaaagcggcacaaccgaaaattttaagaggtaaatcagagactagacgtgacattggaaaaaattcattagacattttattggtgtctaaaattgaaagttcttgagggcatcctattgatcaaatatgtggcagtaagaatagctcctccccataagtatttaggtattttagttgtaaacattgaagacctagctacttccaagagatgtttattttttcctttctgccactccattttgttgtggagtgtcaaaacaagagctttgatgtataatccccttttccaagaaatatgtgcccaaaattttgttgaaatactcctttccattgtcacttctaaacacttgtatttttttttcttgaaattgagtttctaccatagtgtaaattttttaaaaatttgtttagcatttgatttttttttgagcaaataaacccaacaaacacgtgtatgatcatcaattagtgttaaaaaccatttttttttccagaaattgttggagcttcatatggacccgaatcattactatgaacaagaacaaagggtttagaagacttgaaaataagaatgtgtaagaaatgatgcacgatgatgttttgaaatttgatagacatcgcattgaaaataagatggatttttatttttgaacaaatttggaaacaaatacttcaaatactaaaagttagggtggctaaccaaaaatgccacaactttatttcattgctactagatttagaaaatgattcaagactagttatctgagttttatgcgcttgtttgcacaagttgcttccatcttcaaagtagtagagtccatctctttctttaacattgccaatcgtcctccccgagtcaatttcttgaaattcataatgagtagagaagaatttaacacaacattgtgagtcatgagtgagcttgctaatggataacaaattacaagaaagatttggaacatgaaggacattatgaagaacaagagattttgaaataactattgatcctttcccatcaattgctgaaagagaaccatcagctatcttgattttctaatttcatgcacacggactagaggaaaataatttagaacacttggtcatatgattagtggcaccaaaatctttgatccatagacaactagaagtagtagatgcattaaatacaacaacttgacaatagttacctttttgggccaaagaacaggaggaagacacattctttgagaactgtgtagatttaaaaagtttatacaattgatctaactattccttactaaaagaagttgtctccgcaactccttccaagccactatgctcattggctcctacttgaaacacctttggatcacagtttatttgactgaatgatcttgacttccagttttgtggttttccatgtatctccaaatacatttctctagtgtgtcgaggcttatggcagtgatcacaatagatcttgtaacctcttctgttttgttgtgcttgtccaggttgagcggactgattgtttcctgttactagggcagctgattattttctcccatcataacctttctttgaccctcttttctccttacttcagcaaacacttaatgaagagatgacagtggttttttgccaagaattctgcctcttcgtcctgccaagaacacatacactctatcattctccatccttttcatataccttatgctatcctttgcatagtcccattcttcatgatagctcaggtctagttcctgccatagtgctttcatcttattataatactttgttacctctcgatctccttgctttgaatgccacaactttgttttcagttcaaaaatttgggatgagttttctagattcgaatgtctcccgaacagcttccgaaacttcttttgcagtagagcgaaacagtaggtctttccaattgcctggctccatggaattgatgaactatgcaatcactaacgagttcttgaatcttcaagtcttcaatgttggatcattgtctgttggttttgttgtctcgcctgttgggtagcctagctttcccttgccattgatcatgagcttgattgactatgcctattctatgtaacatttactgttcaatttgtgaacagtcaattgaagagatggattttcaagtccattaaaggttatagtagaaacttgaggtgcacctcttaggatgctgttatcctttccccagtcattgctgttctcaccatcacaatttcccaaagagtcacctacgctctgataccatgcatgcagaatagaaggggaaaatagtttctgactaaaattaattctgaaaaattgcaggaaataaataaataggctaagtctgcagcttaatcatgtaactaactaccaagaatctaggaactaataagcgcaattctaggacctaactatcagaacacctggatatccgaaattgatcagtaatcaatttggatttactggaaacaaataacagaaaacatagcaacagactcctatattttgacactttccctttgaagatacatttgggtaaggtaagacttgtcttcgaagaaggtaccatagacagtatttttaaggaagatggaaacttttttttttccctttttgtgttgagagtatgcaagaaatgcgcaatttatggatttagggtctccaattgtgattatgaacatgaatgaaagtttgacacccaaatctttaggaagaatagatgaaaaaaattaaagtttgacatggataagataatttaagggtattaagaggagtattaaattttaacactcgagtagtcattatgttgattatgtatgaggctatcaaaacatcatcacctcaatattgttttgctacccccatttgaaatgtcaaggttctcacaacttgtaaatggtggttttttcttttggttatcccattgtgttggaggtgtgtcaatacatggtgattaatggataattccattttccttgaggtagggctgcaatatctttgaggagtattcctttccattgttggtttttgggatgcccactttggcttgaaattgtgtttgaaccattttatggaaattttggatgacctttgcagtcttgatttttggtggtgtttggcaagttcacaagtttcatactgaaaatcagaaggatttttatttattttttattttttgaacaataagggaaataaaatctttagataggtaaaactaggatgacctaacatcctaacctaaagtgcagcaagtctatttctttttcaaaagacagattagaaatgtttcatatttgggaacttgagaaatgactgctagagctttagacttctccaaaataaactaaccatccacctctttagcaccatcgatcctcttcctagtacacaattcttgaaatgagttggaaaaaatttagcaacacaatgtaggtcacatgtaagtttgctaataaaaactggattaaaggacaaatttgggacttgtaaaatagaatttaaagtaagatactttgaaataatttttttttgataaataaaggcaattatattaaacggaaagaggaagcaccaaaccagtgccctctaagtatacagggagtatacaagagcaacccaaaggcttgaaatcaagggtggaggaaagaaacaaaaacactttatcttcccttacttagagcctagccaatctaaaaagctaacaagagaagaagggctcaaaactataaacgccctcacccaagaccaaagattacatacaaaagaatatttcaatctttgaagcgaaagatcctcattcccaaaagctaacaaatttctttccttccagattgaccaaaaaatacataagggggccatttgccaagtcttttacggattttccccacaaacgctccatgctacccaaggagagtatccttcactgaacctgagagaacccaatccacaccaaaaagggagaagataagactccacaaggcccgcgtctttacataatgaagtaaaaggtgatccactgtctctactttagaaaggcatagaaaacacctatttgccaaagagtaccccctcctctggacttgctccaaagttaagattttatcccaagaagcctcccaagcaaagaatgctaccttaggcggcacatttgtcctccaaatactaccacaaggaaacaaaagagaacctcccggctccaacatagaataaagtgacttgactgagaaagctccactcttagaagctgtccacaccactttatcctcgtcctccctttgcaccctaaagacttggatctttagcataaaacgctccaccatctcaatctcccaatcattaaacgcccttgagaaaagaggggtttaaccatccccaacaccgtctaggctccaaacattcgatacccaagcatctttctccagggagatggcaaataaagaagggaatgactcacaaagaggctcatctccacaccacttgtccttccagaatctcactcttcgtccacaccccacttgaaaggctaatctactattcaaacacaaccattcctttctaattgctttccaaagcccgacaccataactcccacttacggcccgagtgcaccatcccccctcttcttcaccatatttgtgactgatgacttgcttccaaaaagcctttccttcaatggcaaagcgctaattccacttaaaagagctttattaatcaaagctaaatttctcacacccaaaccaccttttttttttccaagcaaaccaggttctacttaacaaggtgtggccttttcacaagagctcctccaccccacagaaaatccctttgaatcttctccaatctcaaccttacttttctgggcaaaaaaaagagtcatgaagtaaataggcatgctagagagagtgcttcggattagagtgagtcttcctccttttgaaatatactgtctcttccacattgcaaaccttttttgaaatcactcttcaacaccatcccaaaccacctctggtttgaagggggcccccaaaggcagacccaaataacaggaagggagaccagccactttacaacctaactccaaagccaaatcctctatatcatgcacactccccacctttaacagaagattttaatgactagaacatgggacataggaagagaaaaagttggatgacccagttatgtgacccttgaatcaatgatccaggggtgtgattttaaattttaactataaagaggagtaaggaaactaattgtctatgtcagattgcaggaagaggtaggattggaagttatccatgtttgactcataaacctatataggtgcttgaattgttccttggtgaaaaaggttgttctagtttagtcttaacttgcaggcttcattcattattacttagaaatttgtttcctttgccccacccttaaggtttttcatgtaacttttaacacatcttttatatcacaagacttgtggtactaatcacactataacttatctttgtcattgctcttttttgcactactcctttatccacttactagggtggtctcttctttgatgctgactaatgctgaattttcagtgttggggttgcctatcatgactgacagtctactcagttcccttctcacctcattatatacttctctggcagatgacagtaatttttttcctaagaattcaaattaagacttgatcaagttctggattcagacctaccaaaaaatcaaataccctctccttttcaagtattcatttgaacttcacactatcttctagacatttccagtcagagtcctaatagatatttgacccttggcagggtcaatcaagagcattgtaataggctgtcacagttcttcattgttgtttagtttcacacactttgttcctcagatcatataaaatgagagctattatgctgatcaaagtaggtaagtgccactgcttcccatttctctttagcagtagaaaataatatactacctgaactgacattgggctccaatgaacggttgagccaggacatggcaattgagttctttacatcccaagcctttgagccaagaccttagtatgacagggttagatttttaccctattgtaatttgtcttaaatcagatatggttgttatgtgcttgtaaggtgaacttttttgaattttaaagttaggtttgggtcagatttggttttagggttgtgcatatgtggagaaatatggaaatcaattttgattattgtgaagtccttcaaattctatctattttatacatgacggttcaagcatcacaagtggaagtagcttcagattttgattttatggtctttctctgctccaacgttttcttcctttacttattattattattattattattgtttgtagatttttagaatggaataataatcattcattctcagaaaatgtacagagctatgtaggatataagagttgactagcctaaatatagaaattacctatttacaggtatagaataaaggaaaaaaaaatattctgtacaacttgaccaaaccaaaagaaggaaagaaagaaactacaaagaaataaaatcaagtccactagcaatccccctcacattgatgaaagatgttttgcattctcagcttgtcattgatttgtagaaacactacatttggtaggccttctgtaaggatatcaagttgtgttgtaggcatgtaggtagtacggactaattcactgtccaacttctcttttataaattgtctgccaacatccacatgttttgttcgatcatggtggataagattgtatgcactgtttatggcgactttattattggagtacaattgcataagcttcctaacttcaattctaagaactgttaaaatgattttaatccacaatagttcacaaattccatgagacatagctttgaactttgcttcttcacttgagcgagctactacaacttgcttcttacttctccacgtaactagattttgtaacgatccgctcccgaccatgtagatgttgttcgctttgaggcaaatgagttatcatggctttaaaacatgtttacatggttaagaggagccatacatatatagtgtcaaaaactttcacctatccaatgtgagatatcataatttcctcctatgcatacacaatgtcattgttctatcccacaggattataaggccaaaccaatagacaccctttccagggctaaacaaattcccactagggtaaaaaattggctttgataccatttgtgatgacaaggtcccaagggtcctcacgactttaaaacgtctctacatagttaagaagaatccatacatataaagcgttagaaatttttttatttatttgatgtgggatattcatttgtaataacttgctctcaattgtgtagatattgtcagctttgggccccaaggggtttatgtttgtttggccctactatcttaggggacaaggaggggggagtgatatcccacatcagatagagaaaattttttctagcaattcacatgtatggacttctcttaacgttgcagatgtgcatgaaagccataaaaagccccttgggcccagatttgacaatatctacaggattgggaacatatcattacaaatggtactagagctgttccccaaccctggtgtgagagtttgtttgatcatgtaagaggtgtttgtctatttaaccctacatttctatgagacacaacgaggacattgtgtttgcatgggggtgggtgtgattgcgatatcctttatcaaatagagggaaaagtttttaatgctatatatatatgaattcctcttaaccaagtagaccttttggtgcaaagtagacaatatttacatggttacaagtgggtcttaggaaggtacaatattctatggtcagtcttctatctgcaatggcacctacccaatctgagtcggtataaacttctagtttcagcttacttcctttcttgaacaaaattccttttctggatgctttcttcaaataccttagaatcctatacacgacatcaagatgttgtttaagtggagcatgcatgagtttgcttaccacactaacaacataggcaatgtcaaggtgtgtgtgggataattggataagtttaccaaaccaatctttggtgactgcctcaattaacaggttgcttttcttcaagatttcccaaattgtgattaggttctataggagctaccatgggtttacaacccaacatccctatttctttcaaaagtcttgaatatgcttatgttgtgaaatgaacactccctattccaacttagccactttgattccaagaaatatctcaactttcttgagtcttcaatttcaaactctctagccatatatgatttcagctccattatgtcttctaggttatttctattgatgacaattaatccacatacacatttactgtctttacctccccttcagaagagtgtttgatgaacaatgtcatcactttgattttcactatatcctatcttaatcattgactgtgtgaaccttcaaaatccaactcgaggcaattgcttgaacccatatagagacttcttcaatctgcacaccttgaatgtaggaaagcccatttccatacctaagaggaatatccatgtgcacttcttcttcaagatctccatgtaagaatgcatttcatacatcaaattggtgtaatggcctgtcaaaatttcgtgtaagtgagagaagaataaggatcaaattcattttgcccattggagcaaaggtctcttggtagtctatgccatatgtctgactgaccctttttctacaagacgtgccttgtataaagaaccatcaggtctgtacttgatagtgaaaatccacatgcaacttactgttttctttccttctgataccttcatgattcctaggtcttattcttctcaagtgtcttcatttcctcattcatgacttctctctaagtctccatctttattgcttcttggacagtttctggaactatttgtgaagataacagggtgaaaaatgctcgaagctgtggtgagagattctaagtgtggaataatgaatcattcattctcagaaaatgtacagagctatatcggatacaagagttgacacctaagtatagaaactgtatatttacatgtatagaataaataaaaaaatagtttgtacagctatgaccaaaccaataaaaagaatgaaataactacaaagaaataaaatccaccaatattattattactgttattgtttttgttttttctttatttgattttgaagcaaaattgacattttggcctttgatgaaaatacaacaggtttctaggttgcttgctgctattt

SEQ ID NO: 13602 - DNA, 17359 bp, Vitis vinifera
  Intron number 10 from transcript GSVIVT01036611001 (locus GSVIVG01036611001) derived from phytozome v7.0 (chr-ID chr 13; pos 19188625 to 19205983 reverse strand)
atttcaacttttacaagactttttggagtttacaggtaaaatatgcaacttaaggaaggagagagttttctcatttatcccaaatatcttaccattgttccatttaataaaactttcagcagaatgagtccattgtgactatgctaggatctacttataattgaaaaatgaagcaggagtttaaactaaaaccagttaatttcctcctatcttgctggggaaaaaaaattatcaatttgtagcagagaaagctggtgatttaggttaaatattttacagttggtaagtttggttatctagtttaggtaagatcctagtgtgtaagccgaagtatggaggtttaggattagggaaggtttctctgaggaatcatattacgttagggaagtggctatggaggtccctagggaaagtttcaccctttggcatcaggtcactttaaccatttatgagacacattctaatggatgagacaccaacattctagttagatggtcacattagtgccactaactgaccattgcacaagtttttcaaaatttttctacacacttactttgtggttgggggggtcaacctttatgttctcaatttcgaggacttcccagaggagtcttagagaaaaacctttccatcttagctatccttgggagctcttcctcgtcttcctggaaccttagttgtcatcatattcttattgatttggagattgaggaccttgaaagatatgtgtcttctcttaatcgtatgcatttgtcttcaaccattccaaatgcgagagcttgatctttatccttctcaagtttgttcttagtaaaatccctttttgtggccttgtccaatctatcaaatttatgtcccttttctctagccaaatttgtatggtagtctaaagccccatctaaggtccaagccttgcttctccacataaaagggtaaataccaatgacatgcatctgttgaaaagaccttacaaagcctttagccctaataggtgcattctgtgtttgagaagtggagaaatggttgatcatcatttttttcattgtcttgtgacaatgaggctatgccaccatctatttagacatgctaggctggactgggttccacctaggagtatatgtgacatgatgattatcgatgtggaaggaaaaactcaacattccaccatccattataatgattacattcccctttacatatagatgataatactcatctattttagggatatttacaacttatcaaaaaaaatcaaaactacctaaaacagaaatggatttggtaacagattaccaaatctcataaaatcatgggataagaaaagatgatttgttagctgtagatatcctcaatcttagccgttaacattgctgacaagtcatcaaattaaatcttcctataattttacactccccctcaagctgggcggtaaatatttattaaccccagcttggaactcagatcatcaaacacctttctcggtagagccttggtaagaatgtcagctgtttgaaggcttgtaggcacgtacaacatcttgattattccttcctctatcttctcctttatgaaatgtcgatcaatttccacatgttttgttctatcatgatgtattggattttttgcaatgctgattgctgactgattatcacagaacattttcataggttcttcatctgaaatctttaattcctttagcacccttcttaaccatattccctcacaaatgccgtgtgccattgcccagaattcagcttctgcactgctccttgacaccactgattgcttcttacttctccatgtgaccagattaccccacacatatgtgcagtaccctgaagttgatcttcggtcttgtactgatcctgcccaatctgcatcgctgaacacttcaatatctcttctttggttcttctcaaaaaataatcctttacctggtgttagtttcaggtatctcaagattctatacacagcctccatgtgttcttcatttggattattcatgaattgacttaccatgctgaaagaaaagccaatatctggtcgtgtgtgagataggtatattagtttacctactaatctttggtatctccctttatccacgggtgcacaattttccttagctcctagtttggttgttggatccataggagtatctgctggcttacacccaagcattccagtctcttttaagagatccaggacatattttctttgtgagacagagattccctttcttgaccttgcaatctccatacctaggaagtatttgagattcccaaggtccttgatctcaaattctgcagctagaaaacttttgatggtgcggatttcctcttcataatctcccgttagaattatgtcatccacatatacaatgaggacagcaagctttcccgcaggagagtgtttaacaaatagagtatggtccgtctgacattgggagtagccatgtttcttaactacctttgtgaatctttcaaaccaggctcttggagattgcttgagcccatatagagatctccgaagtttacaaactttgttgcgtgtagtttgtgtctcaaatcttagaggaatttccatgtaaacttcttcagctaggtccccatttaggaatgcattcttgacacgaatggggactcagaggggtacctcaaggtggggggtcggaaaaggaggtttggggttgagtcaaaaatctttgagatcgaggtagagaagaagaagggtaggacatttattttcattacggaaagcaaaggaggcgtctcttcttggattaagctggggccggcaagtttggggccgctcattgaaggcctggttttctgctcaaaggacatgaggactggccattgggagaaacgctggcaagagaatgggagatttttctctttagagcgcgacgaaaacaaagggggatgtttccttaagctgggggttttagatcgggaaaaaaagaggttcaatatctttgttcccaggggtagaggagcaaaagggggatggtctctcttggtggaggcgctgcgtgagatggagtctatctcaggccggcaagtgagacagaaggataaggaaattttttggtcacctttgaggggaaagtcctttgcggaggtggtaaagcagaaccacagcatcggagaagaggtggctagggtgcgtgtggacaacagtgcattatgtgtgaatttggagaagctagcccactgtcttgtcgggtgctggaactcaacgagaggagggggggaagatttaagaagttgggggacccaaatgtcaaaattatgggggctaaagggcaatttaggcttggccaaattggaagatggcaaggcattgttggaatttgggctgttatcagaagctgagaaagccctagatatagcggaaatttcggttggaggcttcgtcattcgactggagaaatggagcccaaggtcgggatgcttaatggaggaagagaaagtaagagaggcatgggtaaggatagtgggtcttcccatctctctatggaatcgggacatcttgagcaaggtaggagaggcatgcgggggttttttgggcatggatgttaaaacagagaggatggaggagcttcagtgggcaagaatccgggtaaggaagatcgaggagaagactcctaatatggtggaaatatgggtgggaaatatgtgttactccctaacactgtggtgggagaccaggccgacgctgagcgcgtcgccgacgggagggaaagggaaatctgttgtaacagagggtgaggtagagggtgaggcccattcacgcaagggcaagcgcgtgaaggaggccaaagggggttcaaggcccgaggtgcagatgcagtcgacggatgggacgcgaagactgacctccgggtcggggcgccccatggagtgctctcgtgggccttatgggctgcagttaaagccccagggaacagagagcgtgcagagtggacaggttgggctgggctctctgatgaggccttgtgggactgagggctttaatcagtcctcctcctctgtggcctctcttgggccaaaggaaaatagacggatcgaggcttggaggcccacggtggaggcgggactggtagctgagaaggagcccagtgaccaccttgttgaggcccagagatgcggcccaagccacgcgggaagcccactctctgatatgtccctggtttgggagaaggatgggatgcgatggctgggtgaggcagagctcccccccttagagcgatcgaagactgaccttgccctggtggaggaagcgtcgaggtatgttacggtccagtccgattgcttgttccctgtgcttccctcttcccctctttcttttttcggtcggactccagtgggggagtattgcgacctttctggactcggagagaagcgtgacgaggatgagaatccgcttcaaatgctcatgggcatggagccacctgtgagtgagcctgtcgaatgctgggatttggtggaggccagcaaggacagaattgatgttattggaaaagggttggactccgatcaaatagtgccaattggtaataaggcaggaggggagctaagctgggagaagagtgatctggccaagtttagtaaatttttggggttttcaacagaaggtctggaaaaggacattatggaattcttggtgaaaattcgtaaaagaagggaaagtgtccacagcaaaacctttctggagaaatccaaatttgagagagaattgaagagattggagtgttccatcaactatgaaaaggggaaaaagcaaaatggtgaagtgcaagtaagggggtgccaaattacggaagtaaatgaagctaagaatcattagttggaatgttcgtggagccaatgatagctccaaaagaagggttattaaggcagttataagaagtcagagggtggacctgttttgtattcaggagaccaaatttcaaactttgtcggagggtttggtaagaagtttgggttttggaaggtggtctaattgggtggctttagacgccttgggctctgcgggagggattttggtgtgttgggacaaaaggtctttggaggtgatggagacggaggtaggaaggttctcagtctcctgtaggtttaggaatgtggaagatgggatgtcctggatctttacaggggtgtatgggcctttctccaaagaggatagagattgtctgtgggaagagctaggggcgatcagaggcttgtgggaagatccctggtgcttagggggggacttcaatgtcatattatcccagtgggaaaggagcagacagggaaggttgtctggtgccatgagaagttttgcccaaatagttgacgatttagaactcattgatctcccaatgcaagggggtattgccacttggaatgggggcaggaataatcaatcctgggctagactagataggtttttggtgactcaacagtggctagatatgttttgtggggtagcccaatgcagaatgcatagacccacttccgatcattttcctatcttgctgatgggtggggggataaggagaggacccactccgtttagattcgagaatatgtggctgaaagtggacgggttcattgatcttctccggggatggtggcaagggattaaggtgagaggaagggccagtttcagattggcctataagatgaaggttttgaagcacaacattaaagtttggaatagggaggtgtttggaaggctggaagtcaacaaaaattctgccctccagcagttggagtattgggatggagtggagagtgaaaggaccttgactttagctgaagctgagcagaaaaaacaagccaaggatgccttccatcattgggtgcttttggaagaggttcattggaggcagaaatctagggagctgtggcttaaggaaggggataggaatacgggttacttccaccgtatggcaaatgcccaccgtaggaataactccatggacaggattatgattaatggggagctgttgaccgaggatcaagaggtgagggacgggatagtgaatgaattccagaaattactctcagaagagcaggggtggagagcggatattgaggggctgcagttcaaacaacttagttctagggaggttgatggtctggaggtgcctttctctgtggaggaaatccattctgctttgatggagatggggggtgacaaagctcctggcccggatggcttttcagtggccttttggcaagagtgttgggattttgtgaaggaggaggtggtggaaatgtttaaggagttctttgagcatgggtcctttgctaagtctctcaatactacttttttggtccttattcctaagaaaggaggagttgaagacttgagggacttcaggccaatcagcttgcttgggggtttgtataaacttttagccaaagtcctagccaataggctaaagaaagtgctggatatggtggtttctgttgaccaaaatgcctttgtgagagggagacagattttggatgcttctttagtagctaatgaggtgatagattattggaagaaaagaaaagagaaagggttaatttgcaagttggacattgaaaaagcctatgatagcatcaactggaagtttcttatgaaggttcttcggaagatgggctttgggtctcgctggagggattggatgtggtggtgtatttctacggccaaattctccatattaatcaatggggttccagctgggttcttttcgaattcaaaggggttgaggcaaggagaccccctctcttcttacctctttgttttgggtatggaagtgcttagcactcttataagacgggctggtgagggtggcttcatttcaggctgtagactgagggggagaggaggggaagagctggctgtctctcatctgcttttcgctgacgacactctcatcttttgcgaagctagaagagagcaacttgccaatcttagctggatattggcgtggtttgaggcggcctccggcctcagaattaacctggctaagagtgtcctaattccggtgggggaagtggatgagctggaggagttggcggctgagctaggatgcagattgggggctttacccactgtttacttggggctgccccttggagcccaccataaaacctcttcttcttgggatggggtggaagagagaatgagaagaagattagcccagtggaaaaggcagtatatttcgaaggggggaagaattactctcatcaagagcactttggccagcatacccatctatcttctttcccttattcgcattcctaaggctgtggcaaaaaggattgaaagaattcaaagagacttcttgtggggggtatgatgcttggaagggaaagttcacttgattaattggaaggtggtctgcagccctaaggaggagggtggtttaggcatccaaaagatagacttgttgaacaaagccttgctgggaaaatgggtttggagatatgcctatgagaaggataacctttggaaaactgtgataggggtgaaatacggtcaagagggatgtgggtggaagacaaaggaagtgtgtgggccttttggggtggggttgtggaaggacatcatgaaggaggtggattggtgctgggagaacattgattttaaggttgggaaggggaatagagttttgttctggacggataagtggtgtggcaatgaggcgcttgctcaatcttatccgcagttgtttaccttggcgggtcacaagaatgccaaaatctgtgaagtgtgggactctagcatgggtcaaggaggttggaatctcaggttggttagagacctcaatgattgggagatggagcagataggagatatgctgaatctgttgaaggacttcaggacctctcttgaagaggactcagtgagatggaagtgggaaggcaatggagtttatggggctaagggggcctacaaaattttgagcggctcttcagccggggttttcccgtataggcgcatttggatggataaggttccaacaaaagtgtctttttttgcttgggaagcctcgtgggggaagatccttactttggataagcttcagagaagggggtggcagctcccaaaccggtgcttcctatgcggctatgaagaggaaagtgcgaatcacatcctcttacattgtacagtgactaaaactatttgggagattacccttgccatttttggagttcaatgggtgttcccagagtcagttatagaggtgttacttagttggaggggttcttttgtggggaaaaaaagaaagaagatatggaattccattccggtgtgcatattttggacggtttggaaggaaaggaataggttagctttcaggggagggtctttagatattcagaaattcaagaattcttttgtatgtaatttgtggagttgggctaaggtgtacaatggtgaggaaacatactctcttttaggttttttggagtggcttggaaccacttgagggtgggtgaggttgggtggggtttctttttccccttttttgtttttttctagccttgtgtagggctgttcagtatactccctgtatacgtgtggctttttagccttttctaatatatatggttgtttatctataaaaaaaaaaagacatctagttggtggagaggccagtcaaggtttgcagccaaagatagtagaacccgaactgtgtttaacttggctacaggggcaaatgtctcctcatagtcgattccgtatgattgggtgaatccctttgcaaccagtcgtaccttgaatcgattaacactcccatcttcattatatttgactatgaagatccatttgcagcccactgggcgttttccagctggtaattctgagatttcccaagttccatttttttcaagtgcatgaatttcttcatacacagctgatttccactcaggtgagccgagagcttcttgtatattattaggaacctggatgttgtcgaggttggcaacaaatgttttgaacttcggtgatagtccttcatatgacacaaatgtgtatatagggtgttttgtgcatgatcttacaccttttctcacagcaataggaaagtcactatcatcattagtttcgggattatagttacctgatggatcttcacttgatctagaacttgggtcagactcttgggttggctcaagagatgcttgttgttccatctccttttggttctgtctccttcttgagtaggtaatcaactcatcattctttgttgattgaatagtgtccagattttgaggaggtggattagtaggcggattgttggtttgatcttgagaaggagattctaggaagtaaggagactcaaggaagagattttgaggaggaatggattcatgatttagtgatgggtagggttggtcagaattaggagagaaatgagatgattcttcaatatcccaaagctggtattcctggataaagttagtctccccctgaatattagatttggagaaataagattgttgctcaaagaaggtgacatccatggagtgatagaactatttagtgaccagtgagtagcacttatatcctttttgagttggagagtacccaaggaaaatacatttaagagctttaggatcaagtttgtccctgtgttgttgatggacatggacaaaagctgagcaaccgaaaactttgaatgggattgttgagattagacgagtattgggaaaggactgaagaagaatttgacaaggagtctggaagtcgagaatacgagatgacatcctatttatgagataggcagcagtgaggatggcttcaccccagaaaaaatttggtacatgggtagagaacattagggaacgagcaacatcaagaagatgtcggttttttctttcggcaataccattttgttgaggagtgttgacacaggaactttggtgaactataccatgactcaagagataatcattaagaatggagttgaaatactctttggcattgtcaattttcagaatttggatttttgcttggaattgtgtttggatcatggtgttgaaggttttgaaaatctggtttgcctctgatttttctttcatgaggaatacccatgtgagtctagtgtgatcatcaataaatgaaatgaaccagcgagaaccagtaacattttttatcctagaaggaccccatacatcactatgaatcatggaaaaaggttgagatactttgtaggatcggttaggataagaattacgaatatgtttagaaaattgacagatctcacattgaaactcatttggatttttattatggaataatgaaggaaacaacttctcaagatacaagaaatttggatgacctaacctatagtgccacaacataactgcactatcattattagactgactcacagacaaagaaataggactactggacactgaacaatcagaatgatgagttgatccttgaggaggatcattaacctctagaagatagagccccgaacacatcttagcactgccaatcgtcttccccgagtccaagacctgaaattcacacagatttgagccaaacttagtaacacagttgagatcccgagtgagtttactaatggacagtaaattgcaatttaattttggcacaaggagaactgaatcaagggtgatgttctttgaaactctaacagaacctgtaccagccacctttgagagtgaaccatcggctattctcacagttaaatttttatagcatggattgtaagtagaaaaaagcttctcatctccagtcatatgatcagatgctcccgagtctataatccatggacttaacttctcctttttaacatttagagcactaaaaaaattacctttttgtgccaaggaaccagtaccaaccacagtggggacaactgcaggcaaggattggctgaacaatttctgtaggacttctatctgttccttgctgaagggagtgggttcaggtgatggtttttcatccatggagacgaggttgccctgtccttcgttgtcattggcaaaccgggaaggcttccaatctgcaggtttgccgtgaatcttccagcaggtgtccttggtgtgaccaagacgtcggcaatgatcacaccatggtcgccctttcttcggtttgtgatcattgttattaaatggatttcctctaactgcaagggctgagctctcaggatttgtcacagaatcttgagagcccatcatgatcttcttttgactttcctctctccgaacttctgaaaatgcttcccggatatttagtagtggtttggatcctaagattcttcctcgtacttcatcgagattcttatttaatccaatcagaaatttgtatattcttttccgttcaataatctgtttatacttgattccatcacccggacagctccaattgtgctcctcgaacaggtccagctgctgccagtagcgattgagtgtgttgaaatactgagtcaccgttaactctccttggcggaagtcatgtagaacactctccacctcgaacaattccaatgtattctcattgttggaatacgtttccttggcagcgtcccaaatctcctttgctgttccataaagaagaaaattttctccaatgtcatttgtcatggaattaatgagccatgacatgaccatattattttcagcattccagactttgaacttttcatctgtcttgtttggtttggcagcaactccattgagataatcgtctttgccttttccgcatatgaacatcattacggaatgggaccattggagatagttgttcccattcagtttgtgtcctgtaatgggcatgaggttactatctgcactactattgctggaagccatggcttcctgattggaggtgatttgggaaacagtagcagttgaattatgtttgccgtatttggtcatatgagggaattagggttcagagaatgctctgataccatattgatgtggaaggaaaaactcaacattccaccatccattataatgattacattcccctttacatatagatgataatactcatctattttagggatatttacaacttataaaaaaaaatcaaaactacataaaacagaaatggatttggtaacagattaccaaatctcataaaatcatgggataagaaaagatgatttgttagctgtagatatcctcaatcttagcccttaacattgctgacaaatcatcaaattaaatcttcctataattttacaatgatcatctcatataggagtttgaggagttccctaagaggcaagttgtggcaaatcacttgtctcacactgatgtggttcatgtggcgagagagaaatgctagggtctttgaggttaagtggaggacgaagagacactgtgggatctaatccacttctattcttctttgtggacttcttgtacatttgccttttaagacattcctcttaatgttgttcagcttgattgacccttagtgtgtataacaaaagggtttgaatagcaatgagaggagttttgtgtttctttttatttttagtctacactggttggctacgttacgtctccttcatgtacttttattcatttttaatataatgaaaaaaagatcctagtggtgtgtgattgtaccctctacatgaagttggaatgattagtgggtggtgctatcaaagttacattggcaaaagatgcaatttcataccaaaataggcattggtgaagttgagaagtaaattaaatgtagagtgtgtgtgtgtgtgtgtgtttgtgttaaatttgatacaaaaaattagtgtgtttaaaattctgctagaagcttcaattgcttgaaatggcattctagatttcctaacatgtgtttcgtcttgctgcctagttgtcctttaagagaattcaggctttgtctgtgaaagggtagaaaaggaattaatttcatggaggaatacacttttctttccttggtgaaagttcagaggatggggtatatagtagatgggtgaactgttgtgggccctggtactctctgtttgtttttttttttttttggacttgttgggtacttttcggtcttcaaaagaattgctccttggttgatatggaagttctgttgaaaggggccacaggatgttttcaaggtttgccactctgtttctgatatgatgcttatgagaagagtgcaaaagagttattttgaggtgaagaaagttcagttttattggtgaagatttttgtttttattttaacaaatttgtattcttggtctagtgtctctttaatatatatacatatatagttagattcatttcattgaatgataaatacgaagaatgaaaattggttattggcagagtagaaattggaaacatatattgctccacaaaaagctaatactatttgctcatactacaagtagaaaaagcaacatgcacacattatcaactctctatacacgaagggaggaaaaaagtctgttcaaatctgtctatgtttccttgattttattgactttcttggaagatgttaggttttatgatactcttattgttcttattgttaagccgtcgaatctctttgtatacttcctatgtacttgggttgcactcctagacagccctttttaaatgtgttttttttcttatttttttaattaaaaaaaatagttgtagggtggttagcatagtgctcctaaaaggcaatttctgaggttttctcagacttcttaagttcatgcatttcatagcatgtgatggctccaaagtttgctcctggatgttgtttggtgggctatcattctcaatattctttatcctaatctccatctcatttgaagggctaagaatgttcctatgtcttatgagaagtcatattcttccctctcttggaattttgactttcgatttaatttgcctaattggaaaattgacaacctcttctcttttgttctctgtgcacaatgtgtaacaacctctctttgtcatttccaaatgagagggtttatacttttggttcattaggcatcttttcctttatgcctttcccctcatgccctttctaagagtgattctcttgccatttctccttaagctatttttatctgtaaagctaaaacttcttccaaaaataaagcttctgctttgtcagtggctactaaatactaacaatttaccaattgagaccttatgtagttttctgtccttaaagttgtgtgctttgctttgcgtatgacaaaaacatggatcatcttttccttcactgccttgtcattttgggactgtggagaatactttttggattggggcttgtcttaggttcccttaaaggtattgcagatttgatgctagttttttcatagacttcaggattagtacaagggttagagtgatttggcagggcagtgcacttgatttaagttgtgggtcattttggttgaagtggaatgcattaattttttaagacaagtggaggcctcaagaattagtttaagaagctatccactattgttttttggtaagtaaataatatatatatacatatatatatatatatatatattccatacagattactactaaatacaatatcttttaatttcattgtcattagtgaaaatttcaaaatgatcttatgcataacttttcactttgcttggaagtgtttggagtatcacaaatatcctctagccgttcttaccaagagcaagttgtccaccctgaggatcaatcaaagaaagattttagcatgtcagagccttgcattcgaactggaggtggtccaacctaatactcatttcaaaaattgccacccattccctctctctttattgggaagaatgctcttccctcctctttgtctagttggtcccaacaagaatagagggatgaagggaaagaccttccccacactcctagtttcataaggcaagctgcttaactgcccctgcattcaagatagacctggtctatggtcttccctttcaaatatgaatatggtgacagtggattcaacttaaaaatggttatggattaaattatccaaaaacttggaagtcaaatgtatataaaatgccaaacaaaaggaggcaaacacaatacacatgaaagtatacatgtgagaaaacaaaaagaaacaacctacaaccacaaccccaatctagcactcaataaaatctatcaagtttagtggagcagcttgaccatcaaccagaatatgcctgtggtaccacatttataaattaaatataagggagtccttaagagattggtttgtgcactgcaccccttaaaagattctttggttgccttgcttccaaattgtccattaaaggcaaagaggagttgttctccaagcctttcttctcttcttgctcacaaagctcccattccaatccattaacaagtcctttacagaatatgggagaacccacaaaatgccaaataaagagaataaaaagtgcaatcctctagctttcccacaatggatgaggagatagtctattgattcttctgcatttgtatgcatacaacaataacccatcaaaaaccatcctctccttttaagttggtccgtgtttagaattcttcgccaagttgcttctcatgcaaaaaaaacccactttggtaggagtctaagatctctacactatatttgaggggaaagacacttcaccttctaactccaaggctgagtagaaagacttcatcaagaattccccacttttgctagccttccacaccattctgccctcctctcctctacttcttcctaacgtgtagagctttcgaagaaactccgcaacattatccatctcccaatcttggaaatatcttaagaagcatgggttccacatgaccatcctaccctctacctctcgaaacattcacccatgccttctaggaagctatgaggagaatagagatgaaaaagagtcctttaggggacatcaccacaaccacacatcatgccaaaattttattcttctcccattgccctcttcaaatcttgttttggcttgaaaaactccccacccttttaatgctttcggcttggaagctaagaagaagctataggataaccttcccaccaccccttcaccatatctttgaatctctctgccttgagccacatgctttcaaatctgaaaggggtcataccccttcttaccccaccttcctccagtaaaataggggaatgatcaaacattggccttggcaacaagattagcattgtatttgtgaagtgttcctcccaattgcccgtaataaggaaatggtcaattcttgacattgattgcctattcaatcttttgcaccacatgaaagggcctcctgtcaaaatcagccagagaaagctcttttgtaaagttggaaaattgtctcatggttggggaaattataaaatggtattcactatcgtacttctctttaaggagtggttttcttggagtttattgacttttctattggcaagattttttgcttgattggagaaaagtttgttgaggcaggacttggattggggttgcagtggggagtataaaacttatatgctctttgggaaatttgggccagatggtggttacatgtttagagatcaaagtgttaatgtggttagagctttcttgagtcttgctggttcatgctggctatagatgaagagatttagccttgtgggaaggtctctttaggcctcagattatgggtatcaataattatgttgtggaaggtattgcaagcgttcttgtgtattctagtttctttggtggccctgggtagaagaggtgctaggagaggaatgcctagatttgcagaatcttggatctcccaagaaagatgggatgcttttttcacaggatggttggcatagcatggggactcctcattatagatttccgtacagaacgtcctcttcccatcggatgtttgtggagtgtattaagcttttgaagtttctcttgacctttggtttgcactttgcttcctgtttagctgaaggatagcttcattgcatcttctttctattttggtaatgaaatgtttgcttactgcaaaaaagaaatgcttgctttggttgccaagaccattttctggaaaaaagttttctttcattgccattcaagaaaaaagggtggttgagtcccttaacaagctaaggggaacgaggcacttttgactgcatctttgtgttcaaaatgaccagagtttgacctagaaacttaaaagtttttatgagtgatatttaaaaggaaaaaaaggaacaaagcccaagagttagacagcatgaactgattgatacattatcccatcatagtaaatttcctgataaatctgtcttactggtttgcaggaacacttttgcaatcctgcttctatatctcttgc

SEQ ID NO: 13603 - DNA, 12484 bp, Vitis vinifera
  Intron number 5 from transcript GSVIVT01030704001 (locus G SVIVG01030704001) derived from phytozome v7.0 (chr-ID chr1 4; pos 14068500 to 14080983 reverse strand)
gggaattagtgggattggcaaaaccagttctggaggtaatttattgtcctatttgatttaggagtataatgttagttattgaggcgtataagacattgatgggtagaaatgaagcatcatgttatattatgcattcttactcttctatttaggagtatggtattatgttagttattgaggcatgttgaacaaccaataaattgtgcattccttgtacttcttttagagagttcctaggttgggagttatatgaggggagtctagctggacattttggtagtgataagaccatagctctagttgaagataagttttgttaccctttattgaaaaggtatgttgcttgaatagtgtcctagttagttaggtaagcttaagaaacaaaacataagtttgtacactcctacttgttccacataaaccttggtggatcttagtgtgaaatttgtcttagtattgcccaagattgctagagatcattccattttggtggttttggatggattctctaagatgaaccattttatcccatgttctaagaccatcgatgcttttgatgtggtgaaattgtttttgaattataagattacatggtttaccttctaccctagtgtcaaatgtcaagtttgttaactatttttggaagacactttggaaattgcttggaatcactttggagtattcctttactttctatcctcctcaattagtcatacgttattaagaatagtttaggcaacttgcttaagtgtctggttggtgagaaacctagtaattagagtcttgttttatctatggttgagtttgcttgcaaataagttggctaatcggcccatagggaaaaaaaattgaagttgttaatagtcttcaacctttgttagcccattaatcttgtttctttacctactaattgttgtcattttggttttaccgaggtctttgttgaccacattcatgacttacatgctgagatacaatggaaaattgctttcaataatgtggattataatttttttgctaatgcacactttaggtatagatagttcaagaagatgattatgttgtggttccaacttgtcccaagcttacctttaaaaattccatcaagaaacttcatgcatgcttgattggctcattctctacccaagcttactttgccattagtggtttttttccttttgtaagtaaatttttatccccattggaatcagaacctagaacttcccacaaatcctcccaactctacgatttgagctaggcctcaagggctaccatctagtggttaacacttctttattcaatgaatagatcatccatttattgatgacacttggattactaacaaggctttttgttgacttgactataatcttttggagcaatatctacaacataactcattagagtcaagttgtttttagctcaaggaaaatgatgaagatgtagatgttaaattacacgcttatattaggtgtaaatataggaaatgataatgttttttattttgttatttattttaggcttattcttttagagttttcttcgatttaggtttgcctatctataaataggcctttgatgttaaatgctttggacttaattaataatattcataagggttgatgacggttctctagataatctggggcacttacacattgatgaagtttaccaagatcatgagggagggactgttagtgatttttcatgccttctgggtagttttaagtggtagacattgtggcactagccttgttggaaggtttgacccagatgcataacttgagcttcagtcatttgttagtgcaaggtgacttatcagcattcatttcctatgttcaagataatgagaggcccttggaagttggattctttgttgcatgagattttggatttgtttgaagctgaggtgtttgtcttagtgggtttctggtcccccaaccattgggcttaggtggtgcaattagcttagaggtttttgtagggaatcacatcttcttgagtcttttgttttttttctttgttctctctatggtatgtgatatttgacttcattttggcactacacagttttgctttaaaaaacatctcatctttcttgtacttttttgattcatgattcaatgaacttgtttatgataaatgatcttttaaataattctgaaaaaatctgagggaatatcaaagtgatctcttctaatggatgatatgttatactattttacaaagtttatcatacttgcaatcttatgaaggacattacaatgttgatggtttagatcatcacaacaacatttaggaagtagtggtcatgattgatgtggtactcattaaggtcaaacaataggatggacatgacactaaactgcctcttttctttagagttgtggcagagacttcttttcagcagcaggcaatagactatagctcctagaggtgtttataatatgataatttcttttggaggttttggtaggagtcccataggcaaggccctatggaggaggtccattgtggcaaccttgtgggttatttggtcaaaaagaactgggaggatctttgatgataggaagaccagtgtctgaattgtgagagaatatatgccttctcacttccctctaatatcagttaaaaaggagttattgggagttaatgtcgcttgcctcaaattggggattgttgaaaggtgccttccctcatactccttattgaatttggaagagaaactgaatgatactctattgaaaaaatttggtctacatcgaaaacttcaatagacgaagcaatcccttcctgcagaatatcatccgatattctctctaattcaaactagggataaaagcaaatttaaacacactaggacttatctaaactaaacagtccagaataataggattcaatcaagtcttatcttctggttttattttaaattcaaactcctaaaaatctaggacttatctaaactaaacaatccaaaataatatgactcagttaagccttatcttctggttttatttttaaattcaaattcctaaaaatcaaacttacagtttcaacagtccccctcaaactgaggaatagatattgaccattcccagtttgcttataagagaatcgaaatgctgtcttggtggagcttttgtaagaatgtctgcagtttgaagtttggtaggcgtgtactgcagtaaaaactccccatcctcaaccttctccttgataaaatgtcagtctatttccacatgtttggttctatcatgatgaattggattatgggagatgttgatggctgcttgattatcacaaaacattttcattggaaactcacttgaaatctcaactcctccatcacatgttttagccatagtccttcacatgcaccaagtgcaatagcttgaaactcagcttccgcactactctgagccactacggactgcttcttacagaaccaagtaaccaaattaccccatacgtaggtacagtagcctgaagtgggccttctatccttcatggaacctgcccaatctgtgtcagaatatatttcgattcctcatttggtacttttaccaaaaagtaacccctttccgagtgtcattttcaagtactggagaattctgtgaactgcactgagatgttcttcagtgggggcttgcatgaactgactaaccacactaataggaaaggctatgtctagcctagtttggataaatagatcaacttcccaacaggtctttggtattgacctttgtcaattggagggaacaattgtggtttcaaggcttgacttacttgttgttacaggggctgttgaggtggcggatttgaaaattggggctggaagagcaatatcagctagaatagcaatatcccaaaattgatatgagctggaattccttgaaatctccccttgaagttgcgttttaggaaaataggcttgatgctcaaggaatgttacatccatggaaacatagaacctttttgtgattggagagtaacatttataacctttttgggttgaagaatatctcaagaaaagaccctaggacggaaaagatgcaggagacggaaaagatgcaggagcttcaatgggcgcgaatcctgatcagaacaaacggggaagacctgccaagtaggttggagatctcagtggaggagaaggtgtacgctcttgccctctggtgggagctgaaaccgtctctgaaaaaggctcaggagaataggagcgaagtgacccagagtaccagaggagaggttaggggtgatggtgcctcacgcgctgttacgcgagtggggaaggaggtggaaggcacacagctcgaggcgctgctgctgccagaaaaaatgatggggattcaggagggagaagtgggccgggtgattgaaaaatgggaacaaggaggattgggggcccggtcaacccaggacgctgtggattttgggcctcaatcggcaggcccagatttgggaccaaaaggaatgaagagggtgggtgggccttacaatcaagggacaacgatgggcttaaacttaaagctaaaaggagtggtgggagtgctagctgggcaggaggctgggccatcaaaaacatggtggactactgaggaggaaagcccatcgtgtgatggaggaatggacctggaggaaagcccaagtaagccactgcttcaagacactaataaagatcagcaactgaaggcgtgttcgccggcctctccattggtaaataacgagagcaacatggaggaagaagttctaaaaaattgggagacagaggatttgagaaagagaaatacgaagttcttgcactcggcgacagattcgacgcttattgaggaagctatgaggtacgggtctgtccttttgttgaggggggaaagggtgcctgggtcttctcatcttatttctttttctcttgatcgggctccggagggggggcattacgatcgttctggaaatgctggggtggagcctcagtttgaggttcccttatgtgtagtaccgagtgaagggtcagaggagaatgtaattggatgctgggcgttggtagagaataatggcggcatcactatgtatagggatgaggagtggggtccaggattgaacgaccctcaagctgaaaggggagagaaggaggagagatgggaggaaagcagcctggcaaaattcagtcacttcttgggattttcgactgagggtttagaaaaggaaatcctggactttttgattaaaatcagaaaaagaagggagagaatacatgataaggtgctgctagaaaagtccaagtttgaaagggaattgaagaggttggagtgctcagtgaattatgagaagggaaggaagcagaaagacccaccaaagggtaaagggtgccatctttcagtgctacaatgaagctaaaattgctgagctggaatgtgaggggggtgaatgaaaaggagaaaaggaaaatcattaagacatttataaggaatcagagggtagatctaatgtgtatccaggaaacaaaaatccaatcaatgtcggagggggtggcaagaagtctagggtcgggaagatttttggattggagggccttggatgcaagcgggactgcgggaggaattctgatatgttgggacaaaaggacattggagattatggattgggaggagggccaattctctttatcctgcagattcaaaaatgtggataatgggatggtttgggtgttcacgggagtttatggacctttcactaaagaggaaagggagtggctgtgggaagaaattggggcgatcagaggcctctgggaagacccgtggtgtgtaggaggtgactttaacatcaccttgttccaaagggaaaggaatagacaggggagaatatcttcagctatgaggagatttgcccaggttgctgatgaattagggctgagggatattcctatgcaagggggagtgtttacttggagtgggggacctaacaatcagtcttgggctagattggataggtttttggtgaataccagctggctggatcagtttagtagcgttttacagagtagactgcctcggcctttatctgatcacttcccggtctcactagagggaggaggtctgagaggaggcccctctccctttagatttgagaatatgtggcttaaggtggagggattccaagatatgattcgaagatggtggtgggagattgaggtgagaggcagtgctagttacagattggctactaagttgaaggaaattaaacagaaattaaaaatttggaacaaggaggtgttcgggaatctgggatgtaataaagcggcagccctgcaacaagtggaattttgggaccgtgtagaaagtgaaagaattctgtcaatggaggaaacagaattaaaaaatgaagctaaggtaaattatcaaaaatggatgcttttggaggaaacacattggagacaattatcacgggagatctggctaagggaaggggacagaaatacgggttattttcaccgtatagcaaatgcaaatcgtaggaataattatctggacagaattaaaattgatggggtgagccttacggaggagcaggaagtgagggatggagtggcaaatgcatatcagaagctgctttcaaaagaagcggggtggcaggctgatattgggaggctgtgcttagaccagatcagtcaacaagatgcagaaaatttggaatcccctttttctgaggaggaggttcattcagcattgttggagatgaatggggataaagccccggggccggatggctttacagtagctttttggcaaagttgttggggttttgttaaagaggagatcttggcaatgttcaaggagttccatgagcagaaaacgtttctcaagagcctaaataatacattcttggtcctgattcctaagaaaggtggggctgaaaatattggggattttagacctattagtctcttgggggggttgtataaattgttggctaaagtactggctaataggctgaaaaaagtgattgggaaattggtctcccctgctcaaaatgcctttgtgatgggtagacagattcttgatgcctccctaattgcaaatgaggtgatagactcgtggcaaaaaagaaaagagaagggggtcatttgcaaattggacattgagaaagcctatgacagcttgaattggcagttcttaatgaaagttcttcaaaaaatgggctttgggcaaaaatggttgggttggatgtggagttgtatatctacagcaagattctctgtcttagtgaatggggttcctgctggtttcttcccgagtactaaggggctccgccaaggagatcctctatctccttacctcttcgtcatgggcatggaagtgttgggtatccttctgaggagagctgtggaagggggtttcctatcagggtgtagcattcgggaaggcggagagagtgctttgaacatttctcatttattttttgctgatgatacaattattttctgtgaggccaacaaagagcacctgagtcacttaagttgggttctcttctggtttgaagctgcttcggggttaaagattaatttgagcaaaagtgaaatcatcccggtgggtgaggtggatgatattgaggagctggcagcggaggtagggtgtcgtgtgggatctttgccatcccagtacttgggcctacctttaggggctcctaatagggcctcttcgatgtgggacggggtggaagaaagagtgaggagaagactcgcgttatggaaaaggcaatacatctccaaaggtgggagaatcactctgattaaaagcaccatggccagcatacccatttaccaaatgtctctattccggatgcccaatatagttgttagaaggctagaaaaattacaaagagacttcctatggggagggggaaatatggagaggaaagcacacttggtgaaatgggagatagtgtgtggggacaaagggaggggtgggctgggtttgagaaggctgggccttatgaacaaagctttgcttggtaaatggatatggagatacgcatgtgaaagagagaacctatggaagcaggtgatttgggcaaagtatgggcaagaagaatacgggtggaggtctaaaaaacctaatggggcgtttggagtaggggtgtggaaggagattatgaaggaaaatgaatggtgctgggacagcctagagcttagggtggggaagggcaataagatcagattctggactgatgtgtggtgtgcgggtacagcgttgtctcaatctttcccgcacctctttgccttggcggttgacaggaatgctacggtggaggagatgtgggaccagaattctgatcaaggaggttggaatctaagattcttgaggaattttaatgactgggaggtgggcatggtaggagatctgctccttaagttgagagggcttaggccggctttggaggaagattcaatctcttggaagggaggaaaaagcggtagatataaagtcaagatggcgtacagtggtttagtcaatcccagtgacattgttttcccggaaaaaagcatttgggtgaatagtgttcctaccaaagtcgctttctttgcgtgggaggcatcgtgggagaaggtgttaacgcttgatagactccaaagaagaggatggcatctcccgaattgctgttttttgtgtggttgtgcagaagaatctgtaaatcatatccttattcactgtacagtggttagagccctttgggaattagtccttgggcttgtaggtgtaaagtgggtctttccagaaactgtaaaggaggtcctattgagctggagaggttcttttgtggggaaaaaaaggaaaaaaatttggaaatccatcccgttatgtattttttggacggtttggaaagaaaggaatagattagcctttaaggggggtgagctacatattcagaagttaaagaaatttttttgtttgtaacttgtggggctggtctagattggatattggagaggattctatatcccttctaggttttttagagtggctagcatccacctagggggggtgaggtcttcttggtctcttttgtttttttgttgagaggttatagtcgccttgtatatctcctgtatactgtgtggctattggccttttttgcttaatatatttcgatttacgtatcaaaaaaaaaaaaaaaatatctcaagaaaagacatttgagggctcttggatctagttttgttatgttttgagcatgagtgttgacaaaaacgttgcaaccaaaaatttttggtggaagggatgacactagttgagaagggatgacactagttgaatgttagggtagcaattttttaggacttcgatgggagtttggtactataatactctagggcattctgtttatcaagtatgatgcagtgagaacagcttcccctaaaaaatatttaggaacatttgtcgtgaacataagggatcaagcacttccaatagatggcggttttttctttatgaaattccattttgttgtggtgtagcaatgatgaataatgccatgttcacgaagatatggtccaagaattgaattaaagtatttagtaccactgttagtgcggaaaatttggattttggtttggaattgagtgttaatcatgacattaaaatttttgaaaatctcttttgctttagatttttcttttaacaaatacacccaacatattcgtgtatgatcatcaataaatgaaatgaaccacttagagcatattacgtagctaatattggaaggtccccataaatcactatgtatgagtgaaaaaagatgagattttttataaggtcgtgaaacataagaatttcgacaatgtttaaataattgacagaactatgaaatgacttaagtttttatttccaaataacgatggaagcaactttttcaaatatggaaagcttgggtggcctagcctaaagtgctgaaccattatttcatggtcactggaatttgtaaaagatgaaataacattgcagcttgccttttgagtgtgtccttttgaagctttattgccaaagatatataaaccctcatgctcccaggcacaaccaatcaacttccccatctccatttcttgaaattcacaatgattaggaaaaaatttagtaacagttcaaatctttagtgactttgcttatagagagcaggttccacgtaagcttgggaacatgaagaacaaagagcaatctaaagctattcggaacaatgacactccctttaccggccatcggtgagtaagaaccatcaactattttaattttataactctcagaacaaggttgataagagtgaaaaagagttatatcaccggtcatgtgattggatgacccggaggcgataatccatgagtttgactttgaaaaagcattcaaggctttggaacatatacctttatgggcaatgaaacctgatcctatagtggatgtactcgaaggatcacgtgtgaggagtttctgaagtagctccatctgttcttggctgaaaggtgttttgttggctgagttattggattgtggtggttcatcattggtggcatgataatctcgaggttcattttcctgagttctgttacttttccaattggaaggcttcccatgaattttccaacaagtttctcaagtgtgaccaactcgattacaatgatcacgccatgacttattggatctccttcgtgaatcaaagtgttgagaatttagtcccttggtggccgaggctgatccgtcgttgcttgaaaagcgatgtgatgagttgtcatcatgaccttctttcggctctcttcttgtcggacttcagaacacgcttctcgaagtgatgggagtggcttagtgctaagaatccttcctaggacttcatcgagatttttgttgagttccaccaagaatgtgaagatcctttctttttccacaattttctgatatttgatgatgtcactagcgcaatcccattccaattcttcgtaaatgtccagtttttgccaatatcgggagagaatgctgaagtattgggtcacactgaggtccccttgctgtaactagaagttgacttttgatttcaaacacctctactgcattttcgttgtctgaaaacatctccttggctgcatcccaaatttcttttgctgtcttatagaataggaacgtctggcctacgtctgtctcgatggaattagtaagccaagacataatcatattgttcttggaaaaccaggttttgtaagatacatcattcttcgcaagggctgttttcgatgtagttgtctttgcctctcccacatatatacatcattaccgattgagactattggagataattcttgccctttaatttgtggacagtaatgtggtgaatggaattttcagaaccaccattaccatcggaatcgtcaagagaagaattggagatgacatttgaagaccttgctggagacatttgaagaccttgctggatgttcgccagtcattgcagttttcaccatgtttatgttcggatcttggtctctgataccatattgaatttggaagagaaactgaatgatactctattgaaaaaatttggtttacattgagaacttaaatagacgaagcaatcccattctgcagaatatcatccgatattctctctaatttaaactagagataaaaacaaatttaaacacactaggacttatctaaactgaacagtccataataataggattcaatcaaaccttatcttctggttttattttaaattctaactcctaaaaatctaggacttatcaaaactaaacaacccaaaataatatgacttagtcaagccttatcttctggttttatttttaaattcaaactccaaaaaatcaaacctatggtttcaacactcctttggttaagttataatttattcgattaacttaaaataaagctttttatttttatttttattttttaatttttttttatagaagagaacttttaaagttttctagtagtgataggattccctattggaatgaactcttcagatctcttcatagttgtttgtggaaggttttagagaaaaaaataagataggagtcagttctgtaatttttccatgttgttgatggtgtatttgttttctcctctccatgttcttgagttagttttgcttaaacatgtacctcttttatgtggtttgtggtttatactttgctgtgattggacaatagacatttcgtagttttcatcagctactgattttctgtcatttttctaattcaatataagttagtatctatcaatcatattttataacttgtgtacaattataattgatttcttttgcttgattttcacagggtactgcacagcagggaaagacaaactttatctgttaaatgtcctagtgttatattacattattatttttgatttcttttgactagagtggctgattactttattctacacagggtgggtctagagggttgtctaaaccagtt

SEQ ID NO: 13604 - DNA, 4155 bp, Vitis vinifera
  Intron number 9 from transcript GSVIVT01013967001 (locus G SVIVG01013967001) derived from phytozome v7.0 (chr-ID chr1 6; pos 8092997 to 8097151 reverse strand)
ttgaagtaagtgttttttaaggcatgttgtacatgaatcatagtcactattatcattgtcattagaagcagtataaatatatcttttgtccttaatattgactgaagcaattgcaaacaaattcttctagaacactttcatttacaattgaatatttgcatcataattacatgattttactcctcagtacatgagtttaaactgtataacaaatagagtacatttccctctccaacttgtattggccaagttttgggaaggcccccatctaatccctaaatcaccgacaaggaatttggcttcagtcacacagggctgatataaggttgagaatcagtcgtaaaacaatctcaaaccttgatagtctgagtaaatagtgggatttttgtagtttggttatttgctttgacctagaatcatgagtagtttaggctattgtttattttgtactcgttaaatcttatcactagcaagggcatgtctttactgaatggttagctttttgttatttagtttgacgtagaatctttaaagttaaactgataaatagattaacctattttttttattttgtcctagttaaatcttaatatttgcaaggacatgttgcataaaagaaagccacctaagaccatgagcattgtgttctatacaagggggaaattgtggaccactttttcctccatcatttgattgctcagagactgtggtacatgttattcaggcagcacatcatttgattgcattggttcctatgggagaaagtggtaaaaaattcttattcaatcagttgttacaatcctaatttatatcctatatttacgaagaaatttaaggaaattaataaactaataatccctataaatcatgactatacttataaatcaggaattattcttcctaatctaatatacagttatacacaatttcctaatctaatttacaactatatacaattacataaatatatacaaaaaaccccaaataggaaaattcagctttctaacagttcctcctatagttgtggttatctggcggacatagtgatctttacttttatgagctgtggagtttctatcaggagctgggtgctctagtagggggctatgagactatgcttgttattccaagggtgattaggtcgcacaggatcataagaatctttgagaattagtggagattggtggaattcttgtgggacactctatatagtaacccatatctttctaggtatttgtttcaaggaattcctagagattctgtgtctgattgtgctagatcagaaagaggcctgctccggtgggtggatgagatttgtttacattggtaacaccattcttttggctgtctaaagttggtttttgatgtctgttccttggataatccgaggcaattagatattgggagtatctacagatcattgtggcaggctggtgaggacttcttttcaaagccaaaggagctaaagttaggaattaaggttgagatcctagtctaattggggggcttgattcagacaaggacgctggaatttccccaccatcttggtggaaggagatttaaacattcttatttcgtgggtagggaaaagaggcccttggaattgctgttcttgttgaattgatacttattttgttgacagcattcttattccattgacagttcaaggagttggctaagtctccttgttggatttctaggtcagacaacctagttgcagatctaggtgcattgatacttgcggccattgtgggtgcttcttgcctcattgaaatgctgttcttgttgatctttttgttgttcatttatgctgcctctgtgagcctactttcttggttgttttcccattcctcttttctcttgtattttgatagtctttggttttgaaggattatttgtccttcttgcaatccctcttcatctaatacatggtttctatgaaaaaagggatattttgagaacaagcagttggccttaaacgatcactgttttttttatcctttattaatattatgtttaactaggagaagttatgtaaaagatttacaccaaaaagtgaccctataagttgtgagcaaaaaacctaatacaaacaaactagaagcaaacctttataacaatatatcacaaaaatccctaaaaaagtgattatgtgagcaccaatgctaaagcttctcaccttcaactatgcagcacagatacttctagaagggagtcatatctgcatttgacattgtgttggacatgacactcccggacacatgaaggcacatcttgattggtgaagtacattaagatattttttttccaacttcatttacagtgcaatacagatcaaacacttaaaagccatgtagaaacattattattttgccttaaatataaaaatgaaatgaaacatgactaatgctagaactattggaaattaagtaaatgtattatatataattatatacactactcatatcaatcttcttgttctaacctctgcaattgcagtataatgatttagtaaagttaataaaacatatgtaacatattttatgtatgaaattttatatttacaagcccttgatgtgttcatatcttactttttcacaacctatagtcagaggatatatgagttacatttttctgtgtctcatggttgtgcctatgctaaggcagcccttcagaaattcaatctccatagagaaaaaacatatatgcattttgaatttattgctgttagtcctaacttagatatatgcattgatttattatgatcttttccttgtgttggttgtcagatgtcactccagcatcaactaagatagaaaggaagaatacctcaaatggggaaattgcttttgcgattttctcataccaatgctagtatcttcttgatactgtactccttcctgctttcactgtgtacaaggattgaaatatatgcccaacagaaaacttgcttggatgtcttattggtttttattaaggagttcagcacggcctgcctatgagcttcctgattttttgtttctaactttgaagcatatgaggaatgcacctatccaagatctgtccacctcaaacaatggtcatattttcatggtcctctcccagcctagaaaatccaagaaagaaagggtgtcgaatcctgatccaccatttgggtcacccaaagctttttcattaaagctagaatctcttctcccttgctaaaaagttccacttttaaaatgaatgcttgttttctattcaataaaacattcttattgagtcagaaatttaaattctaatattgtggagattgtgtgaagattgtgtttttttattggccccatgttgttcattacatgactatggctcatattggagattctgaaagcaattgatttcatattccagcctagaaaatccagccacactctttctttgtccgcattattatgattaaagttgttctaatggaccaaaaatttgtttttatggtcatgatcttaaattggagtctccatactgctcaatgcagattgttatttttggataaataataaaggccatgacatgtaaaaatgtaaatgaagagtatgcacaaggtaagtgttagagtacatacatgatatatgttttgagcccaaatcttaaaagtttaagcttttaggtaaattggttgttcgacgtggtatcatagccttgtttggtgggaggtcaagtgtttgaacctcactactatatttatttacccaatttattaagaccatgtgtaagcccaaaaatggagtctacacacgagggacagtgctagagtacatacatgatatacattgtaagcccaaatcttataagtttaagcttttaggaaaactggttgttcaacagtaagcaatgaatatgctgcttgtttgaaaatattgcaaaagtacctcctctatagtgacaaactaaacccatatgaacataaaatcattgttgaatcttggcagaatacagaaatggatgtccattccaataagaatcttactactcttcttgcaaggtcattatgaaatctatactcttgcaaaactgcaataatactcgatgaactgcatttgtggacctcaggacaagctcttccgaattagttaactcaatattaattaaattttttgtatttgatctgttttcagg

SEQ ID NO: 13605 - DNA, 3267 bp, Vitis vinifera
  Intron number 3 from transcript GSVIVT01017869001 (locus G SVIVG01017869001) derived from phytozome v7.0 (chr-ID chr5 ; pos 4151010 to 4154276)
gaaacaggttagtgaataattatagctgattagaaatattgccctaatatcttgaggttccatatgcactgtacagatttcatgtagatatctcagaactttctactgttcagaatatggtgttggtagcagttgagaaaagagctttaagctccagctggtttcatcaaagcacagctaactgtgcctctaatcttacagaaacggagttgatgcatccatttgggcctagttgtggaacacagttctaaaaggcattagtttatttaaagagtagggtttcttgactgttatttacagttataacagtcaccgggcccactacaatgttttctcttttttataatttttttactactggagattatacatttaaatattagattccaactatataaaaaatgaatggaacggctatcataccattgatgatgaatacaatttctttaattcgtaattcttttttactattaaagtattatagtcctaaaaagtaaattccaagtataaaaaataatgtaactgctattgtatgatcattgttggtatataccactataaagtagattccaagtataaaaaataatgcaacaactattctatgaccattattggtaaatatcattactttagtggttttatattctatgcatatcatattacaaatggtcttatcattagtcaaccactttgtaattttccttttttaggcaaacaaagaatatagaaagtagcaccagcaaaaagaggtgcactaaatgtacacacgtggcatacaaaatgcaccaagaaaagaaaaacaaaaagcatttacatgagaccgccatcagaaagacctaaccattcacaattaaggccatccaaaagatccagcaatgtgtaattctcaatcttgaataaagcacaagaccactttaacaaaggtttaatgaggatatccttcaacctttgatctgacagctttcctcattgaaaatcctttgattatattctctcaacatgcactaaaacgagcataggagagatatgtagcataccttccttcaccacttatctagcctcttaatcttccatccaaggtttttcactgaatcgggaaatgtgtaacataccttcctttgctacttatccagcctcttaatcttccacccaaggtttttcactgaatctggaaatgtgtagcataccttccttccctacttatccggcctctttttttttttttttgataagtaaaagaagtatattaaacgaaaagaggaaacaccaaaaaccggtgccctctaggtatacagggagtatacacaccaccttccctaactaggagcctatccagtctacaaaacttacaagagaagaatgactctctgctagggaactcctgacccaaaaccaaagattacatacaaaagaatatttcaacctttgaagcgaaaggtcctcatccccaaacgctaacctatttctcttattccaaactgaccaaaaaatacataaaggcgccatttgccaagccttcttgcgtctttttcccacaaaccctccattccacccaagaagggttgtcttcactgtacacgaaagagtccacccaaagtttttcactgaatctggaaattcccactaggctagaaaagactcttgtaatttctaacctagtcgatgtttggtaaaacttaatgcttaatgcttaatgacttgaaatgaatttaagttcaattatgcttaggttattaagtcatattaagcaattaagttgatttaccaaagtcatatttaactttaagttgtaatattaagttactttatcaagcatatttaatatgtttgtaacttaaattaagtcatattaagttaataagttgatttttcaaacggcctccttgtaaaaaatattcaaagcttatgaataacttaaatattatgaattaaacaggaaaatcaatctgtggattcgaagactaattgtttgatcaggtcaggttttggaaatgttttcattttccacttttatttatttatttcctttttggatctggtttgttcagtaagcgtgagaatcatttgtatgactaggatactagacattctctcacaagaacaaagaaaatgtgttgaatttgttattgcttcatgaactaagagatctgattttttaaagcaaccctacataatattttctcggaatccttacagacaatataaagaatgattctgaaaaatatatgctgtttaaatcatgttcatattgttgtggggagagagcaggagtgggggaagggttgtgaatcatgtatactactaggatactaggatattctctcaagaacaaagaaaatgagttcatctgacatgttgtacagtggactaagagatgtgattttgaaaaaggtaaccctacatgacattttttttttaaatggaaaaagaaaatgtatagatcaatcaggaaaaatatgtgctgatcagatcatgtgttgatattagagaacttcatgcgtcatgattctatttgtctgttgttacaaaggattttctttcattagactccattacatggcaggacttccttcttttctgtcatttgcatgctgcttgtatctggtctagggtctacctgattacttgtgatacctggactcttcaacttcacttaatgtacctgtgttgacacgatatgagagaggtgtgggtgtgacgatctttttcagatattcctattttgctttggatattcattattatgattttttttttcttttctagaaacaaggataaaagagaaaagaaagagaatattgtttttttcaagagaatgttaattttttgcttctaattgaattttaattgatttttttatctttttatgtcatatccaagtatcatgcaaaaacatttttcagtcgagttcctgtatcctaatatttgagatgtgaaggatcaggtgcttagatacacacccacatctgacacacgtacccaaacccatgtgacatagctgactgctttttatgttctttgctacctgaattccttctagtagtttttattgccataattgtttcctgatatctatacaacttgctttgttactgttgtttcttggatcccattgatttcaatgctattttttccaagtctaaacacacaatttgtagttgacttttaccctctaaatttttagttgacttttacactcttgtttcatgtaacacagctttactgacaaatagaatatcttgattttttccagtggctgcagggcag

SEQ ID NO: 13606 - DNA, 6127 bp, Vitis vinifera
  Intron number 20 from transcript GSVIVT01019869001 (locus GSVIVG01019869001) derived from phytozome v7.0 (chr-ID chr 2; pos 4075147 to 4081273)
gttgccatacagtgaggtgtaatccaactcctcgtgcatgtacatattgggaatttcacgcttgtacagtgactctcaggggatgaaggttagatatgtctgtcgtcctgacttactattgagctagttgtgagttctctttaacatgattgtttgcacacaaggctcgtttttttcttggaaggttaagaggaaactggatcctgacagatgccattaagtggggctgttggatttaccctggaagaattttgataattctccaatagtggaggcacatttttacctgagcaatatcaatatataatttttgaagccttttcaccctttccaagctgtatattctctatagaagcagaattttgtgccctagagaagagggctagggctctattcaaacgttacattcccatatttaatgtaatgctctaatataaatttatatatagattgtcagcctatctccttgttaatctatggagtccctttcttatgggtgggtttgctgcttctggtagttagccttcattactgctacagaacttcagaagtttcatctacttttcatccctttgatgatgttatggcaagaaaaagacctagcagatgcagcagagcaaagcataaactagggaatcctcctcttgatgctgtatgccataagtttattggcaatgacaacatccaaattccaagcccttttgtttttgtaaatatttttgttttcatttcagcttatctggatgtcagtgtcctgccttcctagccgtttctaccccaagcttgtgctgcctcttggtttgacttctatttatttatttttttttacttatttttgtaattttcttttcattcttctctgcattccacttctctttgatcttgtgaaaactttgctttttgttaataatttatttttttccaattttatatgtacaactcctaaggattattttaggtaattgttattgcatgagaattttttggtatattattcaaactagtattcaacattactttagcgctactgattgagttggtgtttgataaaacttctccgtgagaaatgagggttaagattcttatgttgtgaaaaaaaaaaaaatggttcttataattgtagttccattattcatgatttaaggtgagaaaattagtcaataaaataataaatcgggattttgggggattttagaaagtaacccaaaagttttattttacattaaaattttaatataaatataaaaaattaaagtaaaaaaaaaattattgggtggattttattcaacctacttctaggcctttgtaatctgactaatatgaaaaaaatgaatgacactaaaattgtgcttgaatggagcaatataaatcaaagatcaaattaggttgattttcaggtgtaaggtttcttgattcaaagttaagcttaagtttgcgttgatggtaatcttcaccaaccggttcaagttgcagtctccatgcactttcatttttatttatttatttatttaattttgtattttcaatctcaatcagacaagaatctttttgccttttctttctctgtaattttctaaaatgaaaaacaagagcatttaatagcgcggttccacaagttttttttcttgaaaattaattatttttaaagaatgtaaatatattaatttttatattttaaaatttttcatgttttatgtgaaaaagttttgtaaatcaatagagtgaaattaatcataaaatataataattataaatataatttaagatctatggtatttgagatattactttcaaaattaggatatttataaaattttagaaaaaaaaatttatataataaagagattactttatgtcatagcctattgtgttttaaagttacgaacaacctttgagtttagattagataatatctacttgattagaatcgttataataagacttaataataatttatttatttgaatccttaaatttaaaaataattttttaattatcatattttaaaaatatttttaaaccccatttggataagcccataattttaaacaaccactgggtggtggaatttgacgaggacaaaaattgaggtatcaccatcaccttcccaactttctcagcatccttttatacttcataaatggtaccagacaaataatgagaagaaaagtggaaaaaacaaaagttaaggtatgtctgaaaactatttttatttttttaattttttaaaataaaaaatatgtacaaatatgcctgacaacaattgttctcaaatagtttttgatttttaatacattttaattttttttattactcttacttatattttgaaaaataattaaaaatttaatatacaaatatatagaataattaagagtaaaatgttagagataaatattatttttaattaaaaatataaaaaataaattaagaacatttcaattttcttaacaaactttaattttcctttttaaaaaaacattgtttcaaaaatacattttcaaacaaacaaggctatagattaaactcccaatttttataattaaaattacataaaagaaaatttgaactataaaaataataagattaagatagtatttattttttagctgaatagaaaaagttactgaatgttttattatattaaaattaatatattaatattaatcaatataactaaaataaatttgatatcaataggtttaatttagttatattgttgaatgacatcaataaattatttttaattgaataaaaaaaattaaatattttgatttttttatttaattaaaaaataaataccacaaataaaaataaaaataaatagcaacagtgccctttaatttttctataattttcttcttcggtctacctcggacggtcggaccttatccgggtgaagctttaagggaataaatggaaatgtaggggtatgcttcaagataatgaggacatggatacaaaaaaggctcgccttgcagcaggccgataaaagtggtcacatgggcggccccctaatttttgtctctatcttcttcaatttctctctctctctctttttgcgctgaatggttgtccagaaccagtcaacttgccatttgctgtccctacgagcatgatgcctctgtctttattgcctttctcaccctctcatattcaaatactgaaaataaataaatagtaattatacaacatgcataaattaaaatctttagacattatttattttttccttaaatgatttttctattgaaactcccttcaagtatattaggtgattaaacagtataatttaaaaatagttttttatttttaaaaatagaatatttttaaaattttctaacaactttttttattgatgttgactgaaaataattttaaaaaaaaaatgtggacaagggtcatcctcacacactcggcccgtcttgactcgttgaggaatccttaggcgagcatgttgtttcaaaaaaaacatttcaatgggaacgtggaggctcaccccatggaactcacccatgtcttctctcccatgcaatcatgttttttaaaatttatttttaaattaaataataaatactacaaaaattaatatttatatttttaaatattatatttaattcctaaaaattactacaaaaattataaaataaattaaataaattttcatatataaaaaataatttattaactttaaatttattttttattacccttcattttttctatatttctattttactcaccttacttttaattcttatcagttattacttattatataaacaatagacaaaatttatgataagaacaatgaggtggcagtgtggcaccgttggaaaataagtggtcattaaaaacttgtagtcatagaaatgaatcattgagtttggaatttctgggatctcctcttttcatgggacgccaattacactatcaaatctcaaaacggaaacatgatcatttcagttattacaaaagatcaattttgctaagaaaactgatccaatcatactaactccactgaagattatgtaacgtggacaaatcaaaattcataattttgccagctcattcaaatataataagactcagaatggtggatttagtgtataaaccacatcgtttccctttaaaacacgtcgttccatgccatcgatgagccattccaaattttcaaccacaaacatgatgaccgacccattctccaccatgccttccaatcctaattcagcccacctaacatcccagttgtcccacatcggaaagctggactgctacactcaatttaccaagtgagaagacaacccacgtatctccatttcatgtccgcgtacatggaatcatttgacatggtataatcttaatttaatttgaaaatttgtcacgtgggtaacgtgcagttgttttcaaatgtagatacgtagccgggcctagtcaatagcgtgaccaagattttattatatggtatacatgttggcataatgttaaaattatactttttttcctttattttcaaacaaaaaatacaatggactggactgaagtaccaggtattttctaaaataagcttttattttatgtccttccacagaaattggcaaattggtagtcagtatcatttagaattattggtggggtctttgaattctaccttatatatataatgtgccatggaccattgttattctgtccactttaaatccaaaatttatttattaaatttttgttattatctctgggtgcatgtgacgagatctatagcacaatcaaataatggaatgggccatgatgaattttcttccttgggcgttccacgtctctatcttgtggtcacatcaatcttgtactaaaaatcagaaaaactaacacatttatttattgtatttgttttctatggtctaacggtggcctgattaaagtctccaagctgattctgcacctttctttttttctttttctttttctttttttgtttttttctgattttgactcaactaaatccacgggggctgtgccatatttttttttttttaattttataatgagtcattggttggaaaaaatggaatgggttccgttatcttttcaggatgttaataatgaatctttttcaggatgtgattttttaataaaattaaaaaataattattaaaaaaaaacaaaaataaagatatcatttccatttcttttggacatatttacttgattcttccagataaagaaataaaagattctgttttcttttatttcaaatatttattctgatttagaattaacaaaaaaaacacatagatagtaggtatttgataaatcaatttaataatttaaaattatttaataatttagtttaaattattaaataaaaataatacaataaattcataatattaaatttaatttaaaaataaataaaaatatttaattatcattacaattttatgatacgaatacttacatagtaaaaactcattaaattgagaattattttgtaaccaagtttattttattgattattttttaaaataaattatttttgaaaaaaaactctctccatatacatattcaaaaatgtaatcacctatatatgttttttcttttttaaaaaaaaaagaatatttttggtaaaaactctctctctctctctctttatatagaaaataagtttaaaactataatcaacaattataattttaatatgaattatttgttgaaatagactatttttggtaaaaactctcttcatatataaaaaaataaatttaaaaccgtaatcatctataatagttttatgatataaatgcttatattgattttttttttttaaatggattatttttagtaaaaactctttttctatatatataaaaagatagacttaaaaccgtaatcatttattatagttttatgatatgaatacggacatgataaaatctcattagactgataattattttgtaatcaaatatagtttatagattattaaaaaaaaaagaaaaaaaaaagattatttttggtaaaaactctttatatatagaaattttgtaagtatttacaaccccttttgacgaatttcaatatttttaaaaattaaggtattaaatttgtacagaacactcattaatcgttg

SEQ ID NO: 13607 - DNA, 2969 bp, Vitis vinifera
  Intron number 1 from transcript GSVIVT01016727001 (locus G SVIVG01016727001) derived from phytozome v7.0 (chr-ID chr9 ; pos 687273 to 690241 reverse strand)
ggtgaatttttggcaacacgagtattctacttcaggtaaatctcgattactgttccaaaatatatagcttgaattcctaaacccaatacatctagtagatgcataactcacatggcttcttattcagcttgtaaaaaaattctatcatcttggtgggagtgttcccttttagaactctcccccttttcacttttcccccctacatgcacaccgaggattttcggatttctggtgaacttctaggcattgtggtgacgaattcaatgacgacaattatagatattttttgcttccgtctagggtttatttccagattgttggattagaggacatagcattctgaactagacatttgattttagctgtattagttctttattatcaaccaaacaacatcttacacatacctcaaatccttaagagccacataataaagaatgttgctcggatatttgatcacatgtagaaagttagaaactcttgtcagccaatcagatggttcaggaccgcaacttggatatgtggcaattggcatggctagatgtttctctgtattatagagaactgtgagttaaagagttcagattaaataaggatcaattgggatttgggatttgggaaaaaggaataaaagatcatggtagaaactagaaagtcaacccgacccctttggtacacgtgttggtctgacaagatatgatggagttcctttgtcgtgacacgtagccacctgacattacctgctacccacttgcaccgattaagtgtcttttctaatcacaaccacctcggtgtcgacgtggcatggcccacgttcttgggggcgttcacgtgattgggtggcccccaatggggccctgataactagagataataggcttttgataggccagtctaatatgtgctgtcactggttttgctaaactgtaaaagctaaatccaataacagtgttccttgtgcattttaaaaaaaaattaataataatattgttaaaagcttttccagtggcatctaaattatagcaaagcatgggaatcagattgagccaaatgtaatgaggcttttaggttactttatgatatttgaaatataataatcattttgcaatttaagtttgcatggatgagaaattgagccaatgagatcctttaaatctggatgctggtttccatgacaattgggatctgtaattcataaatctctgttccctttattgagagatttgttctgcctatgtttcaaggaggtcctttcttccatttttctaaacgtttgaaccattattccagtcttatgttgatgggatttttatgatggtttccgccgtgaagtgcgcagaggtagcaatctggtggaaactttattgaaaatgatgggtgcgttttggaccctgtttgaaattggatataacgagagggttttgaggttttgtatgaggtttttcaactctccattttgggttgaaaaggaaaaaaaaagaaatgatggttttaattaggtgttgggatatatttttatttttaaaaataaaaataaaaataatagtaatttttacataaaatttaagagtacaaaaaaattatgaatttattttaaatttaagataagtttgtaagagtactacattaaataggatttattattatttttaaattatttatttaaaattttaaaatttttatatatttcagtctttattactatcaagacaaactaaataagaaaatttgagttaagtgcaaggatttgagattttttttattctaatcatatatttggagcactagaaattctctgaaattccttctcacaccaatttgattggagtaattattgtgcagagccttatcacaatttgcacgtagccatgacatgaaaacacaggtctaaaaagggtttatttgtggcctacagccacaggaggaagtgattcaggggccggtccggtgagtgagggacattcgcacgctacacttagtcgttttcgcacacactgctcctctcagttccgtggccccataccttcattgactttgggtccctagccctttccgtcttttgatttaattatattgaactcgaactatgattcgtagcatagcaggtgaaggatgattcatgatatttagtccatttacttggctccttttatcaagtctaaatcacatttctccctctgatagggaactctggtgtttgatgtgacaagaaattttcgttttcttcaactaaggagatattcaccatgaagtgacttctctgtttcaagctcagcctttacggcactttttcgcttgttatttcgtggtttgcagaatcccctcgtggcactcttgtcaccatgcgattaataaatacattgagcttcatttcagcatttttttccccttaaaattaagcgtcttgggatttgtgttgcatgatcagacggataaatttggtactacgatgcctccttttgaaaccagaatggtaacgtaactacaagaacaccaccccatgtgtcataaaatatagagaataattaactagaattaaagagaatgtctttatattagtggggcatgggtatattagttgaaaaaaagaggaaaaggtcaagggaaaagagagtgagaggaaaggtgtagaggtgtgaagaggacaaggagagatggagtggcaaaaggccgtgtttgggaacttgaaccactagagaatcgtttctcagcttcaccatagaattcatcacaatcctagtttatttattacttccaaatcccatttctcattggctagcttgctcctgcaatcttctttcctacgcctggttttctttctattcatccaaacacccaccacctttctatctgagaaaaatgaaggtgagagctggttgtattagtttagtctgaatctttcaaagtaaatggaatttatggtttttcaatgagttttggttttcctctggctgcagctcttcggttgg

SEQ ID NO: 13608 - DNA, 7584 bp, Vitis vinifera
  Intron number 2 from transcript GSVIVT01029142001 (locus G SVIVG01029142001) derived from phytozome v7.0 (chr-ID chr1 1; pos 19255354 to 19262937)
cttcctttgcttcagtcactggcttcagcttggtaagtaacatgggttcttccttttttattcattttctcacacattacccacatttgatttagctccttttgggttgtaccctttcaaatatatgttctatctcttatttgttatactgagttcttcattggattgatgacatagatcagaaaatatttatctaaatttagaggttactataatattctagaattcatcctacctttgtttccacagcttgtttccagtttcctttctggaccgaaaatttgtctcatttgtccattcttatctcatacaatgacagcagtgtcccttcaaccttcttgattcaaggctcttggctcttgacccactctaggcccactctacattggacaatgcagtgatggtactgtgtgaataatgtcgtaacaacggtctgtgtgtttgtgaacttacaaaaacaagaaaacgaaaaaaaaaaacaaaaagtggatatgcctatgggtatagtttattgcccggatatagtcattattattattattaatattattattattattgatgttattattattattattattattatttttatatttattgttgttgtcattgttgttattattgttattgtgttattattatataaaaaattgatcagctaagcattagaaaacaagatttagataagaaaaaaatgagaatataattgtaaaggtatcaaaatatggtctcatatggtcttagtgaaccattttcatgacttgctactttttcattagttgctatttttcaacatgaccgagaagttatagggtgccctagaaagaaaattccaattaagaaatatgtttctccaagatcattagattaatgaataattactagtctgaagaatagtaaatggcctaatccatgagcaccttatccttgcttggagttctttggagttctagtcttaatcaatagagcaatcttgtctacctttttggcatggcggtaggtgtatatttagttaaaaatttcgtctccaacatcattaaattaaaattagggtatagtacttgatgaataactactagttttaagaatagtgtacttgtgctttgtaagtaaatttgtccatttgtttcgattgagttgttacttattttacatagattctgcttatttttttccatgtatgaaaattttgagaaagatttcatgtgttaattatttagtatgcattatcaatgtcccaacactctaagatatttccaaccaagattttaaaatgagtttcatccaccttttttccttcatcttctttcttcaacttttcatttaccgctaaaggagcatttaaaggttcataaccaaccacacaaaattcgtttaggacattcaacatacctcttttagcaaataaatgcatgatcttcttcttgatggaattcaattcaaaataatgcagcaatctcgtcactcatttcggctttttttttccatcatttttttttcaatcattttttcatcatttccaataaaaaattaaatcatcaacataaagaacaacaataaggatcttaaagctacctttggctttgaaatgtagagtagctagacgcattcttgcttatgttaaagtcatttttgatgaagtagctatcaatttaaatataccaaacatgaagtttcaaatcgtacaaagcctttttcaacctataaacattgtttcctaggccaataacaacaaagtcttgagattgtttagtacacatttttctattcaaatctccattcaaaaatgtcgattttttacatcaagttggtatagtaaccaacctttctcaacagccacaacaatgatagctctaatagtgtcaagacgagcaacaggagtaaaagtcttatggaattgtgatcaaccttgcatcaaacatttaaatcccactatcaaaatggtgtttcgctcctatggatccactttaattacctccttgccactctgttttataaacaattaccaacttgcattttttttaatgacatcaatttcttggcccattgctttcctccgatcttcatctttttattgtcttttcaaagctttgaggttgtaatgcaaaaattgcatatcttataaatgtcactcaaattcctcatttttcttggagttaaagatggtggtgatgagcatgaagttgaagattcagttgaggatggtaatgaaaccaaacttagggagttttgaggtgattaaattgagttttcaccattatcattttcagtgggggctttggttggacttcataaaagaaatttgtttgtttgtttgtttgtttgtttttaactttgctttcttcccaattccatgtagttttttcataaaaaatgatatctttatttatcattaacttatttgattttaggttttatagcttatagcttatagccatttgattatgagttttaatccatggaactacaatttttgcttgattcatccacattacccctcttttcctttggtacttgcgaataacatatttagccaaactctctcaaatgtctcatgaatggtgttctttcaccccatgtttcaattggagttatgtttaacaatgcctctattgggcatctattcaataattatgcagtagtgttaccgactttatcttggaagattttaggtaactctttctcatgtagcattgctttagctattttcataatagtttgacttttttctttcactacttcattttgttgagaagtataagtaataatgagttgtctctcaatcccttcatcttaacaaaacttctcaaattggcatggagcatatttttttattttgttacttctcaaggtctttacataacaaccactttgtttttcaacaaaactcttgaaattttttaaggcaactaacattttaaaattttacctcttaaagaataccaaataattgtttcaaatgcctctttttctctccatgaaacatcagggtgaatgtgatcaaatgcctccttttcattccatgaaactcccttgggaaatacttgtttatgatattttccaagaacacaacttttacatacttcattctttttttcaatggtgttaggtagttcttatactatcttcttttagcagagcaacttcaaatttatcttgaagttcaaagtgctcaaacgtgctatgcaaaaccattcttttttaacatcttatactttgtaagccacattcttagcatatctgaagacaattggaatgtgattcatgcccagtcggtgtatcagctgatttatgtcgagctagtgctccttagctgagggagtaatcaacaaaatttataacctactacaccatgaactagggtagcaaagacaaagctactataacatagtggctctaggatcgttcactgggaagggttttcaattcataaatgataccaattcaaagataaattggtgccttttcatttcaaggttaacttaagaaagaaaacataaaataagttgaaaaaggttttgtgttaagctaactaaaaagagaataatggaaattatttatgaagaaaaacattccttggaggtttgggtttataggggagattccttatgcaaaaacagagctccggtcatttggttcatttcctcgcattagagaattaacatatagtcaattctctaatcggtgttgtacagatgcttccccttaatgggttcaaacattaaatccctctcactgatgcaccttgcaatggctcatgcctctcacttagcatttgccattcaaggtgatccttaaccttggattatctgtcaaaagcttgcaagagataactaatggatgtctccttggagtccaaaagcttaccaagtgttggctattctagaaaatcctaccttcaaatcacctcccaaaagctcgcaagaggtaaactagtgcatctccatgaacggagatcacttgcttcaccaagtgttggctcaagtgaattgaaagcattttaagttaactaaaaacatagaaatcattaaaggatctcactttcttttcattaatggctgaaaccacaaagctataaattcttgtaattggaacctttcccggcaaccttaactccaaggaactaaaagtctagccactcattctctgaggaaacttcctcagagcttgtttggctagtaagaaaactaacaagaaaacaattatatctaggaaaaacagagcaagtgctctatgaattctatatcttcttcctactgattacatcctctcgctaaagaaaaatacaaattatctatatatcaggttattcacccttttccttgcttaaagactaaggaatcctatgataggtggattacaaggagactttggggatttagacaatcaatatctaatgcaaaatatcttaggatgtcggtcggaaataacaggaagctttaggagaccaccgtggcactgtataccgagagaaaaactctgcgagtaagtgttatcagagagtccggatatgtctatccggagaagttgaagcgtccttctctcccatccaactgtgagaaatccggatataaaatgtcggcgcacggaattcctcccccaggtgaactgagctatgctgcaccagggggaccgtctacgtgtgcaaggtgtagggacccctcttccgggtgacacggagtgcgcaaggctatcctgatcaactccatccggattccccaagaggacacgcggcgctcgtgaacatcacacccggacgatagcatctcctatccagatatgtagtccggattattgacttaacatgagcaagccttcctatctatttccaaaaatctgcaacagcccatgttccgccgccctccgatagtgtgtccagacgcccctgtccggacatctttgtattggattccaaagaactcttctcaatctcagatttgctttggtgatccaaaagctatcaaaacaccaaaacttaacacaatttgattagaattgattgcaagggtccttaatatgttaattgggttaaaagttgataactactactcaaaagtatttaaaagagtttattacaagctatcaaatagcactttttgagtagtaatcagaatgcatttttttttctttctatttctatcttcttcactacacttcttcattgtcccttatcatagatggtgcacacattgtcattgaagtgaagtttgtactctttaccacacaaagaaaatattgatttaaagttaaaacaagcagaatatctctaatatacttggttcctatactagtttggataccaattatgtcttttccctttacatgcaccagattaccctttacctattttgacttgtgagttaatggttgtattcatgtcaagaaaaatatctttattacaaaacatgtggtttgtgcaaccaatgtcaacaaaccacatattattccttttctcaatagtacttaaacaaacatattttttaccttctttttcttcacaacttgtttttttatcgttctaagtctacaattttttttaacaagcctgatttttttttttttttaatataactaaaaaattatggcttccctttaaaccaacaatcctcttcaacatgattattttttttttccaaatattacattttgggaatgcattagtgaattttcttccactattgaatctttctctacctcttccatttcttcctctaccaatcttggattacaaatattacattttagaatgaattagtgaattttctttcactgttgaatctttctttacctcttatatttttgtctctttctctttctcattcatttctaccaactttggatgaattgcttttattttcattgcttgtgagtttgttttcaacatttcttaagttaatgctcaacttggactaaaatgcacttcaattgatttttcataatgcctcaatagtccttataaataagttttcaaggacccagacggctcatgtaagcttaacaaaaagaggtctttttatttcaaccatagctagaatttggtcaaatttatcaagtaggctaattaaaattgtctcaacaagtcttttatcactattgttttttccacaatatgactaaatctaatttactaactccatgaatttgtaagagaactcatttaaaatttcattttccctcgtgttcatatttttaagctttcttcgtaaagtttggagcattactgatcatgttcttctatttccttggaagtcctattgatggatgtctcatgcttttttagctttggaagctgtcataattcttgggaaaatactattatcaacaccttgttgaataaaaataaataaaaaataaaaaataaaaaagcatttgaatccatttttctcaacaattttaactgatgatctttttcaattggagtcactattattgcatttttcaggttcactcaaagttgttttcaacaaaatgccaaacatcttgaaacataaatgatagtttcatggtcacacaccaaaaatcatggttttccccttcaaataatggaataaaagaaaattgagaacttatactttagttacttctactagcccctgatttactctacaaatccttgatttttctacttcaagggtgaaggttccttgttatttttccttctcaaataacaaccgagttgttgagctcattaatcataactttgattttacacaatcttattgaaccacaacaataccgccttcctctccttctctttcttcttgggttgaagcattgaaaaacaaaaggcaatagagagagaaccacctacttataccttatttccttatacaaaatccttttatatttactacttctctcctccaccaaaccctagcttcattgccaaggattccggtctttaggaagaaaagaaaacttagaattccccctctctgatataatatgtgtttatcaagattccataaataaggagcgttctactagagacaaaagacaagaagaatgcttggagaaagaagagaaagtatgagtttgggagaaaacctacaaagacaaagctatccaacaacaaaacaattcgaagagttagagtaaaatatggaaatgtaaaattgttagcttagattcaacttttgttgtttattatttcaacaaaaaacatgggataaaaattgaaaataaaaaggatatttaaaaacgcaagactcaacttgatcttttttttattttatatatgaaatgagactaaaaggtataataactacaaatacattgaaaaatgagccacactaatcttcaaaactaaactttctaacatctttaagaaaatttgaccaccaaataattaattctaaattataaatacttttcataactaagcaatctattattctatttgcttccttataaatataatgacaattataaatatatagatcttgagataacttccaaatatcttctattaataacataatagaactaggaatattactctttttatatgagtgacacattatgtaacattttctttgtgatgtttttagcattaatttcacttttgtttaataggtagga

SEQ ID NO: 13609 - DNA, 3960 bp, Vitis vinifera
  Intron number 10 from transcript GSVIVT01036776001 (locus GSVIVG01036776001) derived from phytozome v7.0 (chr-ID chr 19; pos 22702554 to 22706513)
ttaaaaactgcaagtttcttgggttacttcaatcggtgagtattatggatgttgatcttgggaaacctttgaattagttgcctgtaattaaataggtggtcatggtttctaattttaggatttatggagggggaggtggaattttggtttatgaattggttaaggattatatatggcttatgggctggaatagataggaaatgtttgcttaataatctggacagaaggtaaatgtagagtttcttggatagtatggaattttgtttaatggatcggttaagaattataaagatcacatattaatgtggtttgttggctagaattgagagcaaatgtttgctgtggaatctggacagcaaggtaaatatagagtttctgggtgccaaagaaaggtaaggtttgggtctatgttctaaagcaaggattttagggataatgattgggttaaggaaggcctggttgtgtgaaaaaggagagctatgatattcgtgtgggcatgtctgatggtggaagtaaggagcctctgcacgttttgcagcatgaggcatacctcacttttgctttgatcacagaggatgatgtgaggactaatgcccttcaaggatggatactggttggtcccaggccagttgttggcctagaagcaggatcctttttgggataatgctggcttgaactctctccaaagtgtgccttcaacaatccagttattgcctcctaaatccacagaaattgcagtggaccttgatttggtgggactcccagtttctgtaattcaattggctgagaatgaagacctgagaatttcttctatacttattacaatggaccttggtaccctctttgttttgaacttgaaatcattatctgcactccttttctctcctctttaccagttaggtttatattactcttcttaatatcaatgttggtggttctatactctatgaaaatggtggaacctattagttctaatccctgtggaaaatgtcactaggtctgtcaccaatcctgcaaagtaggtccctcttcctttaggtcactgtcctgcagaatcctcttttcttcactaaatggccttcctgccaaaggttgcgattgtaggagtcagactcctgctgctttctatgaacctcagtcccaccagatccacagatggaacacatccctcaggttaggctatagatattcagaatctagctggacatatactctaggtagaaatttaaatatcccaactctaggccttgcttgaattatgaggattggtatttagggtatgttggactttggcccttgtgtttttttgttgcccatgaagatcattagttgtgatatatgttatcagggatctagaaataagatgagtgataagggatttcttttgctaggaagccctgaaaatagtaatttgttaggagacagatggaactaattgatggaaatctaatgaaagcacttgtggggctaggaaaaaagagtgggctgattggcctgctcaaggagtgtcaggggagttatgataatttgaaatttcaagcttctttaagcctgtgagattgtagttggatttttcttttataagaacaaactaagaaccattgtgtcacattttgcttgaagaaaacctatataggctattgaaatcaactctttacatacttaatccatgatagtaaaatgtttgattctgataaaaaaaaattggaagttcttgtggggaaaaaaaaatctttttaaatgactgtaatttcataattgagaaaggaggatccactggtgccactaacagtagataaggttgaaacctagaagcaaatccatgatggatgctataagggatcgtgatgtaggacaaccctaggatggttgcctacactcaagggtaggtgggctagggttttatttttagggtgtaaggagaagaacaaagaataaatttgatggtagagaaaattataagataagaaatagagataaagaagaaacaatgaagtaaagatgaaaaaccttagagtctcactaaggccttctaagagtctcacctataagaaaatcaatggagtctcaccattgagggttgcaaccttgcaatgaaagaaaatataatattattcatcaattcattcatttgatttacattgattagcctatttataggtttctctaagaaatccaaagtctactaggactctaataacctattatgattctaattctaattataacatccaaaatctactaagactctaataacctatcatgactcaaattctaattatattataactcaactagctaatcctaattagactccaacaaataccaatcccaattcaattctaattgatattaatcctacttaaagtttacttaggtcttccctttcttccttgaataaactttaaaaggctttcccccatcagatcgagtctcccactggtaggatattgcgcttctgattgggcataaacatctatacaatgctcctttttgccaaattggtgtatgtggttgatgtgcaagaatgaggaagaaaacaaagcaaagaagagaagcgaagagatgaaaagaaggggaagtagcacgaagaatgagagagaagagagtggaaagagatggtgattgcacaaatacccttattgctaaattatttctaatatgtgctacccaaaattcttgaagcaacttaagattaccaggaagcatttagaagctctcttttactcatgcatgtcagcaccctcattctagtaagattcatggacatatggttttgatcacctagaacatccctacaagtattggcaaatgcgaagatgtgtcacatctgtattacatggacttaggtagaagttctgggtgttggtgtttgcccaggtgttacattcattttatcctgagatcttaggacatggaagcatgactaagtaacctaattttcatttttcttgttttatatcctaggtcaagtaactaagatagaatgtctaatgtgagttcctaacaattaacttgggaatcattcctctttttctttgttggacacacctgttgggtacatatttgaccaataggcatgttggagactataccctgaccaaaccttccgatgtcgtgtttgactgttgtgcttgacatagtttgaagtgtccatgtaacatagattgtcttatacatgtaattattatcaagcattttaatcctaaaattttatacatatggtgctatgttgtcatcttgcgaagtatacgagattgttaaattgttgatttttatgaaaatggcaacatagagaaattatgcctaacaatgataatgctttattacccaaaaatgatgaagaaaaagtgatttcagtgtcattttagagaattgaatcatgtttcagtttgaacctcatcttggtagtaatttcttaggacaaagcaacttttccctttcaactttgcctttttaatgatgctgaattttccctctgatatttgcttttacttgtttggaatgttcttcttttccttttgtatcttctgaaccatcagtatctttctagttctttatttatcatatgtagaacgtttccatgcaatatcttttcaaatgattaacatccctgtgttcaacaaataatttttgaaaaatccatgtactttttgttgggtttattgatttgtatagaaaagtcatcaataaaattagtccccctttgctgaaggtttgtgtggtcatgtgataattttcttgaaggaaatctggggtattaaggtggtattttttaggaagattttaatcatacaatttttagcattttgcagagtgatatttatttatatgggtatcatggtgcctttttcatatatttcatatttataatccactatcggtgcttatgtataaagggaccattctgctatatgttatggactcaatatttacccctgaattggcaggttggacaaa

SEQ ID NO: 13610 - DNA, 2437 bp, Vitis vinifera
  Intron number 6 from transcript GSVIVT01024347001 (locus G SVIVG01024347001) derived from phytozome v7.0 (chr-ID chr1 6; pos 1279386 to 1281822)
cttggttttggtaactttcaaggcatttattgcatttcctcgtatccatatttttccttgatgcttgaaatatatctattataaggaaggaaaaagtgatactaaaatcatgatcaaatgttagaaaattgggataaaaaacctgaaaatcattgctaaggatttgaattgggttctctctcacaagattgatcaccattaagaatgcatattataatttcaacatttatgaggatcctatttagatctgattgacttcagactgtgcaactctaactatgatatcagattctgtgatgaaaatatttggacagcaatatctaacttaatattgtattggcttgaggatagctggaggaaagtgagtcaatatctaactgaagtatcatcatcatcatcatcattattatcatcatcatctaaaaaaataaaaatgacataatgcaaatatggcagtgatgataataatgataagaagaagaagcaggagtttcagttggaatttaggatgccttttcatgatatttgtagtatcgtattatgacatttctaggatcaagtgcaggagtttccaaaagaatttttgaatatgaggtattgattatgacatattagcactttagaagtcaccaggaggtgtggtagttggtcaacatgtagaggcaaacagggtactataaagtactgaggataatcttgtgcaagaagttgtgcttcaaattcataaattcagaatagagattccttaccagatataaattaagcttctatttgattagcacttgttttgtttctgttcacatgacaaatatagcactccccttaacaccttgaatgccctatgtttctaggtttcattttcatccttggtcctcatttaacaaattgcctaacactgtccaaggtcttcacagtatataaccattttgtgtatcctatgttgtgttatttaatcatcaattaatgaattctagtgccacctatttttgagctctatgtaaacagaaagtattttccactgcttctgggttggtggatccaatttttagaatgtgcttacaaattatggcttcactatgtcacacagtctttactatactgagatctgacattggctcttaataatctgaatgctatctgcaaacagaaaattaatgaatcttgtgttatccaatacctgtaatatatctgattctattaaatcagtaagggaaatataatctaaacctaacacatcggaaagattacttacgtggattttgcagccaacaaggtcctgctatgatgagccaaccacaatgtttgggttatggctctgacaattgttatcttatggacagtttggaatagtcatgtgggtgaatttgcatgaaaattttggtccacatttgggcccttcttggagatggaggtgctgtccacatttgggctagatggcttctcattaaccttttggaaattttcttgccctatagtgggtgggaggtgatgtcgcttttcaaggaatttcactcgaaggaggtttttatgtgttgcctcagtgctactttcttggctcttattcttaagaagggaggagtggaagacataagggattttaggccaatcagtgtagtgggctgtcattatagctatagacatattaatgaaaagggagtagtcaatggttgatagatgtagtctttgtagaagagaggctaagcacattctgattcactataagaggacaaaggagttatggatcttcctcataacaatctttggcctgaaatgggtgtttctagagttagtgagaaacctgctcctcaaatggagtttatttctggttctgccttttggcaaccgttgtatacttcctgtatactttgagatgccttttgggcacccctttctgtttatacatactatcctgattttacctatcaaagaaaaaaatgaagtttaagggattggataagcatagccatgtttgatgaatggcttaaggatgaagagctctcagataagaggttaaaagagaacttcattagagccctcttggattagtcaaatgcttagttagactttggaaactttccaatgattgactttttagatagtcttaattgtgcgtagattgggttttgtggctcttttttgtagataactgttggtattctttgtttgtttgtttgtttttgcatatactacatgtatacatagagtgtacccccttttcttggtgctcttttaatagaatgctttgtttgcttatcaaaaagaaaaaaaaaatggaaagcaatttggatatatctttatctggtatgtttggaggccttgttctactggttcagctgctcatcacatatatatattttattgtttttaacatttccattaaactattggttcatccaatgcagccccttcaaaggtccaattattgtactctcctcgt

SEQ ID NO: 13611 - DNA, 23169 bp, Vitis vinifera
  Intron number 5 from transcript GSVIVT01000394001 (locus G SVIVG01000394001) derived from phytozome v7.0 (chr-ID chr1 7_random; pos 648335 to 671503 reverse strand)
gagatttttcttcatctattgcaggactactcaaggtactttttataataaattctctcaattttacaaggttctttgtattataattgttaaactagtggttttaaaggtgataacataacacaagttgattgacccttggttaaggccatttgcaaggcttaagggatgggtgaaagcctttcaattatttatttttattaaaagagtttttaattagttaaatataggatctaaattacagttatatctaagcagcctatttattgaaagctgaaaataataggtcaactattccaacactcctctcaaagttggtgcaaagatattttgtgtaccaaacttataaataatctgaagaaaaattgtactctaaatcttttagtgagcatattagctagctgtttagaggatgaaatatatggagtgcaaacttgtctcaagtccaagttttgcttgatgaaatgtctatccacttccacatatttggtccagtcatgatattctagattatgggctatatttatagctactttattattatactataacatcattggattcttcacttccaccttcaaatctgagggtgctatttcagccaaagtaggtcaccattgatccatggctttgaattttgcctttgcatgagagcaaacaaccattggttgtttcttacttctctaggtaactaaatagtagttggccacttatctaccatggatccaactcaattgacattagtataagcttccaactttagctccttgtctttatgaaatcaaagtcccatgcctggtgtccctttcaagtatttgatgattctataaagtgcatcaaggtatgatcgaagtggggcatgcatgaactgactcactacactaactgcataggctatgtctggccttgcatgtgacaagtagatcagttttctgaccattcattggtacatcacacagtcaaccattagttcttcccttttttaatcccaacttgtagttgggctctattggagtattaacgggcttgcagtcaagcatacctgcctgttggagaagatctagggtttatttttattaagaaatgaagatcctcagcttagatctagtaacttcaattccaagaaaatcttaagttccccaagtttttgatttcaaattcttttgctaattaaatttttaatcccatcatttcttcaatgtcatttgcgtatacaattagggcagtgactcttccaatagaggacctttttatgaataaggtgtgatttatgctcatacactgttggaacatccatgtggtattcttcaaagtctccatggaggaaagcattcttcacatcaaattgatataaagaccaatccttattttctgtcaaggataaaagaattctgatcgtgtacattttagccattggttcaaatgtttcatatacgattgagtgtacccatttgcccctagcaggatttgtccaaaacgccatcagctttgtacttgactgtaaaagtctatttgcagtccacagtccttccttcaataaatcaacaacttcctaagtctgatatttttccagcgctctgatctccttgttcatggtctgcctccatggttttgaggttaaagcttcttggactagattctcaacacttctcctcaagttggtgcatggatatctatcatgcccaagttgcttgttagatgttcaaaaactagtttatgaagtcccttgattaggatgtcagctagttgttgggtagttggaacaaatggcgtacatatgatatcaacttcaagtttttcctttaagaaatgtttatcaatctccacatgtttagtcctatcatgctgaactagattatttgtaatattaattgcaactttattatcgcaataaagcttcaaagggtctaacaacaggttatctcagctctttcaggacttgctttagctacaacacttcataaaccccatgtgccatcgctctaaattctacctttgcacttatccagaccaccacactattttttactcctccaagtaaccaaatttccccatataaatgtgcaataccctgaggttgatctcttattagttactgaacaagcccagtttgcatttgtgtatacttcaactccttgctactcattcttcttaaaaaatagtctttttcctagtgtattcttcaagtaccttaaaattctataaactacttcaagatgtgcttcaaaaggtgaatgcatatattgacttaccatactaactgcaaagaatatccggtcgagtgtgagataggtaaatcaacttaccaaccaatttttggtaccttgtagtctccaccgaaaccctaatttctagctttccgagcttttcattaggatttataggggtatctaaaggtctacaaccactcattcctatttcctataggagatcaactcaaggctccaagacctttaatttcaaattcagtagttagacacttcttcaaatgattcatcccaaccatattatctctgcttagaataatgtcatccacatagactattaaaattgtaactttacctcctagagagtattttagaaatagggtatgatctgtttgtctctgataaaaacctattttattcataaagtaggtgagtctctcaaaccaagtccaaggagattgcttaaggtcatataaagacttctatagtttacaaacctttgggccaacccttttatcaaagccaggagtagatccatatacacttcctcctttaggtctctattgaggaaaacatttttaacatccagttgttgtagtggctaatccggatttgtagcaattgataaaagaactctgattgtatttaattttgcaatgagaaaaaaggtttttgagtagtcaatcccatatgtatgtgtaaatcccttggcaacaaggtgcgccttgttgtacctttgtagagagccatcaaaattatatttgatagtgaacacccacttggagcaaacaatagtcttccttttaggtcgagctaccacctcccaagtcttattcttctcaagggtcctcatttcctaaaaaacagcctccttccactctggaatttttagagcatcctttacattctttggaatttctacactagaaagttgagaggtaaatgcgaccatggaagatgacaaattcttataagacacaaaattggacataggatgttgactaagacttaacacctttttgaaatgcaatagggacatccagatcactaagagactcttcatgtttaatattggaagaagaacatggtttagatgaagccttacctttctcaagtggtgagattggatctgttctcgagacagattcatggccttgttgtaaagtaggttccaccattttttgaatatggtttctccttgagtagacacgaagctcttgattgtttttatttgtattttcattgaattcaatagtttcatgatcttgatcatgtgttggcattaaggtagtttgtccaacattttcaatagttaaatcatttgttcccaaagtttgtctactaccaataaactcatcaagcacaggtggttgtttttctattttttctagagatttttctagaaattttcctggagtttctcatcactattgaactaaggtgggttggaatagtggttggtctaactcagacacctcactaggaatgaaatctacacttttattctccccctgaggatgatcatttaaaatagggtctagtttaaaagaaagtgacgttcattgttataaacattcttttggtatgtggatcaaagcatttctatcctttttgtgttgaagaatatccaacaaatatgcatttggatgctctaggatcaaattttccacgattatgattatggacatgaataaatgtagtgcaacaaaaattttcgaagataaattcattgaaatctgtgaagtaagaaaacacatgttgaaaaaaccaagtggagtttgatattttgaaaccctagtaggcatcctattgatcaaataggtggtggttaaaatagcttaactctaaagatatttgagaacttttgttgaaaagatgagtgatctagcaacttccaacaacttctaaaagatgtctattctttctttctgccactccattttttttaggtgtatcaacacaaaaactttgatgcattataccattttctggaaagttgtttcccaacaattgattaaagtattctgtttcattaccagttctgaaaatttgaatatttttgtatgaaattgtgttttgaccattttctaaaaaattttaaacacttgtactacttctgatttttcttttagcaaatacaccaaagaaacccttatatgatcatttataaatgtgataaaccacttttttttttcctgaagaagtgctgaccctagaaggtccctaaacatcatcatgtattacaaaaaagggtttagaccctttatagggttgtaaaggaaaaaatgcacgatgatgctttgcaagttcacaaatttcacaatggaatgaagatggatctttattaataaacgccttttgaaataaatgtttcaaatattgaaaattgggatgtcctaacttaaaattccataacaacattttattctcactagttactaaaatagattcaaacaagtactctgagcttgtctacctagtttgattcgatcttcaaagaaataaagtcctccactttgtctagcatcgccaatcatcttcctcaagtttaaatcttggaattcacattgagatgagaaaaaattagcttgacactttaaatgagaggttaatttactgacaaacaataaattgcaagacaaattaagaacataaagaacattatggagtgtaagaagtaaggaaaatttggtagatccttttctagcaatagtcgaaagagatccatctactatttttatctttttgtttcctacacagggactataagaaaacaaatttgaagatttggtcatatgatcgattgcactagaatctatgattatgggcaatttgaatcaaggtgaacaagggttgtgagaagatgattacatttttgggataaggaacaagaaggggattgatttaaagagacctaacattgaataagtttgtacagatgctctatttgatccttagtaaaaggaggtgtttctaaggaaggttgctgcccatgttcattacttctggcttggtaggcacgactctccccgctaggtttcttcttctagtttgatggcttgtcatgaatcttttagtgggtgtcacaagtatgccagggttttgtatagtggtcataccatggtctatcgccctttttagaattccttttttctctttcttgatcaaaccccttagtaacaagggaaaaactatcaaattctattctagcccttggtgactcaaggttcatcataatggatcttctagcatcatctcttctaactttagaaaaaacttctcggagagatggtaatggttttttccatagaattcgacctctcacttcattaaggtctttgttcagtcccgacaagaaaacaaagactgtcattctctcctcacttcatgtaccttgcactattcctagggttttcccctacctcttcataacacaaatctaactcataccataaaatcaacatctcgttataatactcagtcacaccacgatccccttgtttggattgccacaactttgattttaaatcaaatatcaagcagaattttctagatttgagtaggtttctcggattgcctcccacacttccttggcagtttttatgaagagatagggcttccctatttttggctccatcaagttgataagccaagttgttatcatggaattttctgatctccatgctgctaactttggatcatttgtggctggtttctttaccttaccagttaggtgtccaagcattcctttatcatcatcgattgctggtttcatagtctgggtccattttaaataattcttactattcagtttatgaactgttaatcgaatggtagaactaaatgatgagatatcgggaggcaacatgatttgtctggtcatcctctgttgtaactgaggaggatgaattttcgctagccccagtcatagttgtcttcaccatgggaattttttgttaaagagcctattgtcacggacttagtcgttcactaagctcgtgcggcacttagacaagctaagacgcttaatcttgctaagtcagccttgctccccgatgctttagctcgcccggctaagacactcgcgactcgaaagcttaagaagcttagtaggcaaccccttaaagaatggaagctctttcttattcaaagaagcctttacaagtgcttggatgctcacttgcttggtgccttggccaaatgaggccctcacctatttatagacaccaatggaactctctggaaccttggagggttccttacaactcaagaccattctagactgtcctacatcattctaggtacaagcctatatacaagtatatacaagagtcttctagatttctctagaaagccccggactcctctcatgccttccaccatggtgtagaattgtgtggattcctccaggcttctctagaaccttccacactcttcccactctaggagtctccagaagcttcctgactctatataagccatggggagtctcatttggaatcagcttgtgacactatgctctaataccatattgagaaagaataatataaagaaaaatatgatatctcattctcattgatgatgatgaatatttatatataaacacatttgagttctactataattcaaattctatctcccactctaattcaaattaataatagacctctactctaatttaaactctatctcctactctaattcaaagtaatattaaacttctactttcaactttatattctagtctaattcaaactaataataaatagataaatagtaaactttaaattaaggagaaacattcaaataataatattcctagattctcgatagattctaactagaaaatcttgtgatcatgccaatgaaaccctaagcttgccaaaattgacttaagttaccaaaaagagtcattgaaagttggactgagaatcaaaacctctacttgccattatctttgcttttcttatcattttaccttcgagtttgttggaaattctaaagaatcgacttactctttcatttttatttttagttaatttacattgaactaagcaattcgtaagtggatgcttatgaaatgaaatgcaaatagcttatatgtcaactagtaggccctctcctgtttaagatctacattcttcctcaaatttctggtttaattttaagtggcaaaaacatttcatttcaaaaaatgaggtatagtggagaaagtgctttggagagttgttgacatggagataggaaaatgtttggttccatggaggggccgggttggtcagtcttttgcattggtggaaaaattggtcctttgtggatggtctcctgtgaggaggtgttggtggattttttgaaatagtttgacaaaatggctagggcttaggtctgagttaagagtagtgtggagatggactaaggaagctataatctcgatttcgttatgttaggtgaggagggcatctttgatttgaccttcatcatgttggatgcatttagtagttttgtgggtatgccaatagagaggcatgaaaaggaaattgcaaccgtgtttagaaagttggaggctttgaaaaaaggcaaagcttagaatttaatgaaaagaggagatcctcctctatgtttcatttcaataaggaactttggaagcttaaggctatgtttggttctcggaaagtacaaaggaaagaaaaaaaatgctaaggaaaatgattttctcatgtttggttgtcctatgaaaaatatcaaagaaaatcaaatataattaaaattaattaaaaacttatgtattttttaattatttaatctttatattgatgagttaaaataaataaaatgagtttgaagtaacaaaaaaaataatttatcaacttttaatctatttttttattttccttcactttttctttccttctacttttcctttgtattttctttccctcgcattttccctcaaattttctggaaaccaaacatagcctaagtgtttgattaattattgcccttcaaatgggatggagaggagtcagaagagttgcagagaaatcctacttgtttctccatgaaattaattttttgataagtaaaaagaaagtatattaatcaaaaagaggaaacaccaaaaaaccagtgccctcgaagtatacagggagtatagacaccaccttccctaactaggagcctacccaaaactccatgaaattaatgattttgttttagaatgttaaaggggttaataagaaaagaagcataagataatcaagtccctcatcagttgctagttgagtgccttggattatttgttgttggttggggtgagtgctattggcaccttgaggtttgggtcctcatggaaagtgtaaaggacttgaccatggaaagttcctccgttacaaaaacaaaaagtccctcatcggatcacgaagggttgacttagtttgcttgcaagaaactaaggtaaagcttatggatgttcttcagttggtgagaagtttagaggtgggtgggtggtagaagcaagtggttcagtgagaggcattttactcttttgggataacaaagtgtttgatttgattgggatggaagtgagggattatgaaggaactatgaggatgattttgcttggtgtttctttggggttaatagtttagtccagagggttaagagagagatttttagttagagttgggggctgtaagggggtagtgggatgacccgtggtgtataagaggagacttcaattgtgtaaggtttccgggtgaaagaagagattgttttgggttctcctttgatatgaggtacttctctaagattattaaggatttgaatttgtgggatcttctagttggcatgccttttacatggtgtgggggccaatctagtcgatacacattgaggctagatcgtttgttggtgttagaggagtgggagaataattttttttgcctcatccagagagttttacgaaggtcaatttcggatcactcccctatcattttagataggggtgttgtgcaaaggtgttaaacgccttttagatttgaaaatatgtcttaaaatggaaaccttcaaagatctagtgaggggctggtggatgagttataatttcagagggttttttagttatattctggcaacaaagcttaaggctctaaaactagatcttaaaaaatggaacaaggaggtctttggaaacgtcaacactaggaaggaggaggccttataataaattggtttttaggactctatgaagaaggaggttgtcctcttcgttgaggattcaaaggttggaagagtgatggtggatgggtatagctagtgggtagctttggaagaaactatgtggaggaaaaaattaagggaattgtagttaagggagggggatggaaatgctaggttcttccataaaatggtcattgtgcatagtagaaggaattttttagctaaggtaagaataaatggagagtggaattctaaggaggtagatattaagtaggcagtgaacagagctttccaaagtcttttatctgaagcaagggagtggaaacctaatattaatggtttgaggtttgcttcgttggagagtgtggaggctaggagtttggagtatccgttctcagaggaaggggttgccttgtctagcttgagtagggacaaagctctacgactagatcactttaccatggctttacggtaatttaggttaggattttgttaaacaagaggtgatgagttttttcataataccttcttcaaaaaaagttttaatgctacttttttggtttgatccctaagaaaggtggagtaaaggattggaaagattttagacccattagtctagtgggggattatgtaagctttatcaatggtcttagcaaacaagattaaaaaagtaatgggaaaagtgatgtcttaactaccaacatgcttttgtgaaaggtaggtaaattttggatgtggttcccattacaaatgaggtcattgaagatgaagagtggcatcagtcgtatgatttgtaaaatggatattgagaagatatatgatcacattaattaggacttttaatggtgattttagagaagatgagatttagtagagatggatcaattgcattagatggtgtatccttactgaaaatttgggaaagaaggcggatggtgcttacggtgagtgagagatggttatggggtgggtgtgtggaagggtaaagtttgcttctctatagtcaatggaaggaagaagggtcaagttttggaaagatgagagggaatggtgactcatctttggaagaatcttttccatctctgttctctatagccacaaacaaagatgcatgggtagcggatgtgtgggagcaatatggggaaaggggttgatggggccctcatttttctagtcaattccatgattaggagcttgaatgatagactttttctagaaactccaagctagctcagtcaggagaaaggagtatgacaatttagagtggaaggaatccaagtgtggcaagttcattaaatccttctacccctctttagtttagagaacaagtgagcctttccttgtaaattgtgtttggaatccctgggtttaagtgaagctatgttcttttgtgtgggaagcatcatggggcagaattttaacgattgagcacctgaaaaggaggggatgaagtatgctgaacaggtgctacatgtgtaaaaaggtggactcggttaatcatctgcatctccattgtcctattgctagtgtcttgtggcaattgatttttgttctatttggtgtggtttggtgattcattcttcaatgagtggaactttgttaagctggcatagttttgttgtgggcaagaagtggcaaaaagatggagggcaaatccagtgtgcttgttttggacgctatggatgaaaaaaaaacaaaaatgcctttgaaggtttggaaaaaaacaaagcaaacgattaaacttttgtttttgaattcttttttggaatgtgataaattgtatgtagatgttaactttatgtttattatacactttgtagattggattaatttagagtaaggagaggggtttgttttttgtccctttcctctttcttgtacttacctattctttggcatcaattgtaaacttcacatgtactactttgtgcctctagtttaggtgcttctcttggattattgaagatgaaatgattttttctcgaggaaaatgcatatgaattaccttctttagcctatatttatgttagtatctcttttggatttgatgttagaaattagttagtaaatgtgcaaaaataagacattttttagtcttgacatcaatccaaaggaagcaatgaagatgacttgaagatcagtgaacaactagtgatgaaataaggcattttgatacctaatttgacacaaacaacgaggaatcgatacctagcgataaaggagtggataaagatgcaatgtcaaaataaatttcgatataggagatgttgtattggattactgaaggttgatgacaatttgatatacctttcggatatcgagtttccattgtgatacttgttgctaggttcgacaatgggttaaatgtagggaattaaaccgaattcctaacctgtgagaaacaaaaatagagaaaaacacacgccaaagaaaaacaatcacacgcacaagacagtatttatgtggttcgacaatatgcctacgtccacggaattacagagatatcactattatcaggaaagaatacagagtaccacctcagcggctacaatattttctctctatatataacatggcaaccacaccatactaaaaaaccctaattacaaatggtggttccacaatgggctaaacgggcctaacaagccttagtaaatctcccattaaaaaaccatgcaatattatttgggtcgggtcgccaaaccggattaaacaaaactaggctccacaaagcccaataaatctcccacttggagactagttcaatcaccaactttaaaccgctattatccaagaaacaatccctcatccctgcaactcatcctcctgtcctcaagctagaagaccaattgaagctgcgcacaacttcaacttctcaatagtgacacccttagtcagcatgtctgccgggttcttagatccacaaatcttctcaagtattaccagtttatcttcaacaaggtaacggataaagtggtattttggttgtatatgctttgactttgaatgaaaagccgaatttttggcaagaaaaattgcactctgattgttactgtgtagaatgcccatctcctgcttcttacccaattcatctaagaaaccatgtagccaaatcatttcctttctagcttcagttgctgtaacatactcagcttctgtagtagacaaagtaacaatcttctgtagatttgaagcccatgatatagctgtaccacttagagtaaaaacaaacccagtagtactctttctaccatcaatatcaccagcaaaatcagcatctacataaccctgtagtttcaaacttgcacctgtgaaacaaagacatatatctaatgaacccttcagatatcttagaatccacttgactgcctcccaatgctgctttccaggcctactcatgaatctgctcacaactctcactgcatgtgcaatgtctggccttgtacacaccatagcatacatcaagctgccaatagctgaggcatagggcaccttgctcatatggtccctttcttcttctgtcttcggtgactgttctttgcttagtttgaaatgactccctaagggtgtgctcactggtttagtttcattcatgttgaacctgctaagaactttcttcacatactttgactgtgaaagcttcaatgtaccattagctttgtctctaatgattctcataccaaggatttgctttgcaactcccaaatccttcattgcaaactgtttggacaattgcttcttcagattattaatctccgcaatgtcagaccctacaataagcatatcatccacatacaacagtaatatgatgtaagaattgtcaaaagacttaacatagcaacagtgatcagcttcacatctcttgaatccaattctatgcataaaactgtcaaacttcttgtaccactgtctaggagtttgtttaaggccatacaagttttttctcagtttgcagactagattctcttgttcctgagcaatgaacccttctggctgaatcatgtaaaggtcttcctccaagtcatcatgaagaaatgctgtctttacatctaactgctcaagatgtaagttttctgcaactaccattcccagtacaagtttgattgttgacattttcacaactggagaaaatatctctgtatagtcaatgccctccttctgttggaaccctttaacaactaatctggccttataacgtttgctaccatcatgctcattctttattctgtatacccacttgttgtgcaaagccttctttcctactggcaattcaatcagtgcccatgtctgattccctaacaaggaattcaacttatccttcatggctaactcccacttgcttgaattctcatcttgcaaggcttcatcataacactctagctcaccaccatcagtcaacaggagataatttaaaacaggtgagtaacgttgcggaggtctaatgttcctggaagatctgcgaactttagctacaggtgtactcaaatctacttgtgaatttacattctccttatcttcttcactccatttttggacagtattttcagtcaattcatctaagttgacaaactcagatttcttttgatctatctctgtaacgtctgacactacagttgacctgtccttgtacataacctgttcattaaatatcacatttctacttctgatgattttcctgttttgttcatcccaaaacctatagccaaatttctcatcaccatatccaatgaaaaaacatatttttgactttgcatcaagtttactacgagcatcagaatcaatatgaacataagaaacacaacaaaaaacttttaaatgtgaaaacttcacttctttaccgctccaaacctccttaggaagtctgaactccatgggaactgatggtcctcagtttatcaggtaagctgcagtgctaacagcatcaacccaaaaagtttatggtagtccagcatgcaacctcatacttctagcacgctcattgagagttctgttcatgtgctcagccacaccgttctgctgtggtgtcccaggaatggtcttctccatcctaatttcctgtgcggcacaatactcactgaactctccatctatgtactctcctccatcatttgacctcaaaaattttactttcaaacctgtttctgtctcaaccatgaccttccacttcttaaaagtttcaaatacatcagatttatttttcagaaaataaacccatacctttctgcttgagtcatcaataaaagtgatgtagtaccttgaaccaccaagggatgcaactggagaaggcccccacaaatcagtgtgtactagttccaatttttcagccttcggtgtcctgccagttttcaagaagctcacatttttttgctttcctaaaatgcaactttcacacatgtcaaaatcaatggacttcaattctggtagttttccttttgacaacaacatcttcatccctttctcactcatgtgaccaagtctacggtgccataggcttgtatcagtacttgcatcagcaactgcaattgtgtctcttggacatgaggtcatatacagagtaccggtcttctttccacgagccaataccctagctccctttgtaaccttccaagtaccaccaacaaatagtattgcatgtccttcatcatcaagttgtccaacagaaatcagatttctcctcaggtcaggaatatgttgaaccttctccagtaaccaaatagacccattaggcaacgatatccggacgtctcccagacccacaacatccaaggctgaaacatcagccaaatacaccttaccaaaatcacttgcagcataattctgtatgatttctcggtgtggagtggtatgaaacgaagctcctgaatccaaaaacccaatcatcaagtggactgtctactgcaagaagtaatgcatcctgtacctcttctgttacaacattagcagaatcatcttcattctttttcttagggcttttgcattgccttttaaagtgacctgtttttccacagttccagcattgtacttgttggcttgatctagatttgcttctgttccgattaaaatttttggattttgatctaccctggtttgaatttctgtcattacctctgcctcttgtctcaaggtttagggcagaaccagatcttgaggtttcgcctgcatctcttcggcgaatttcctcagccagaattaaatctcgtatatcattgtacttgagcttttcctttcccgtagaattgcttactgccatcctcattgcctcccaactatttggcaaagaagccaagacgatcagagcacgaatctcatcatcaaaatcaatttctacagacgacaattgatttgtgattgtattaaattcattcagatgttgtgctactgatgcattctttgccatcttcaaattgaacaatttcttcatcagatgcaccttattgtttgcggacgactttacatacataccggacaaagccttcatcagatctgctgtggtcttctcctttacaacattgtgtgcaacagacctagacagagttaacctaataacttctagaacctgtctgtcaagaagtgctcattcctcagccttcatactctcaggttttgtccccaaaagaggcagatgcaatttcctcccatagagataatcttcaatctgtatcctccaatacacaaaatctgtgccatcaaacttttctattccagacgcctttcctgcttcctctgccattgctcccactcaaacctaaccctaggctctgataccagttgtagggaattaaaccgaattcccaacttgtgagaaacaaaaatagagaaaaacacacgccaaagaaaaacaatcacacgcacaagacagtatttacgtggttcggcaatatgcctacgttcacggagttacagggatatcactattatcagggaagaatacagggtaccacctcagcggctacaatattttctctctatatataacatgacaaccacaccatactaaaaaaccctaattacaaaaggtggtttcacaatgggctaaatgagcccaacaagccttagtaaatctcccattaaaaagctatgcaatattattcgggtcgggtcgccaaaccggatcaaacaaaactaggctccacaaagcccaacattaaacttactagtgatctaggaagcaacaatggctttatcaaatgtttattttgatactggacgattagagaatatggtttgagatttatcggatgctatcaaactgtattttaataagagctcaaactcattggaagagatcatgcaccatttcgacatgtggatttgcatttgaaaatgaagatataccaattttggtatcaagatatatcaagaggcatcaaatttgcaatttcgacattgaaagctaaagcaaaaagaagtttcttaattggattggtattgaattgtaattatggtatcaaaatgttatgagacttgtaataaatgttgttagaactgttgttttcagttacttagattctcttaggattagtgtggagaaaattatatttctcattcatatcttgaaagtatactaccctaaaattatatacaacaacaaaaaagaagaaatgaaaagaattggaaactatcttattagagatccctagaaattagggattatatacactaataaatattatagttgtaatatacaactgtgtatatagttgtaataatcttcacatacaactatgtatatggctgtaacaaattgtaataatcttcaacattccccctcaagttggtgaatatttattatccattcccaatttgataatgatttcttagaactgggcattgactaatcctttcattaagacgtcgactaattgacttccaatggacacatggtgtccaaattaagccaccatccaacttttccttaataaaatgtttgtctacttccacatgtttggttctatcatgttgtactgggttatgtgcaatgttgatgtgtgtctacttccatatgtttgagtataatctttgccccaacaagcctaactttgtaactctcaagagaaccacccgctttgtactttactatgaacacccacttgcatcctactagactcttctcttttggtaactcaaccacatccaaagtcccattcttttcaagtgcttccaacttggctcacagcttgtttccactccttaatatttagtgactcggacaaggtcttaggtatagatatggtgtttaggttggtgagaaaatttctatgagatgacgacaatctttcataggacacaaaaagggaaagtggatataaagggtgttgagtacatgttcttgtgccttttctaattgcaatgggcaaatttagatcactaggatcaacaaaattgggagaaatcttaggaaaagatggatcatttacctcataggaagtggtgggttttaactcttggacttgcataggttcagtgatggttgctttcttctttgagtaaaccacaacgccttatagaactaggaacttgtttgcttgaaggtggacttgttggtttaggaatttgtgagtgcttaaacacaggctcagacatggatgattgtgattgtgagggtttaaacatagatggaggcaagtcaaggaagaacaaatctcctaaatccgtatcttccatgaatgatatctccccctaaagataaggatgattgaagtagctttcgtgttcaataaaggatatatcagaagagacataaaattgtcgagtgggtggatgataacatttgtaaccctttttagtagatgaatgccccattaaaatgcacttaatttctcttggatttagtttccctctgttatgagtgtggacatggacaaaagaaatacaaccaaaaacctttggaacaagactggtagatgttgtaaagtttgggaagtattttgcaaaaatttctattggaattttgaaccccaaaactctagatagcaaccgatttatacaacgagcaatagtaagtattgcttccccccaatatgatttaggaacatttttttggaacaaaaaagctcttgttacagtaagaagatgaccattttttcttttagcaaccccattttgttggggagtactagcgtaagaggattcatggataataccttctttttgaaaataaggagataagacttaattgaagtaatcctttacattattaaatctaaacttcttgattcccactccaaattgagttttgaccattttgtggaaattgggaaatacaatactcacatccaatttttgtttgagaagaaagatccaagttactcgagtgcaatcatctgtgaatgagaaaccatttagagcctgaagtattaggaattgtggcaggactccgaatatcactatgaactaacacaaaaggaattgaaactctttggttacttattgggagagaagcatgctgatgctttgcaagttcacaaacatcacaatgtgatttttctacatcaattcctttaaacaataaaggaagcataattttaataacgttaaacaacggatgtccaagctgattatgatgaaaccaaatcttatcatttattgtagatgagatttcaaaaaggaatgataaggatacctggttctttgtcctattttgaccaaatagtaactcaagatagtaaaaaccatccttttctctagcatgtccaatcgtctttcctagatggatagaaaatcatatgacaattttgttctttggtaagttgatgaatggaaacaagattggtggaaaacttaggtacatgtagcatattctttaaaaccatggatttattcaagtgaacttccccttaactagccacagtagctagagagccatcactagtggcttttttattactaggacatgagctataggtaaggatgaaaatatcggtaaacatggatatattagtatttggattttacggatatgtcggaaatatcggtaaaacatcggtggatattttgacaaaaatattgatggggtggaaattgttcaaaattcaggtaaatgcttggaaaaacttcaaaaaatgataaaataagtaataatacacattaaagttattttgtaagtgtaattgacataagtatggttaaagatgatatttatcaaattttttaagaaaaattatctgaaattcctttgataaatttgtattcctttattttaaaaattaaaaactacttttattaaaacatgttttattacattttaaataaaaaattaaatcgatttatataaaatattttatttctaaaatttaattatacatttgtggtgacaactttttgctattaacattaatttatttaaataattaaaattattaaaaattaaattaataatttatcttatcaaattaattttagtttataaaatattagaacttcattaattttttttaatatttttttagcaatttttgaataaatttatattttttaatattttaaagtaaaaacatttaaaattaaatgaaattaaaatgatgaaatatatataaaaaaaaaaagaatttaaaagtcaagtgataatatttaaaaaaaatataattaataagataaatatgaaaaataattaaaaataaaaggataatataaaataaaagggtaatataaatttaaaataaaagataaattaaaaaaaactcagaagacgatttttaaaaaacatggataaatatttttttttaaaaaaatagctttttttaattgccaataaaatgatgatattttcaaaaaaaattatcgctaattttttcaccttgccaacgtgtgttttctaatactgataaattagcaatttatcggtacaaatttgatatttcagtgatttttccgatttttcaccaaattttttcttcaatcgatttttggttgccaattttgtttcaacctctcctgatatccgatattttggcaaaatgtccctacatttttgtccatggctataggtactaaacttttgtgaggaatgagtcatatgatctatagcatccgagttgatgacccaagagcctaggaaagacatatttgagacactaagattcttcaagggggaatacttatccggctgagtgagagagcaagcaccactaggactctcaagggttcctaggagattcttcaatttcttaatctcttccttcttaagctcagtatgtttattgccaccggattttaccttctcttgtaaagggttttcattgatatgagagttggtgaaatatgcccgagttctttgttgttcacctttgaaacctcgtttccagcaccagttccttgtgtgtctcgacttcttgtagtaggtacaccaaatagtgttcttgttaattattctggacaaattttcccattgatggaggattcatgttgttggagttgtcaataattttagagaaaaatataacgaagtgcctttgaaatggcaattaaggccattaaactagggttaaaaaaaagaggaaaaatggtgctacaactcaacaatgaaggctaaaaagaaaaatcccaaggaacctaatttagctctgataccatattgaacaaccaattttcctaaaaacttaagcttgtaagatttgggcccataatgactctaacaccctccctcacttgtagtctctatttttgggcttacacgcgggtttaagaaattgggtaaataaatatgtgatggtgaggttcgaatacaggacttcccaccaaacaagtcgttgataccatgtggtgaaaaattgtatttctcatttatatcttagaagtatacaacactacaattatatacaacagaaaaaaaaaaaaaagaattaagggaagaattggaaactgccctattaaagatccctacaaattagggattgtatacacatatatactcaaatatattacagctgtaatatacagctgtggaagatattcagctgtaatatacagctgtggaagatacacagctgtaataatcttcacatacagttgtgtatacggctgtaacaagctgtaataatcttcaacaattagtttagatgatgtggcaagttattattgggtgaaagtgagttgtcattgcctataaatagtttgttagtttaattttggatattattagtccatgtatagatttgttaggtgtagagagtagttttatagtttttctccagaaatattttctatgaaattttcttggcttccaaacatggtttttgcatttgaaagaatgtggaatggaaggctaaaactctgtcaatatatggggagtacattatttatacaaaagttttgcttctttagggtatgagaatacattatttatatcagtgggagatggcaactgaactgaaattgttaccaatctagacttttttcctgcaatgcaaaagacatctaactcctaaaatactaagatattaaggattcaactagctcctgataatattaaaatattttcttaaattactgctgcactttcccaaattgattattccaaaattctgtaatatggaaaatctttctaaagtcttaaacgttctaaattaggatatactgccttgttatgaatggcataccttgtggccgcaagtgggggccaccataagagtttttttggacccaatattatgaaccaggtagcagcagaagcccttattttgtggaaacttgtaatatcttctctaagatagactaattgaacaacctgtaggtggttaaatttgaggcataaaattctttgatactatcttcttatctgacaccatgctgttaagaagaggcaatagtttcagacaaaaggaatgaaccacacccgtcagcatcccccaaatgaaggcgaaatatccatacacctttgaggtgggtttctaaatttactagccataagtgccttaacttatctccttatctccttatcaatccaaccggatgatagatctccttaagtggctttccccataatgccgaggcacccattagagaaagcaacttctatcttaacgttctagttgaccatgcaaccatcgttccaaaatttggtattgaaccattatatacttgttaacgtttgtaggcattgttgggttggaaaattagaaataaactaatatatgaagtcatttttactaattagatgtttttttttttgtataactataaaaagtaattgatttttgtaggaaaagtaatttacataggttattgaccatggaaactccaatttagcatatgtttttctggtcttaactcttcgccttcttcttggagcaagcaggattttaaaaattccttttaagttgagttctgttgagctgagtttcacataatgaattatctagtgtcttattttataccatctgatatcaaataggaatatgccagtaactttgaattttaattcctcaggtatcataattaagtcttggatttgcttctacgacatgttagtgtttattaaggctgaagcaatgccttgatgtgaattaccaattggggctagaaatgtgtggtttttctgtgtacctcttctgttgctaattcttcttcacttagacatatttattaggtgatattgttaattcgggtctggtgttatattttcatgttttctgatatttcatttcccaggcatgcttaacaagatctttttccttgtgaaatattttgataacccaaaacttgttttttgtatatgtagtgaagaatcaggagctctttctaaatc

SEQ ID NO: 13612 - DNA, 12136 bp, Vitis vinifera
  Intron number 2 from transcript GSVIVT01013268001 (locus G SVIVG01013268001) derived from phytozome v7.0 (chr-ID chr2 ; pos 5977194 to 5989329 reverse strand)
ttaaggcaggatttcttggatcagtgaagcttaaggtttgtggggctctgactggtctaatttatgataaaattaacatggatgcttatttaggaatattgtttgtcaaaaatctttgagataactatgactgacttgggtatatgatttgatgccttgcctaattctgaacctgtagttctaaacagtaaacgagatcaactttgaccatcatattgatgtttaatattaaaagatactcatgtagacattagcaatattgaaatattgagaaaaatttaggagatattaaaaaaaattaatgaaaggaataggtgatcagaaaaaatggtaagcaattatttatagtgaaaaaattacaaagtaacaagtatttgatgcacaagaggtgtcaaaatatgcacggatggaattttttttttgcacttaggaagcgatgggagagagagagagagagagcgaaagagagagagagggcgagagggagtgtgggagcgcgtgtgacggcgacgacgaggagaccggcgaggcgagccgaaggcgaagcttcacggtggaatccaagaccttcgagcttgccctggatgataggaaagggaaacgccagtttcgcattgtggagaagaaacgaggggtcttgacatgggttcgattagggctggaaagcttagggctcttcaaggagggattaatccattgtattcgagacgataaagaagggcgatgggaaaaggaatggaaagaaggaggtaagctgtataccttggctcggggtttcaacagagcgggtgtttttctaaggttaggggttgtggatctggaacgaaagaggttttgcatcttcttaccgagagggaggagggacaaaagaggatggacggctatggcggagatggtacgtcaaatggaagagttagccggtagaagaacagaggtgcaggaggtaaggactgtcggaagagctactccggcgaaatcatgcgcagaagcagtcagaaggaccaatcgggaaggcttaaacgcaattaagatgaaggtcaccagggaggagattgctggcaacttacagaagctggagcactgcctcgtcgcgagctagaaatccgacaaagaggaggaagacgacttggagaggttgggtagtctctgggcgaactcttggggtctaaaaggcaagctagggttggccaagttggaacgaggtaaggctttgttggagtttgaagatcttagtgaggcacactgtgtggtctcctcggggagcagactgatgggaggagcccatttagggctggagctatggaatccaaagacgggatgtcgggtagaggaggagatggagcagatagcttgggttaaaatattcggccttccaatttcgctctggagcccggagattctgaagaaaataggggaggaatgtgggggcttcgtagatatggatgagcgcacaaggtcgatgggggagattcaatgggctaggattttggttaaaccaaaaggtgatttcagaccgagcttgctagaaattgaggtagaggatgagatatacgctgtggctttatggtgggagatcaggccggtggtgagatggctcttctctgcgacggaaaacagaaggaagaaggaagttaggggtgatacgcattcacgcgcggagaagcgcgtgggaaaggagttggtaggtgcgggaaacgaggaactgcagatgccagttgatgggagagctttgcaggagaatgggccgggtcctgcacccgggatacagatccatggccaggagactcgggattgggtttctccaattggtagaatggctgggtcggccgcaagtggcccaaatatgggccttaatgggttggagaaggatggtgggccgaacaaaatggacgggcttttgggccgaaagttaaaaaataagcctaaagtgaatggttattcagaggcaggcccaagttgggctgctgaaatggactgctctcaattaactgaggtggaaggtccggaaagggaggacccaactgctccactagagaaggctggccttctgggccgctttagctccagaaaaggacccacttcagaggatcctttgatgagctgggtgctagaggagtctagaagggaacaaagggatgttggtctctcaatgactgaccgagcgatggaagaggaagttaaaaggtatgccttaatttcccatcctaaaggtaaacgggctgtgggaacacctcttcttctcttctctaattctgatcgggctccggagggggagtctttcgatcgcccagggggtatggaggaggaattaaggggggatatgtcaacttggttaacagtatatgaggggaacgttgaaaacgaaaatggatcctggaagctgggagaggacaacaagaacagagacaaggctaggggcaaggaggagaacaatggtggctctgtttttcaagatactgaaaatgagaaagaggatctatgggaggaatgcagtctagcaaaatttagccagttcctgggattctctacagagggactggaaaaggagattttgagtttcttgattaaaatcagaaagaggcgggaaaagattcacagcaaagaacttttggaaaagtccaagtttgaaagggagctgaggaggctggaatgctccgtcaattacgagggggggaataagcagaaaggtccttcacagggcaaagggaaccagttgatagttgcccaatgaagatgaagattattacctggaatgtgaggggagttaatgacagctcaaagaggaaaattattaagaactatataaggaaccagagggtggacctaatgtgttttcaggaaaccaagattcaggagatgtcggagggtattgtgagaagtttgggatcggggagattcttagattggagagccctaaatgcggaaggggctgcgggtggcattttgatatgctgggataagcgggtcctggagattctggattgggaggagggtcagttttccttgtcttgtagattcaagaccacagaaaatggggttacttgggtttttacgggtgtgtatggcccttttaccaaagtggaaagggagggtatgtgggaagaacttggggcaataagaggcctttgggatgatccctggtgtctcggtggggattttaatatcactctgtttcaacacgaaaggagcagccaaagaagaatcagctcagccatgcggagatttgcacagactgtggatgatctagagctggtggatctgccccttcaggggggagagttcacatggagtggggggctgaataatcaggcgtgggcgagactagatagattcttagtctcccctagctggttagatcagtttagtggagtcactcagggcaggttatctcgaccaacttctgatcattttccaatcgtgttagaggggggtggagtaagaagaggcccaaccccgtttaggttcgaaaatatgtggcttaaggttgagggatttaatgacattattagaacctggtggcaaggaattgaagtcaggggcagcgctagttatagattggccgtcaaaatgaaggaaattaagaagaagctgaaagtgtggaacaaagaggtttttgggaggctggaaactaataaagcttcagccttacatcaagtagatttttgggatcgggtggaaagtgagaggattttgtctatggaggaagctgaattaaaaaaggaagctaaagattcctttaagaaatgggtcctgttggaggaagcccattggagacagcattcaagggagatttggctaaaggacggagatagaaatacggggtttttccatagaatggctagtgcacatcgaagaaacaacactatggacagaattaagattaatggggagtggctagtagaggagcaggaggtgagagaaggtgttgtgaattcgtttcagcaattgctttctgaagatatgggttggcaggcggatattggtagcattcaggtgggttgcatcagccagcaagaagcagagagtctagaaaccccatttgcagagattgagattcactcggccttgatggagatgaatggggataaagcccctggctcggatggttttactgttgccttttggcaaaacgcatgggattttgccaaagaggagatcatggagatgtttaaagaatttcatgagcataattcctttgttaagagccttaacaacaccttcttggtgttgattcctaagaaaagcggggcggagaatcttggagactttagacctatcagcctggtgggggggctctataaacttttggctaaagtcttagctaataggctcaaaaaagtgattggtaaggtggtgtctattgctcagaatgcctttgtaatgggaagacaaattttggatgcgtctttaattgctaatgaggtgatagactcgtggcagaagaggaaagaaaagggtcttatttgcaaattggatatagaaaaagcttatgatagcatcaattggaatttcttaatgaaggtccttcaaaaaatgggctttgggaccaagtggatgggatggatgtggagttgcgtctcctctgctaaattttctattcttgttaatggagtgccagctgggttcttccctagcactagagggcttcgtcaaggggaccccctttccccttacctctttgttatgggcatggaggttctggacgtccttatcaggagagcggtggaggggggttatctttcagggtgcaatattcggggcgatagtagatcatccttgaatatctcccacctattttttgctgatgacataattgtgttttgtgaggcgagcaaagagcaagtttctcacctaagctggattctcttttggtttgaagcggcttcgggtcttcggattaatctagccaaaagcgagatcatcccagttggagaagtggaggatactcttgagttggcagctgagttagggtgcagggtggggtctttgccctctcattatttgggccttcctttaggggtacccaatagggctacttctatgtgggatggagtggaagagaggattaggaggagacttgcgctttggaagagacagtacatatccaaaggggggaggatcactctcataaaaagcaccttggctagtttgccaacttaccaaatgtctattttccggatgcccaagtctgttgctaaaagagtggaaaaaacccaaagagatttcctttgggggggaggaaacttggaaggaaaagttcatctagtcaaatgggatgcggtctgtacagaaaaacacaagggagggctaggattaaggagaatagccactctgaatagagccttgctgggcaagtggatttggaggtttgcttgtgaaaagaataacttttggaaacaagtgatcactacaaaatatgggcaagaggactatggttggaggccaaagaaggcccgtggggcggctggagtaggggtctggaaggagatcatgaaggaatctgattggtgctgggaaaatttggcatttaaggttgggaagggttccaaaattaaattttggaaagatagttggtgcactgacactccgttgtcccaatgcttcaatcaactctttgtccttgccgtgcatagggatgctacgattgaggagatgtgggatcatgattcgggccaaggagattggaagcttgtttttgtgagggacttcaatgattgggagatggatatggttggggagctgcttcatactttgaggggtcaaaggccctccctggaggatgactcagttgtgtggaggcagggaagaaatggtattttcaaaatcaaagaagcttacaggctgctagacaagcctaatgccacagtatttcccgcaaggagaatataggtggatagggtgccaactaaagtctgtttttttgcttgggaggctacgtgggggaaggtgcttactctggatagactccagttaagaggggtgcaactccctaattgctgctatttgtgtggttgtgaagaagagaatgtaaatcatattcttttacactgtatagtgactagagccctatgggaaattatttttgggttgatagatgttaagtgggtcctcccagaaactgtaaaggagactttaatatcctggaggggctcatttgtagggaagaaaaggaaaaagatttggaaatccattccgttatgtattttttggacggtttggaaggagaggaataggttagcctttagggggggtgagttgaatattcagaaattaaagaattcttttgtctgtaacttgtggaattgggccaaagtgtatttaggtgaggaatctttctccctcataggttttttggagtggatagcttccacttaaggggaggtagcttctttttggtcctttttcttttttgaggctttagccgttttgtatactccctgtatgctttgtggcgcttagccttttctaatgaatatcttgtttacttatcaaaaaaaaaaaatgcacggatggatgatgatgttctcaaattttgtatcctaatgaatcttttgttgtttgctaggcattcttacctgaaggaagttcatgtcaaagtttgctatatctgtttgtatttttactcatcaacatttgatactggtgtagatctaaagttttttcactctctcataagaggctaaatcaatggagcattgaagggttggattggtcccttatctctacggggagactagttggttggagtgtcctttccttgaagaaattagaaaaacaacatttcaaatggacaaggaggaagcaccaagttcaaccgacatttatagattttccttttttttaaaatttttttaaactaatggaagagttaggttgttaatcaaagaaatgatgctacctctatagttatagtgcccaaaaagggtgtaccgactttcttttagattttaggcccttgatattgagtggtctacttgagactatttctgaatttttgtaaagagatagatcttgaatgcgttgctagttgatgttttggtggatgagcaatgtcatttgatgaaaaggagcttgttgttttatcatcaattttggagaatcatatgattatgttggattagggatttttggaccatgtttagaaaagacgttctttttagatgatgttttggatttgggttgcatattgttgaattaccaagtttcctaaaagcttaggtttctaggatttgagttcaatatgcatatcatgctccttaacaccctttctcgtgtgcggccctatatctgcatgttgagagacgaacaaaatttggattcatatccaataaaacaaattggggaaatgcaaattgcggagacgcggcttgaacttgagacctcccatcaaaccacactctaataccgtgttgaattaccaagtttcctaaaagcttaaacttccaagatttgggttcaatatgaatatcatgctccttaacacctatcttcaataagttttgttgtgctaaagggtagctcaaggtgcctaaagggattggacaaggtgatccacttttctctttcctttcaatcttcaagattccaatggatgagtattggttaggtggttttaagtgtaaggaagatagctttaggaataaagccttggttttaggtggttttaagtacaaataattttgagtacctctgaaccacattataatggatgagatgccaatattgttgttagatggtcccattgatgtctttggaagccaattattttttaaggactatggaccacaatttaatcatttccttttaagggtttttggagaacctactagaagctgggttctttagagtattgatagcatcaccctaatttatatggtggaacaaaaacatgaggatctttgaggccatatggaggatgtcaaatgcagtttgggactttttcctctttttagaattttgctagtgtagctttcaaaagcactcctttgagccctctataatatatataatttttttttcggataggcaaaaaatatcagtgatatttacaaagccttgcaaaaggatgtacaaaagcatacaaggcgccaaaagccaaatacaactaagagatacattgaaagggcctttcgtggtccacctcactatattagctccctatcctcccttggggtcaattttttattagccttctgcttcgcaaatgttgacttcttgatagggcctctatcaacccattggattgcccccgcacaagtgacctcatatgcaacatcatatttcatgttgtcttcgatgacatcccctccctctaacacatatacccactttgatgctcaccactagaagctccaacctgtgccataactgttacagtccctgtcactccatggggtgacatgcaatcttcccttttttgtttctgcaggtccgttaacatcactctcacctcagtggatgaggctcccttcaagtttgccctaacctccacctcgctcagctccacatgtgaaaaccatggtaggatttcccaccactattgaatggagtaacaaagcttccccaacccaacttgcaaactccttgacaccttccttctgtgtattttaatcagtacactcacctgcagcaaattccaactaaatgcagcgtctatgtcgatcgccacaaaacccctgcatgcatcatccaggttttttagaaaaaccttgtcccataggaaaattggaaggccgacaatcttcacccaatcttcatctacattaactccttccctagagcaaccaacctctgggactcatttatctaaattcagcctcttcctcttgaacactctcatccctttttgtaggaccttttcagcttcagaacttaaattcaaatgatatgagataatcacccatcaaggctagatggaggttccgtttcagcctccaattatatcttgcccaatgacttaggcctgcattttgttgaaagagtctaaatgtccaaactgaagcaacacaacatctcccactcccttctaatattttttcaccacattcacaaaaggtactccctctctatgacccttggcttcacaaccttggatgagagatctattggctttggattcctcagctgatcctagaggggttagtgctccaaggctgtctagctttctggccagcactgcccacccccctacactccttttccttctagaaacactagtgagaatctctttgcctccactgagcaaagagcacagaaggaatctcccagcacagttgcttcagagcaccaggttgtagcttctccctctatccaaacctttctgaaacttttcaggtttactttatgaattcagttctccatcccttccaaaagcaaagacaatccctttgctccaaaatttaatccattctgataagtgtatacccctctgtaatcttactaaacgactacatctggctagattgtttgatatctcaaaagacttcgactctacagcaaaccagatcctgcatcctttcagctttatgtcaaatcatttttatctagttatttattttacaatacaatccattcctttgagccttccattttaagattagaacattgtatgtaggtttaggagatcagttgagaagacctttccaatatggttagtgcctcgtgagggctatgtcaaattatgatgaatgttctttaggtaacctaggacaactagggagtggagtgcttagaggtcattggggaatagtgctaaaagcatgtcctaaatctgtaggaaaatgttacactactaaggttgagattctaggttttctaaggggccttgtgcaagcaaagttttaggtcttttaaatcttctagtggaaagaaattctgttgttatttcttgaataactaagaaggaaagaagaggctcatggaggtttgatgggtttctttcatcaagttcttagtattgctatagagttggggtagtctttttttttttgggttcctcctctcttagttaatcaagtggaagattttttattgaaaagaggagcaagttttagtgtcctttagtatgggatatttttgccttcttgaatagtaattaggaaatctttggtatgttcttggatctttttgtttcttcctggagtgtgcagcttgtgttacttatgaagcttttcatcctcttcttcttctttttttttctcagatattctatgctatagaataacttcttgtccttttatttaataggaataaaccagttttgtttctgatttaaaaataaataaaaaatcacttgtctgtctctatctattcaatactccttaagttcaatatcttggtacaaatattgagaacactatgagatttattatcatgatcaagtcacaatgtgtgacctgtgttatcttggtggcgttcaatttcatgcaagtggttttcaaatatatatatatatatagcaaaaaaaatgtcgcccaagtcaactcaataaatcagtgagacgaaatactttctcttggttgcaagaatcttttttggccattcaactatacttggagcctcattcctcatgatttgagttggtccttcctctattttctaatatgtttggaagatgagaattgtctaatcagcaccaatgaaatttgagaatttaaaaaaaaaaaacaagtttcttctgatccagtgttggcttacaggattaacttgtcttttattggttttgggtttttttccatctccattctcactcctgattttaatgatcattttacctattgtttgtttctgtctgtaaaagtacctttgcctaaaagactagaaaaaagaatgcaaatttagatgctcctggctatctgttttagaattgaagtaactgattttgctcatattggcaatctgtttttgttattagggaacttttagttactgctagtttgaattgacattaaatttatgatctaccttatgtggtaaaaagaaaggaaattactcaggaagaatctgatacactgaatcctcttgatttggcagaagaaattgaggaaaagtaaggatatcgaggcaatattagtatgactagtatctaatataggttttttttacagattgtaataatttcactatgttctaagattaaggctcagacctgactgttctgcaattttttaagtttgactttgcaaccaaaatactgatatatttataatcgttgttatttatgtggtagtgatgaggaaaatgtaaatcatcttcttattcattgtacagtggctagagttttgtgggagattgtccttggtttgtttggtgcccagtgggtctttccagaatctgtaaaggaggtggtttttagctggaagggttcttttgtgggtaaaaagagggagaaaatttggagatccattccgttatttattgtttggaaggagaggaatagattagcattcgggggggttcagaaaattaagaattcttttgtttgtaatgtgtgggggtgggcaaaattatatagtggtgtggagtctcgctcccttataggtttcttggagtggttagcctccagttaagggtcggtgggttttttttttgttccttttgtctgttgttgagaggccctcgtcgcctcgtatactccctgtatgctttatggcgttttgccttttgctaatatatgtgtttacttatcgaaaaaaaatatttataatagaagtttactgctatgaatgtgaaactttgaagtgaactgcttgtttgtatcttccacttgaatctttacatctactacatccgtttttctgactatatttcatagcctacaaaacttaaaaagttagggggaaactgcatgtactgcttattaccagcataaattagcattgaaaccaaaatactgatatatttataatagaagtttactgctatgaatgggattgtgaaactttgaagtgaactgcttgtttgtgtcttccacatgaatctttacatcatctacatcggtttttctgactatatttcatagctgacaaaacttaaaaagttactgcttattaccaacataagttagcatgttttaaagatgcttttattttttattttgtttatttattttataaaataattttcaagctcaggttcc

SEQ ID NO: 13613 - DNA, 4424 bp, Vitis vinifera
  Intron number 2 from transcript GSVIVT01007575001 (locus G SVIVG01007575001) derived from phytozome v7.0 (chr-ID chr1 7; pos 11784118 to 11788541)
ctcacactccgggaagtttgttagggttaagaagggtaagtaggctcaggaccttcctatttgttctaatttaattgcttgattatgtagttttgtggagatttagtagcccttggtaatttgtgcatcctaggcttgtttctcgtggagagcagtggtagctactttgattctttctattacttttggtgctcttagttgttgaatatttccattttctgcattacgattttctaacttctaattcaaaaatctttttaccatcttatgctattaagcctgtgagatttgatatgagctctgtaagttaagttggacagtaatttatgatttcaacatatagtatagcagaagtatttgaggatagtatcaactttgtaggctgtttggaagttcaattattcctttttggatgcttacatggcattcaagaaccttgtatctgcattgtagaaataagacaactgatatgtggctaaattggcttgtgttttatgtgcctatggtttgggaagctgcatttaattatacgtaatggatatttcgtttatcgttatcgttacggacaattactttaatttttgtttgtatacaaagagatctcactccctatgaagcatccaagtatgtcacttagtcggcggacatgtcatgtttaagtgcatgaatcctaatgatcatcacttcctatcctagcactaaaacctatgcaatctgaatgtgatagcaggatcaattgactgatactgactccatttttttgttttatcaataaatctctggaaattttgttctagaggattggcggactgaatttttttcccctttccttttaccttgtcaaaacttatcttccatatatcattttattgttgcccttgaggtttggctcaagtggtaaagggatgggaatggggatggtttgtgggaggttccaggttcaggtaccaatggtgacaaaaatttacctattaaaaaaaaaatctcatatcattttattcttttgtatgtaatctttggtcttgggttagggtgtctatagttttgagctcttcttttcttgtaagtttcttagattggttaggctctaagtaagggaaggtggtgtgtttctatcctttccccctcggatcgcatctttgggttgtttttgtattctctctgtatactttgagggcactgtttttggtgcttcctcttctcgtttaatatacatccttttatctatcaaaaaaaaaaaataaaaaaataaaaaatatgtgaaacatattcctagagtccatagttttttagagtttcttgagacatacatcaagaagaactatataacgtactattatgtcgatagtgtatcatatgctcatgtttcaaattcttaagaattaggtacttggcctcaagaccattactagacacctttaggcttgcctgatattcatggtgtgcaacttggggttgactgatattagcattatcatggcaaaattgagttttaaactccatttttggctcggtggttgacattggaaaatttcatattctttttactgaaaaagatccttcttgagctttattttgttctcaagtatataagatggtttggaaatctcttctttcgaaacctttttccaatcttttcaaggggtactgagaaatgttgaagtctgcccaaaaaataaaataaaaaattatgcattatttttctgtgatatctttccatttttgatgatatggatgcttccatcttcttttggaagtttcatctatttttctccataccaaaaattttgtttgataatcttctataggcgcttcatcttcaacatcattgtatacatgttccaccttttcatcagtatgattacttctttatttttagtttttaatagaaaataaggagattgtgatattggttgaacatatattttgtccattaatcttggtagcttgtctccagctttggatgacatgtatcttatagtcccattaaattttaaaaaaacaaaagtgaaaatgtgagttgtttctttaagcttactatgataatttagttcataagcatcatagtatgatggtgtgactctgttcaatatgtaaactcttagtttactggaagataatggattatcatgaaagttgctgttactagttcttattgaggcaaaaagttattccaaaaagttctatctgaagttcaattacattttttttctttaaaatttgtacttctttttaatagttgggaatcatcccaacaatgagacatattcgatctgccagaaaaacaaacctagatgatatgggcctgctcctttaccgtagaccactttaatatcaaaggggcttaaacttgggacctctggtttgtttccagagagcactgcccctgagctacactggggccctgaagtttaactgcacttttaaacctgttcacttcaggatgcaaaaccacttttctgaaaattgttctttgaacgtttctgagaccatttttaggtcattgaattttttccctttttctccttcatatttattgactgtaatggtttgcttggcaaggctggagtaggaggaaaggcatcattggaatggatgggaatttaatttttatatcatttgaagtctgttttagtttgaggagaaaactgttaatggatgattcctcttgcttaaattctccttaatgtggaaatgaaatgaatgccattttgttgcctttccaacttcttatttcagtcatattttgccctttggctagtttgaaggtttgtagatctctcttacgtacattcattccatggtcctatctcttatgaatgtatatttcatgatcctctcttgatatgtagatttcatgatcctttgaagtaacattttttttttaatcagactcctacatattcattaaaaagattaaatttatgatcctgaccagcttcaaattgacaatggtcgtcttattgtcttgagattaccctcataatctccatattgggttgataaactttgaatggagcttggtttgaaatttttgtctgttatcattattactaagcaatggcctaatttctccatcccactgtgagatattattagtatcaaattactaggtttatttgataaatgtttgtttcctttacagtctcctgtgattactcttataaatcctgtataataaattctctccacctttttctgtgttatgttccacgtgtgtagtgtgcatgcctttctaataataagtgattaattcttgcataactggtttattatgcaccatggaatgcatttaacaatataggttccttaatttcctaatactaatgtggtcagcatctgtgacgtgatttaaaattaccattttggttggttgctttccaaaaaggaaaaaaagtttctattttcaccggccaatttaagagcttcctaaatcaacaaaaagagggaaggaggaaaagcagtcagttattgttattaagaaaagttatcttcttggtggaagataattgaatgaaggtgggtttctttgtttgggaagttgcttgggataggattttgatgattgatcagcacaaaaggagggaatgggttatgctgaacaggtgtttcatgtgcaaaatggattagaatcggttgatcacatcctccttcattgccctaaggtaagcattttgtggcagctaattttttgctgtttggagtggtttgggtgctgcatgctacagtgaggaatcattctcagttggcatggacctttcgtaggaaagaaacggaaaaagggttggatggtaggccctttgtgtgtgttttgaattttttggtgagagagaaatatgagatcttttgaagatgtggaacggttggaccaaacaatcaaatctgcttttatgagtacttaaatggaataggtgattgatcttaaaccatgataagctttgttgattggcttggctccaagggagaacattcttttttctggttttctttcttcctttgtcctcctattggtgtctattgtatgcatctgtgtaccttggtgggccctctttttagttgttgatcatatactttctctttgcctgttagggaaaaaaccaaaagatagttgcacaatttggaatttggggctctaagaaacagcaaaaataaaaacgaggacatggcttgaattccaattactagtacattatcattcactgacaagaaataaatcaaactagaaacatgtggatttattttcttgtttctgttctctgtgtcctccaccataccactgttggcaacatttactggctttcttatacttctcatcatgttgttttttattattaatatctgatagcagtgatgatatttgtagcaagagaattgctattctgtttgtatggcttcgctaatgtcctcttcttccttggtaacag

SEQ ID NO: 13614 - DNA, 16950 bp, Vitis vinifera
  Intron number 5 from transcript GSVIVT01034512001 (locus G SVIVG01034512001) derived from phytozome v7.0 (chr-ID chr1 8; pos 20121927 to 20138876)
tattccttatttctgctttactctctcgaggattggtatgcaagttaatcagaagacttatctttttaactttacaagtgatcttatttttgtcaattttggccacagcctttttaatgtgatattactcggtgtaaaaatgtatgattgttttggaagctattttctaggagaattagttgtgataaatctggttggtagacctacaaatcaggatagttatctcctattttaaattagtttcctattcagattaggataactattgtaggaaatctcagtcctataagtctgttaagtctatatatattatgtatcagctgtattcatttatttgtatcaataaaaattaagtttttccccaatttgttttcatggtattagagtcacctgtgatcctaggcatatatcattcgtttgtttgcttcttctctcttctaaaactctttatgtaatcatgttaggagttactataaaagagacatctagaaacaattgtgaatgaccttaacaattgattcaacaatctagtcatgaaattccatcatttagatcacaacccataatctgaatggacagaattatttatggtgcctgttgagctataaatagaataggagaattttttttcctattatgttagtttcctatttctgtaaatagatagttttatgagttagaaataggttagtttaggaataagttagtttcccattatgtctcttgtttcctatttcttctcttgtaatctcctatataaaccgtgtgtataatcaagctaatagagagaaacttattatttttcatcccatattttgtgtcatggtatcagagttgtaggtttttaagatctgggcatcattctagccttcatcgccatttttctggccttcatagctagatttttttttattcacgtgttcttttaccagccttcattgctgttgagttttttgtttcgcgatctgccttaattccaagagatcaggttttttcgtggaagatgttggaaaattcaggtacacctttattctctttttgcataaatgtctcacacagagtttatgatgactcttggataatagactttggtgccacagaccatatgacctccaaatctcaacttttcaatacctataccccaagcccaagtaacaagaaaattgtagtggccaatggctctttagttatcattgcaagtttcggagacatatacatcacacctacccttattcttaaaaatgtcctccatgtaccaaaattgtcggccaaccttgtttccattcaaaagcttacccatgatcttaaatgttatgctatttttttcccttcttattgtgttcttcaagaacaaggctcagggaggaggattggacttgctaaggaaatgagcagtctttaccaccttgaatcatctaagaaaactagtaataatttgttgttgtctcttctcaattcctcaaataaagataccatttggttgtatcacctacgtctaggtcatccatcttttagggttttaaaggtcatgtttcctcatttgttccaaggattagatatttcggagtttcattgcgaaacttatgaattggcaaaacatactcgtgtatcttttcctattagcaataaaagaagttttcatccttttcatttgattcatagtgacatatggggtccttcgactatacctaatgtttctggggctcgttggtttgtatccttaattgatgattgcactcgggttacatggatctttcttcttaaacaaaaatctgatgttagcattgttatacctaatttccactcgatggttcaaaaccaatttggggttaaaataaaaagttttaggacagacaatgctagagattacttcaaacagattttgtcaccttattttcaatcacagggcattctccatgactcatcatgtgttaacacaccccaacaaaatggggtagccgagatgaaaaatgggcatttactcaacacaacccgagccttactctttcaagggaaaaggccattccaaaacaaaagcaggtccaagaatccaactcagaccttgggaatgaaatcacagtaagatcagacccacctttacacacacaacctggtgaaacttccactgactcaacaaacaacctagacctagaccttcccattgctgtcagaaaaggcaccagagaatgcactaaccaatcactttatccactatcacactatgtgtctcttaagcacctctcaccagcccataagaattttattgtgagtctaaacaccactatcattcctaacactgtttctgaggcattgacaaaaagggaatggaaggatgctatgagagagaagatgagtgcattagaaaagaataaaacatgggagattgttgaacgaccaaaagggaaaaacattgttgattgcaagtggattttcacactgaaatataaggctgatagatctctagagagacataaagcaagattggtaaccaaagggtacacttaaacttatggagttgattatcatgagacttttgctccagttgcaaaaatgaatactgtaagaatcttgttgtcactggctgcccactacaattagcaactcctacagtatgatgttaagaatgcatttcttcatggtgatttagatgaagagatttacatgaacatcccaccaggatttgaggaaaacacaggtaacaaggtgtgcaagctgaagaaggccctatatgagctaaaacaatctctcagggcttggtttgggagatttgcaaaagtcatgaaagagtctgggtacaaacaaagccaaagtgaccacactctcttcatcaagcactcggctacagggggagtaactgttcttctagtctatgttgacgacatcatagtgactagaaatgatgagagaggaaagcatgaagtgaagcagagattagcaacagagtttgagataaaggaactagggaaactgaagtacttcctcggtattgaggtggcatattccacacaagggatcttcatctctcaacaaaagtatgtgactgatttattggcagaaacaggaaagattgggtgtaaaccagtctctaccccaatagatccaaaccacaagttgggaaaagctaaagaggaaccaatggtggataaaagaatgtactagaggctggttggtagactcatataccttgctcacactcggccagacatcgcctactcggtgagcgtgattagtcaattcatgcatgatccaagagaacctcatcttcaagctgcttacagggtgctacattacttgaaaggcaaccccgagaaaggaattttgttcaagaagaacaatactcttgctctagaagcatgcatcgatgctgactatgcaggttccctagtggatcgaagatcaactacagggtattgtatttttcttggaggaaatctggtaacatggagaagtaaaaagcagaatgtggtagcaaggtcatctgcagaatcagagtttagggccattgctcaagggttgtgtgaactactttggctgaagattattctagatgatttgagaatcaagtgggatggtcctatgaagttctattgtgacaacaagtcagctatcagtattgctcataaccctatataacacgataggacaaaacatattgagattgatagacattctatcaaagaaaaattggaggaaggagtagtgtgtatgtcctatgttccatcagaacatcaattagctgatattctaacaaaagggttgaacaattcaatgtttcatgatcttgtattcaagctgggaatggaagacatctattcctcagcttgagggggagtgttgagctataaatagaataggagaattttttttcctattatgttagtttcctatttctgtaaatagatagttttatgatttagaaataggttagtttaggaataagttagtttcctattatgtctcttgtttcctatttcttctcttgtaatctcctatataaaccgtgtgtataatcaatctaatagagagagaaattatttttcatcccatatttcgtgtcagtgccaatccatgaagatgattgttcgtggaaaaggtgggtttagataactcactgattcctcaaagccacccaaacggaggacaagatggcgtttcactcatgggaagcagagaatttcatggttctggcatggttggtcaactcaatggaacctaatattaaccaaacacaccttttcttatcaattgcaaaagagatgtgggatgttattgttgagacctgttcaaacatgtaaaactcaactcagatattcgagattagaactagaattcatgagaagaaataggagagccaaagcatgaccaaatattacaatattatagtatgtaaaagggtttatggcaggaactagtgcaccaatgatagttctcagtattataggatacttgaaaaaaagagtttttgagttccacacaagccttaattcagaattagatgaagctaaggggagagttattgggaagaaacctcttctttttctctgtgaagtgtttgcctatattagaagggaggagagcaggaggaatgtgaaaatgggaagacaagaagtcatccaattaaccaatcaatgaaaaactatgcttcgatttgtgtagcgcctaagaatgctttgactagtggataaagggctttcaagaagggaaaagcatcaaagtttggtgtgactattacaacaagccaacggatgccaaagagacatgttggaagcttcatggcaagcctgcaaatcttaagaacatgaagttttcttataagaataatcatactttctacgcaatataggtgatagacttctctacctttcacaaaagaacaattagagttactacacatgtttatgaacaaattcaaaaataactcaaaacccacaccctcttgttctccagcctagcaagtaactttgtgacaaccttaagtgtacattagatataagactccctgaatcattgattcaagagcaatagatcatatgaccagtcttttaaatttattctcttcatatattccatattttgatactcaaaaagtaagaattgttgatggatctttgtcctcggttgtgggaaagggttgtatccttatttttctaaaatctaatgttgaatttggttcttcatgtccctaatttctcttgcaatcttttttctgttagcaagtatgccaaagattatcattgtgttgtcatagttgtgtttggtttgaaaaacattttctacttttcattttccaaaaacaattttcattttttgtattttcttttcttgaaaatacgtttggttacaaaaagtgaaaactgttgttaaaaaattaaaattaagaaaccttgtttggtacttaaaatcttttttacatgaaaaataatgaaaatgatcaaattgcatttattgatgatgtttttttattttattttctctattggttattttaacagtataataaaaaatatgttgtactactaattttcttaaaagcttaagcttaataggatttgagtccacattatatatcacatactctaacaccctcccttacgtatggcctatattttttggcttacacgtgttattaataaattgggtaaataaacatacaatagttaggtttgagcactcgaccttccaccaaacaagactttgatattgcattgaactaccaattttcctaaaagcttaagcttgtaggatttgactccacaatgtatatcatacactctaagaaaatatagtatgttatacttaacaaaggaattgattatttgtgttcttttatctggtactaatttttttacatgaaaaataattaaataaataaattacatttgttcgttattttttttatttgctttattagttattttaattgtgtaataaaaaatataataatacatatatatataattagcaaagaaatttactaaatatgcatattttgatttattaaaatgaattactctctaatataaaaatgtaatagtattggtaaaaaaaggacaaagattataatattacaatactattacttgtatatgttttaaattattttagtcacctccatattttcactttttagaaaaccatttccactttcttcaaggaaattttgaaagcacctagctgatgttttcacttttccatgttctaaattcagttttctagaaaatggaaacagaaaataagtatccaaagatattctccaacttgttttttgttttctttgaaaatgaaaacaaaaaacaggataaacaaataaggcctaaattttttcccacccactatgaaatctaagacttggatttcaggaaggggattgacagtgctaaggaggtgaatggattgtaccactttgaagatgatgctgctctagaaggacaaggtcaactagtgaataagacttctcaatctagtgaggatgaaatcatttgaaattttccttatttacaaaaactattacctttgttattaaaaaataaaagtccttgtatcaatgtgaaatttgtgaattatcaaaacatcaaaggtctcattttcaattagagccttctgaaatatctgcaccatttgttcttgtcaagagtgatatttggagctcttcagatgtgactaacatttcgggaactagatggttcatttcttttattgatgagcatgcaggtctttgttgggtctatttacttaaagaagaatctaagactgaaagaagtttcacaaatttccattccatgtaaaagccaaattggaacacaaatttaggttctaagaatcaataatgggaaagagtatttttcaaataccttcagaattttttgtcaaaaaatgggattgtttacccaaacatcatgtgtcaatacacccaacaaaatggtactgttgagagaaaaaaccgacatttgttggaagttgcatgctcataaatgttcaccactggggtactgaaacgctattgtgggggaattagttctcacagcttcctatttgtaaaccacatgcccacatgcattctaaactttcaaatgtattgtgcataatctttggttgtgtattatgcattcacacaaatctatcctcaaactaaactcttcacatcttttctatttagtcttgggttatgtggcttttgttcatgtgcataacactttagaagtaaattaaacccatgagctgtcaaatgcgttttcctaggatattcacctactcaaaaagggtataggtgctatgatcctgtagctaaaaaactgtttgtcacattctttgaaaacaagtctttctttcctaagaagaagaaggaatggtgctcaaggagagtgagagatggttatggggtgggtgtatggtgagcaatcggaaaagaatgggacttcgtcaaaggaagaatttgcttctctattggcaaaagatagatggtgtgatgactcatctttggaagaatcttttctgttgttctcttttgccatagtcaaagatgcataggtagtggatgtatgggagcagtatgaggaaagtggttggtggaaccctcggttttcttggcaatttcatgattgggagcttaaagtagtgatagactttttctagaaacccctagcttgctcggttatgagagaggatgatgatagtttaagtgaaaggaatccaagggtggcaagttctttgttaaatccttctacctctctttagtctagggtagaagtgagttattcccctcaagctctgtttggaattcctaggttcctataaaggtggctttttttaaattggggagcatcatagaattttgacaattgagcaacttaaaaggagggggtggagcatactgaatgggtgctacatgtgtaaaaaagacaaggagttgaccaatcatttgttcctccattgccttgtagctagtattatgtggtggttaattttttctttgttttctgttgcttaggtgatgcacttagatgattgagcaacttagaaggaagggatggagtttaccaaataagtgctacatgtgtaaaaaagacaaggagtcaaccaatcatttgttcctccattgccctgtagctagtattatgtgacagttgattttttctgtgtgttctgttgtttaggggatgtattcttcagttagaggaactttgttaagctgacatggatcctttgtacgcaagaaacaaaaaaaaaaacattggagggcagttccaatgtgcctgttctagacacttcggaaggaaagaaacaaaaaggccttggaagatttggaaaaaacagaacaagcaaagaaactatcgtttatgaatacttttatggaatgagttaaattgtatgttgatattaataccatgtccatgataggctttgtagattggattagttctaagtaagaagtggggataatggagtgttttttttgttcctttcctagtcttctttttgcctattcttcaggttcatttgcatactttgagtgtacttcgttgtgcctctagtgcaagcaatatgtatatgtgtgtgtgtgtattctttcatgttgcttatacaaaaaaatgaacaagtctttctttcctcaaacttctcttcaaggggagaattctatggaagatcagtttcaggaaactcgtcctatgcctgttgcccaactctcgagtgtccaagataagctgccaccttcatcttcatcctcacctcctaattcttaggttccactaactatgattgaaagacaagctgtagatgaagtctaacatcctgagcttcatgtccattctaggcggctaataagaaaaaaaaaaaaaaaagatggaacatgctcatcctccatgagtgcaaagtcatgacttggatcctatggaaatggaagttacagttacccctctccataataaacatcaacttttgaaaaaataaataaccttgacttgcctattgctcttaaaaaaggaactaggtcatgtactcttcatcccatttcaatgtttttatcttaacacaagttgtcatcttcttatcaagcctttactacctttctagtgtagaaattcctaaatttgtacaagatggtctaaagattccaatatggagagaggtggtcttagggaggatgagggcacttgaaaaaaatgacacttggcaattaatgatacaaccacaagggaaaactctgtagcagtcaagtgattatttatcatcaaatgcaaggttgatgggacaatagatagatacaaagcaagacttgatgcaaatggttacaatcaccaagttttaagaagctttatagaagagaaaaagtgtgttaactcaggacatctttatatggcctaaaacaatcacctaaggcttggtttgataaatttcatagtccatttgaagttcagggattgggattttcatgaagccaagttgatcactatccttattgtatatatggatgacattatcttgactagaaataatgaagtggaaatcaaagaattcaaggaagtacttgctaaggaatttgaaataaaggatcttggtcctttgagatattttctaggcatggaagtaactcaatcaagcaagggcattgcagcctcactaagaaagtcaaatgttaccaaggttagttggtaaattaatctatttgtcacacactagcctagatatgacttttttagttagtgttgtgagcttatatattttttttgataggtaaagaaacgttgtataaaaaagaggagataccaaaaacagagcccttaaagtatacaaaagaagactaaaggctaaaaacatagggagagggaagcaaaaaacatcacctgcccttacttagagcctagccaatcaatgaaacttacaagagaaacaagccacatatctacaaacaccctaaaccaagaccacaggttacatataaaaactaatttcaatatttggatcgataactcctcattgtcaaacactatcaaatttctttccttccacactgtccaaaatatacataaagaggccgcttgccaaacctttttacgagttttggccacaaacaacccatgccatccaaacagagtttccttcactgaacaagagagaatccaagacacaccaaagagggacaaaagaagattctaaagaacctgagtccttgcacagtgaagaagaaggtgatctattgtctctacttcaaataggcataagaaacatctatttgccaagaagaatcccctcctttgaagttggtccaaagttaacacttcccctaagaagcctcccaagcaaagaaagccaccttaagaggtgcactcgatctctaaatactaccactaggaaacaaaagaggatcttcggtctccaagataacatagagagatttgactaaaaaggccctacacctcaaggctgtcgaaatcactttatcttccaaatccttatgaactctggttgcttgaatcttttgcaaaaaacactccaccaactctagttcccaatcattgaaggccctagagaaaagaggggtccaactgcccccttcaccttcagggttccacacatccgccgcccaagcttccttagacataaaaagggtaaatatggaagggaaggactcactaagtggctcatctccacaccacttgtccatccagaatctcactctttgctcattgcccacttggtaggccaacctgccactcaaaaactttcactcctccctaatagttttccacaaccccacaccaaatctttttctcacctcataggaacgccaccccctatcctcttcaccatacttttgattgatgacttgcttccaaagagcctcccttttattggcataccgccagctccacttacacaggagggctatattcatcagagagagatttctcacacccaaagcacctttccttatctccaaacaaaccgttttccaccttacaagatgtggtttctgcacaagagccccactaccttaaagaaaatccctctgaatcttctccaatctcaacctcacttgtcttggcatgcaaaagagagacatgaaatatataggcatgccaaacaaagtacttccaattaaagtgagtctccctccttttgagatatactgtcttttccacatggttagccttcttcaaaatctctcttcaacaacatcccaaacctccacagatttgaagggggtccccaaaggaagacccaaatagcgggaaggaaggcctcccactttgcaccccaactccaatgtcaaatcctttatattaggcaccttgcccatcggaattagctcacttttctccaaattgattttcaaactcgagcaaacctcgaaccatataagaagtcaacttagataagtcatctggtcttgagacgcctcacaaaacaccaaagtatcattagcaaatagcacgtgagatatcataatcccattgccactcctacctctcacccaccaacccaataagaagcccccactaataggcctccttaagaagcagctaaacacctccatggctatcatgaataagtaaggggaaagggaatctccttttgaagagcacatggaggcaatgtacaagatcctaaagtatttaaagaggacactattaagaggattgttattcaaaagaagggaatagttactaatagaagctttcacagatattgattggctaggttccgttagtgacaagagatcaaccttaggtttgtgcacttaagggagatcttgtgacttagagaagtaagaagcaaggggttgttgctaaaagtagtgcatggcacatgagatgtgtgaatttctttgtttaagaaaactccttgtagagttaaagatatggacagaggctcctatgagactgtaatgtgacaacaaggcaacaacaattatagttcataatctagtacaacatgataggagaaaacatgtagagattgatcaatgcttcataaaaggaaaagttggaaaatggactaatttgcatgcctttcattccaacaaaggagtagttggctaacatattcactaaaggactataaaaaagtatttaattaacaagctgttttggttgatatcttagaaccaacttggggggattgtaaaaatgtttgactattttagaagctattttctaggagaattagttgtgattggtctagttggtaggccagtaactcaaggatggttatctcttactttaaattaatttttaattcatatggggataactattgtaacaaatctaaatcctataagtttgtaaagcctatatattttgtattttgtatcaattgtattcatttattttatcaataaaaattaagcttttcctcaatttgttttcacttggctacatgattgttaatcgtgtcaaatgcttggttctttatgttattgttatgcaaatttggattgccttagtggttatttctttttgcctataaaaaatgttattttctttttgttattattatttctatttattatataggcaatgatggttattggaacaagagagaaaatatatgaaatagaaaagatttcctaaaataatacaagcaagaatagaaaagaaatagaaaaattttaagagtcaagggtgctcaaaaatcttctgcttggttggcatggcaattttgaggcaatttggcttggaagaagacgtctcctttatgcctgctctaactaccttgaaagacagaaataaaagatttttttataatttgaagctcttggatttgttggtgaacttgtttctaaagtttttgttaggtgagcttattgttccatagggatgttaatctttctttgctagatttcgttgacagtttgggtgttgggaggctgggtggtgcttgtaccttttttttttcttttggccttggtgcacgttgtacacttttctttctttctttcttccttttttttctttctttttttgttagatgcttcactttacctggcaccctatctggtgcaacattcattagtttcaaatgggaaaatggatggtgctgcaatgatgacttgcctattgggtttctgatctcaaaagtctatcacaaaactgcttgagaaaaacaaaaaatggggtttttatcctcataggccattcgaaacttctttatgaacatgtctttgaacttggaaataatgaaattggtcaactggaaggttggagaactagaatagtcttcaatagttcttactaggaaagtgagccaaatgagatcattatgaattttactttaaatgtgcctgagatgcattaaacctgttgtgacattgatcattggaatgtaaaggcatgtatgtagccacatgaaagacatggtaatgtaaaggcacataactagtcaaatggaagaaactgtatgatgcatatgcagatgttcaagttcaattttttaatttattcatcatggaaactgggccaagttggatttgcctttacaagttacagtatttaactattgtgctggacctgtggtttggagagagtatagctgtgataattgatgatgatttggagatcagatgtagcttgtgcctttggtatgagatgtgtctagtcaatacttgttttgaattgattgtcttgttggatactcaaatgagccacaatgagttgagttttgacatttccccatcaagatgattagaagatgatgggagccttgcctattctgctatttggacaaaacagctttctggccagccttctttgtgaatactaatcaattttcaattttcaacaaatgacatttatttgcttacattctgtgggacccagatcaaatttcaattctggattctggaagttcactttcttagcacggtctcttgatcacctattgattaatatcctctactgcacttttatttgggtccctagaatctgtgtgggtacgttgtgtggaggttggatttgatttgtcaagttttcgataattagtgtgctatgactcttactaactcttctgggtatccactatcacccctctctctctctctctctcattcctgtttctaagagagagaaaggggtgttagtggtatcagtatgttaagattcttccaacggctctaggtacccaaattgtaataaatgtcctaggtatttttatcagttttgtttggtatctgtttttgcaggagaggaggggttggtagtggttgagtttgtttatgtgttagatgatcagtatgttaagactcttaccgacttctgggtacccaaattgtaataaataccctatgcatttatttgtttatgtatttatttattttttgggtgggggggtatgaaagaagttcatcccaacactcacaaaggccaatttgagaaatattaacggaaacaattgattctccaagattaactagtttatataagttagttgtgccaatcaaatataaggacagcttagttcatcaatgtgttcttacttctgtacaaacgaattgggtaattcttctaacaagtaatttctttaagaaatttgtttccatattctctactttgctttttacactaggatcatgtttggttggttggacatgatagtataggatattatttcctatgatattaaatcttatggagaatgatatcctaaggtattatatccaacaaaatttattatgctatcctcatatttcgtttgtggaatgagtaaaaaatggaatgtaaaatatattgcatcccaatacttgtttttttttaaaaaaataaaagatatattacatcttgatgtttgatattaaaaaaatatgaaatttctctcatgtttttgcattatttggagatctttccacaacttatattataatatgcaatttttttagttctttattaataatgttcataattaaatatttaaaataaaaattattatattatatattattattgttttatgttgtgatatatatatatatattctttttttttcttcttgaaccaaaaaattgattttgaattaaaattttttttttttttttgtggaatgatatgaaaagaaattgaaaaagtagaagataattaacgagaaaaaaagaattcatgatccatgagaaatgtatatctcatctctcaacatgagattattatataccatgtaaagggggataaaagaggcaagataagttatcttatacttaattcatcccattgtcaacccaacatgaaatagatagtttctcattgcttatcctttcctatgttatatctagcaaaccaaatatgacctatgtgttaactattaacctattcaatgcacgagtaaagaatcaaaggtggttatggaggaaatgctaatcaggtgaactcatccaatcaaaagtatgtcattccttttttaatgatgatagagttgattttatattgttcttgattctgtcatgtgattgtgtactggttgttttacaattttttgtttacatgaagcaattattgttgaataatgggataacaatgcacaagagaggagacaattccttatgctgtttttggttccaagaaaatactaaggaaataagggaaaaaaatgatatggaaaatgattttctcatgtttggttttaatatggaagacatgagagaattaaatagaattaatattaaatttatgcattttcaaattatttaagttttatatagcagagttaaaataagcaaatgagtttgaagtaacatataaaaataatctatttattttaaatctagtttttatttcttttcactttttctttctttctacttttactctctaacatataaaaataatttattgattttaaatttattttctatttttcttcactttttatttattgatttatttatttcttctacttttcctctcattttcttttactcaaattttctgggacccaaacattgcctttgtatttgtatagcttagtggcagaatctaggatatgatatggttcaatgaagtgataaacaaaataatagtgatgcatgtgagttgcctttatgggcatccaatatctaggattctttgttaatctaatttgtgtttgccttctcttataatgcagtccgatgtgatcttgcaaagtttctaactaccaacatctttctcatctcacatgtgtgggatcaacatatcttcacccattctgtcaaaattggccaagtaaaaaattggttcatatttgttccacttcttcagttgtggcattgtaggtcacttatttttgtctggtttataagctacttgcaagcgaggatttttatccatgccttgttgatccaaggaattaaagccaggtctatgggaatgaaataagttcagcttttacagggacaaagtaaaggttgaagttaaaatacaccttttttggcctaaattatgaattatagcaactgaacttctcaagtgagaaccttggaatgatacaaaatagcaccaacaagcacaaaaagaagcccttctttaatcaattctcaaacctttatcagaattataattatgtcatatgtggcatgtgaataagaaacagggccaaagttaattcggctccagttttaggtatctctattaatagaacggctatggattttttcaccccatgtctctgtgtgtattcttgtgtggtgtagaatttgaattaatttatatagactagccaaatatcatttttacttagtacagttgtatcatttatacttaatatatatatacaagttattccatcttcgcctacctatttttttcccagaaaatttatgtttcttaatatttgagttctctgagtgcttgcccaaatgaatgagtttaaacggaactgttgctttgttgcatcacttctctgcttggataggtgatgctattgtattaaaaaaaaaattcctattttgtaggactccattcaagctgacagagacgatccgaaccc

SEQ ID NO: 13615 - DNA, 3309 bp, Vitis vinifera
  Intron number 5 from transcript GSVIVT01034955001 (locus G SVIVG01034955001) derived from phytozome v7.0 (chr-ID chr5 ; pos 425306 to 428614)
aaaattatttattacaggtttgttgttgacatcttaacatgatagtgatattctaatctgctcatgatttataaaatgatggaatatgggtagaggaccaacctcaaggctgaaattatcctgaatagctcaagtcataccttaacttttgaggtttacttcatcttacacatgcatgcttacacacataccaaaaatagtgattttcatcctaactttttatatttagggtttcagacaagtgacctaagctgaattaagtatactgattgaagcttgggtcagttgaatcagattcagcttgaacttgaccagagctcaattagcattttcaagcttggtgtatttatggttggccaagtttatgattgtttgcaagcccaattgagcttttcaattggtctaatgcagtccccttttttgtccctgaagctgttatcatgcttgtgctaatattttgttagggttaagcatgtactcaaacatctgacttgattcattgctgcttcttctcactgattttatactattttggtccacacacactctaaaagcttacttgactcattgctgcttctcactgattttatattaatttggtctgaggataagggaaaccagatcattggtgtttaaaaattgtcctctgtgatgttcaactctgtttaatgaaactctgctaaaagtttcctcttcaagttttttgcttcattgtgatgcctttttggttttgtaggatgtgaagcagaaggatgggataaaaataagtagattaccaattgaactcttgtctaatcaactaccattaattcaaaatagtttagtagttatggcaatgacatgagtattcacagttggaaaggcagggctaagctgtaggattgtggtgcagaattcattagttgatttaggttccattgtccttctatagattcacaatagttttaggttgtgtgcatatggattttgacttgattcatacatgcctacataacaaattattgtaactcatgacagacaatattaactggggtaggtgtgtgcagcacatgcacaattaccaaacattttatgttctatgcatgtccatcatatttatattttttagagtcttaagtggtatagataagggcatcgggtgtttcataaggtgagtagttcaccccaaggattttattccctatcagtttgctcaaaggttaatgattgtctgtgatgtctgctcatatctatgagctagttgtccttcaaactctctgtagtttgcttttgttgaaggcatgcaaattattggcactatgctcattacatgatcatggtgagaacatgctaagtcttgtcagattggcacccaataagtgttagtttcctacacatgtctgcaatctacatggctcttgtcgagaatcaggataatatctaatttctatataattgtttggatgggatggatgaaaataatgggtgcatcagagtttcccaatgggctttgaaagagatgcgctaagtatgggaagacagttgcattttgatctttctccactcttggatatggtgttatgcaatatattgaacattcaatatattgatggtaaactttctagttagtttagttatttgaagatgaggcgtccttgctaaggagagatgtgctaggaatgaaattgtcttgtctgtttactacaaatttcaccattctgtacagctaaatctggagctatttaatgtgtgaagttttgcttagattcattattgtgaaactagggacactttgttggctgggacttgatgacttctaggattgagtgtttgtagagagaatttcgttggtcgtggtttgggaaaggaaagagatatcaccttgttgtcatggcatagatttttcatccttgttgggaatgatttaagtgctaccctgtaaggcagtggagatgatgaccatttctttttaggatttgggggtcatcctttaatcaagattctatgaaatattgttaaactcaatttgatttagaagatatgaagggaaagagatgttaatggattttaaggataattggaggatagtagatacaatgtgggacttgttttactcttattcctccctttggaattctattaatgaagccttgataggcactcacttgagccttgtattattatattgacatcttgtatgcaagtccaaggggctggctgagaagacctttcatgtatggtcaatgccacctaagggttatagcaagctaaattttgatggatgatatcctagggtaccttggaattagtagagtgcttagagattagggtataacatacaagtttgctctaaaccagcaggtaagggttttgctattgaagctaagattctagttctgttaaatgacctaaagccaaagcttttggcatttccaatcttgtagtgaagggaaattctgttgttatcaatctgtggtcactgataagccaagaattctacctatccatgaaaacagaactagtaaggcaagaattcaggcaggtttgatgaatggcttagtcaattttttatattgttacgaagtttgggcattcttttgctatgttccttgcatttgcctagcagaccttttaatgaatcctttggtgtcttttgttggaaattttttgcctcctagtgttgtaattagtgtttttgtggtttactctgaaatttttgtgatctttctcagttgtttaacttgtatagttctctttaaagagtttcttatcttgttttggtcatgtttgtatattgtggaaggatgtctctattccatttggaatggtttttctgttttttgctttaactgggaagtcaaaatcaaaatcaaaaccataattttcatctacaaaaagtttcttttttttaacttccatattaagctcttttttgagtcataatattttttaataaaattacccaaataggtatgaaagctcttattgagcttaaaaatagtttttagcgtctcagaaatcaattcatgcaggatcttttacgttgtttctaatatttaaaaaaagaaaagaaaaaggtagggacacattgaagaagtctttgctaagtttgggatatcagaactcttaattttataaattttagtctctttgtcatctcattgtcacgtgttctattgcactttcttttattctcattgttttttgtttttgtttcttctttcttgattctagtttttgaagttgtttgcctgtttgctgactctaaaatttgaatttttatttatttgtgcagccgaacatttttgtccatcattggtggagtcattg

SEQ ID NO: 13616 - DNA, 1061 bp, Vitis vinifera
  Intron number 5 from transcript GSVIVT01009035001 (locus G SVIVG01009035001) derived from phytozome v7.0 (chr-ID chr1 8; pos 4443863 to 4444923)
ccaggttcttcacagctactttttctaaaagtttattgtctacatatctccttgttccaaattctacataaacttgactagtgtgtttcagaacatttaactggttgcaatctgattatcatcattttatatgtaggtagggtattctggaaacagagtaatctaactctcttatctgcccatagccaccttcttgaagaatgtggagataaagccgagtccaaataagataggagtaggaaaagggttacctgttgatcaagaattgatgcagcatctggttccataacagtccattcagaattaaacagaaatccaaacacagcagcatgcaccaaaaaggaaaaaggaaaattcaattcattagctttgtttcttaagaatactaaaactctctgccctattgttttgggttcaacataagctttttagatccacttttctgaataattggataatgccatagacttccctcattatgagaaacatctttctgcggtttttttgttttttttctttagttcttgcttattgcacaagtgtctagctgaccccaagtaacaggaatatgaaggtttgttattggttcttgtgctccacctggttgctgagaaatttaaagaaaagaacagaaaattcgaaccccatatctcccattctatgtaaaacacaatggagccactcatattccagggacatccaaatgcacctaaatcttttctcttttggatgtgtttagttgcatactattgggtttgatttggaactttaattttgtggaaatcaaaaggtgttacgatattgtgaaactgtgtgtgaattttccttttcttgtatcaactacagagcatctaagttagggtctaccaaaattttattcttggttttccaattcaattgtatgaaagtatgtgagtgaattctttctgcaccatgacattatgcagttcttctccagtgacatcctactcaatgtagtaattttgatcaaccaatttttgaagttgggctgatgttcatgtaaatgtaacagatgtctgttgttacctttgtatcaggag

SEQ ID NO: 13617 - DNA, 4655 bp, Vitis vinifera
  Intron number 4 from transcript GSVIVT01034171001 (locus G SVIVG01034171001) derived from phytozome v7.0 (chr-ID chr8 ; pos 14651482 to 14656136)
agcatacttcaaggggaagagttggaagaaaataggtttgattcactcctccctgttgtttctggtatttctgtttagtgtaaagctgctttagtagccttgagagtagatacaatcacacaatgtccctgtttgagagtaccacagttttatgtatgtttgctgtcatgcattgctccatgctgtgcactggcatgtacccttcaagatttggctgattgtgttatgctcttcttggatttaatataattcatattccagttcaaacaacttattgcttgtgggatgactaggacaggcttcaaatataaaccctgtgaatttggtgaaaacattaatgatttcaattaattacactaatgttgactttgaaatattatccagacccacattgtggtgtgagagttatgtcaatatctttattttattgcttatttattttttcatctcgatgtaaaatattctgaacaatcttgcttttcttgtgtccaccttaagataattaagttggtcggcccaaagctttgtttggaaaaagatcccatagttttttttggatgtgggcctctctataatcgatttatatttttcctttattatttattatattaccaaaaaccaaccaacactgaaatgggattcaatgcttgttctcatttggatgcaggctacattagattattattattattattttatttttatttatttttggtttcttttcttatataatctatcatataatctattaacaattaccaaccatataatgctgtgatgattatttaaagcttgtgattactaacaagatgtttggtcttccatccgtctctgtcacttctttttcaaactctcacacttctaactcctttctttcttctttgcctcatgtatcctgaacttcaataaaaatgcacagttctaacttttccttgattatataatgtatcaccaaatacctaccatataatggcttgatgggattaaaatttatggtaactgataagatatttcttcttttaattgttggttcttcctcattatcatgatgatcgctatccttatcttcttcttcttttttgccttttctccttttcccacacacataaatgcctcatttttttggaaacttctaactagagtattatgatcttggaatgagagaggaatgtgaaaacaatatgcagttacagatgcaaaaaaatggaaacaagtatgatgtattagatcaattcagatgatgtgttccttcagctaattgagaaatatttaatggtggagatttttttttcttttgatagacaaataagaatatattaaagttccaattaaaaagcgccagtgcataggaagtatacaaaggggcctaaaaagaaaaaagaaatacaaccaacagccacagccacagccacaaccacagccacattctaactacttagaacacaatctcccaatgaagtctagcaaggatggaaaaccaatttgaaaaccatcatgaagaaatcattaagaccactggtataagttgcaaataaggaaatcctttagaaatttgatctgagcatttcacccttttaaaggatctttgatcaccctcctgccaaattgtatagaatagacaaagaggacctgttctccatgcctttcttctctttttaccacaaaacttccatgtcaaactgttagcaactcttccaccagggaaggagagcccaatagatgctaaataaagagaaaaaaacatgctacattcgaggaggagatggtctattgatacaagtgcatttttacataaatagcaataacttggcaaaaacaagcatcttcttttcagctgatccagggttaggattcttcaccatgcaaccttgcacacaaagaaacccattttagtgggagcctaagaacctacctttgaggggaaagacacttctccatctagcttgaaagcctaatagaaagacttcacttggaatttcccattctgccaagcattccaaaccattctatccacctccacactacaccttcctaacacatatggcttatgtagcatctccttaacattatccatctcccaatcttggaaatgtcctaggaaacacaagtttcacaataccttcccactttctaccacttgaaaatcatccacccaagcctccttgaaaactacaaaagagaatagaaagggaaaaaaggccttcaaaggaacatcaccacatagtggtggagaacttagtaaaccgaaaaaccattaagactgacccaacaaaactttaacaaatggatttttacaaatccaggagaacccaaattgtaagtatgtttttatgaaatgaaaaaaaaaaaaacttggatattaataatttaataatgaggaaccttagtacatttaaggtcaatgtttaaaaggctattgaggctagcctcaatgcgaggcactatgcattagtcttgatgctttatagctttagcagagaattactcttgaattaatcttaagccttactttgttgaggcttacaaccttgatgctgtaaccttgaggttgttgagagctaagcctcaactattcaatgggttttattgtgttttgggcttttatgggatttttctacttagatattataagtggcttaaacattgggttttttggcatctaacttatatgtgttaggtttggtgtctagatcttgggataaacccctttaaaaaggaaaaatgaggggaaatagaaattgcgaaaaaaaaggtggagttgttggtcactgtactggttgggtcatatataattattatcttattattgatggataaaggagggaaaccactccaattggttgatgaaaaagaagaatgattggatgtcaccattgatggggaagttgataatgcaattatatatatatatatatatatatatatatatatgttatttgacttgataatgcaattagatatgatgataattctttggatgcctttactagtgatggtgatggtgttgttgaagactatttgatggagccaagagaattggactttgggagagaaaaagaggaactaaatgagaaattattaaagtgacaaacaattaattctatgatttgattttgttagtatttttctaaactttttagggttttttttatttttatttattcataaagattgaggcttacagcgcacctcactacaactaatttgtaataaaatttctcattttccttcttcttgggtttctgcaagagtgtggaggctgaaccgcatgatgctatatatatatgttatttgacttgataatgcaattagatatgatgataattctttggatgcctttactagtgatggtgatggtgttgttgaagactatttgatggagccaagagaattggactttgggagagaaaaagaggaactaaatgagaaattattaaagtgacaaacaattaattctatgatttgattttgttagtatttttctaaattttttagggtttgtttttttttttttattcataaagattgaggcttacagcgcacctcactacaactaatttgtaataaaatttctcattttccttcttcttgggtttctgcaagagtgtggaggctgaaccgcatgatgctacaataatctgttgtaggagactatgctaatgttctgaaaccataggagaacttggaagaagattatcactatcaaataagttagaaacaggattgatgtggacagaaccctaaaatgttgagtagatggaccaactagaagctaaaataaatacaagatgataaacagtgtactattgcaaattaaagagtttgatgggagaaaaagctagttgttttgttcttaacgaagatgaggaagttacttgatacaagttagggaactcactcaaatatcctgattgaaggatgaatcgtgaaggcaatcggaaaagttgcttacttataaggtgctggcttttttggactttaatttaataatgttctttatgttgtctgacatgacatgggttttatatttgttatgttgtagctttgtctgtgctatgaattgcaaaaattctctatttggatttgcattaacatagacctgcaagatagtataaacaataatacatgcatgctatgttgcattgcatgaacacttcaaagtatgtgaagcacccatgccagacatgacacagcaaagttttcggtaatgggatatgtgtctgactttatatgccacaggtgtgatcaaataagaaaagaaaagaaaaaaaaaatcatagttcattattaatgaccttagatttgcattggaatttctatcttatttatacaattaaatttagaaattctatcttatttagacacttcaattaagcctaggaatattgagcgaaaaaaataaatttggaagtcaggttatttagtcatttagtcctttttgactcctagacacacatcaacactctaaacttgtactggaggccatttaacatggtataaatggatagatgcattacttagctttgtagcatctagtgtttactatttactgtaaaaagaacctgttgtcatttgttctcaaaatggaaggtagttccataattggatttcattgtgtatgcagctgagttttttcctgatcgatcagaagtgca

SEQ ID NO: 13618 - DNA, 3165 bp, Vitis vinifera
  Intron number 3 from transcript GSVIVT01009354001 (locus G SVIVG01009354001) derived from phytozome v7.0 (chr-ID chr1 8; pos 7638111 to 7641275)
agcagcaacctgcagcatctgtttgtggaaaagaagtaagcactcatacggctgttgtttattttttgaattaacttttggtattcttttgttatattgattttggttccattaaagaactgaaaatatttccatatgatcatgcttctgatcagagatgaaataaacgtggcacttatttttagtgtattaattgctagaaaggttctagaaatgtgttgactgtccatctaaattgtgagattcacttgtggggtcttccctcgaggatgatttcttgcagcctacctcacagtgccctgttatttttgtattttttattatttattcatttcacccttctctagatacctaaagagtcattcagaatttttttaagctagtttattggagtataaaaataaggaaggcgttaaatgagagtcattcacataaatcatattttatcaaagaaagaaaataaataaatgcaaaattatttagaatctgcgagcattaaatattcattttaaaagcctagctatgctaaactatcatcttaaaatcttttttttgaactgccattctttctcaatctccttaaccttcacatttcatatgatacacaaatgcacacacacaacccaacccttgaattctttactctctaccattcaaccagaagtatggatccaatttaaaaaagttttgtttcataatttcaactcagcattgacgtttgtttgttgtgtatggagagtagtgaaatggtagatcatatctttttacattgtcctttgagtttagggctatggcatagattatttagcttggctcatatggattgagttactcctaggagtatatgtgacatgatgatcgtcttatataaaggattgggaagtgccattggaggcaaggtgttgtggcagttcgcttttcttgctttaatgtggattgtgtggcgggaaagaaatgctaggattttttaggacaaggtgagaacttcagaggatctttgggacataattcattttttagccttcttttgggcttcttgcactacaacttttaagggtattccccttaattttatttaacttggatggatgttggcgtgtagttccaagggtgtgggctagcaaggatagttattttttgtatattcctatatgggacatagtttgtatggatttacttgtactttggaggttcctattttctttttttgtagtttttggaggatttctcatccttctattgtacttattcttattacctttttttttttttgataagtaaacttattcttatttacctaaatatgctatattgttatttctcataaaaaaataagaaaaagaaaaaatggtaaatttcacaatccaattgtgaaattatggggatgaaggttataatttcaaaattgtgaggtaagagacacttaaggtcatcttatggaaagctataaggaatgggatcttttcaacacaagagtctttttttatttttatttagatgaacaaagtgaaattttggaaggatagatggtgtggtgaggattctttatgtgtgacttgtccatccttgtttgatttagctaagtcaaaagaggtgtggttggcatatttatggaagtagaggtgggaagggggaggctagaattttcagtttgcaaggaatttaaatgattggaagttggatatcatggagcattttctgtctaaaatccaaggaaagttaatgaaaaatgagaaggatagagtaattaggaagggtaaaccctttattctgttcttgactcggattgtgccattgccatcccttctcctttagggataatttggaattcttggctctcgtctaaggtgaacttttttgcttaggaggcctattggggtaaggtctatggaccagtttcaaagaagaggttgaccgttagtcaacagatgtgctctctagaaggaggaggtaaaatctatcaatcacattcttcttcattgtgacaggctaggattttatgacagttgtagttctttttattctatattccttgggttatttgtgcctcagttagggagactcttgtaaggtgatatgactcttttgtgggtagaagacgaaagcttggagagctgctctcttatgcatttttagattggagtatttggaagaaaagaaaccaaagattgtttgaaaataaggagatgtcaaatctgtgagtcaaaagcattttccttaacaatttgtttctttggcttaaggtgtacatagatgaaggttttatgcctctaattgattttgtagattggtagggttcctaatgaggaaggaagtaattttttgttttgcctcttggtgcccattgtatatgtccagtgtactcgcgtactagttgttttggtgcttttaatacattgtcttatttataaaaaaattaataatttcccaatccaatttaagaaattgatacaaattagaagaatgtgttttcttttgcaaaatgaattagttcaattgcattttttcttaccaaatccaaatcctcttgatacgcccatcgaaaggtccatccaattcatgtggatttgtcccctaacaaacaaagaggtcttggtagaattgccacatctgaaattgtacacatatttatggcatgcttaattctctagaagagatgggaaacatgttcatatataacggaactccaatttggaggactattttgatgggattgctgatgtttgatggactttggagttgatgagggcagcttatccaatggttggctttagaaacatggatccctaatagttcactgcctggtttgagaataaattcctgtttaggcagcttttgaaggccttaaattatcttgtctcttgaagcgttttatagcatgttacagttttacatgaaagcattttaagcatttcccatacctataagcgctttcttaaagaaagtgtacctaagaacgtttacattaggctcaattatcttttaatccttctgtctatttttgtatcttcatgtttgtttttctgcccatctatatccattctttagatttcaattttttatatggatgcacatttttttcataactatatatttcattaggttttcatcgtttttggtttttcttcagattcgctacattgctgcatcagtgtttgaattcca

SEQ ID NO: 13619 - DNA, 5189 bp, Vitis vinifera
  Intron number 12 from transcript GSVIVT01011939001 (locus GSVIVG01011939001) derived from phytozome v7.0 (chr-ID chr 1; pos 2856368 to 2861556)
tggcagggttatagaagcgcatcggcttcagagtcgtaagtctagggattatcatccttatttgaagtagctttaaattaatgttttctatcattattgcaattttttttttcttttttcattcttgtaattacttattcatatcgttaactcataattgctaataagaaagagaataactatcaaaatggattaatattcagcgtgatttacctttttttgagtgacaaatactgtttaactggtaattaattagtggactttaaccaggacctgatttagttttactaagatgtgagatagtaaagagagggtttggtggcaattgtgggttttagaaatgcctactattctaagaatcatgttctcctcaacaatgccattgttgtgctcatcaataggtctgtttttgagttgactttactccaaggtgtatggaaaagggccattttgcttgatagagggttgtagtgcttgcagtccttctgagtatgtccaggatcattcaaactatagttcattctttactcagaggaacttgatagacttaccaacccttatactagtttggactgctgtttgttacaaagagggttatgccatttctctttactaaatgggaagtaattgagcacgctaatggttacaattacatttgtattgtgtaatatgctaatttatagatcctacccaatcaacatttgtatatctccctacttctaaatgggccataactctaaattctatgtcagtgcttgatctagccacaacaggttgtttcatgaagtaccttgaactaaattccctcccacaaacatgcagtaccttgaagttgctcctctatttattacaaatcctgcccaatcaatatctatatatccctctactttcaaatggtcatatttagaaaatagcaaacctttccctggagcaaattttaaatacctgagaatcctatgtatagccacaacatatgtgttctgcaagatctttgatctcaaattctgctgccaaatatgttttggtttgcccatctcatcactatcactacctatcaccaaagttatttttccttaagtgaatgtttgagaaaaaagtgtgatcaaactggctttgatggtattcatacttcttcatggcatgagtaaatctacctaactaagctttaggtcattccttgagtccatcaaggacttacttatctacatgccttatccccttttgttgggttagaaaagccaagaggaaattccatgtatactttttcttttagatctccgtgaagaaatgcatttttcacatcacttgtttgaagaggctagtccaagtttacaattaaggataagagggttcaaatgacatttgttttttccattggagcaaaagtttcttgataatctaacccatacatttgtgtataacatttagctgccaatctttgctttgaacctctccccaaaatcatctaccttatgtttcactgtgaatgcccacttgtaaccatgtatcaatttttttttttttttttttaatgcttctatttctgcaatcatggtaggtttccactttgggttgtcaagagcttcttttaacttattaagaatagacaaagaggacaactaattttcaaatattttacaagatggggataaatggtgtaaagacataacaagagatgaggaatttcacagtataattcaccaaacgataatgagagggtggtttttatgctctagaaggatgacaagtccggttttcaagagtgaattgaattaactcttcaatagaaatatcaatggagagttcaataaaaggaattaccccatgattatccgttgtaggagcatttgattggtcattgggttgatcaactggtggttgcattggccaagtcttcttccttaaatataccaatctatatggctcaagtaatcctcttgaagtaggtgcagaagtttcaaacaatgatacactggtgaacagtagtgttagtgcatcccaagacctttgttcccccttgagagaagcatctgaattttccctgaatagcaagtctaatcttcaacaaaagtaacatccatagaaacaagcatattttgttaaagtactcccctccattatcagattgtagaacttgtattttagtgttaaattgggtaataaccatttgatgaaaggacttaacggcggaaaaacatcacttttttcaaaaatagatcttcgaaatgctcaccaatgaaagaaacaaaccacttagaacctgaataattagtagcataggagggccaccacacatcactatgaataattgagaaagacactgaaattttattaaatttgaaagtaaaggaagtttgatgatgtttgctaacacacaactatcacaaatagctaaatgagggatatcctaaccttttgtgccataatcaaatacgttcttttgatgttggcctgcccattacttgatttgcttgtctatccaaatcttgctaattcatatctaaatagtatagatcacttctctctctctactaagactgatcttccctcccttaagaatatcttaaaagacacaatgagtttcaaagaaagttatggaatactatagagcttaagtaatctggataatggacaataagttactggataaacatggaatatgaaagacagtagagggtgacatggaagaagttagaggaatgaaacctacacccatcatagtagaagaagatccatttgttgttttaacattttttgtactaggatgagtgttaaaaggaaggaaaaaaaagtctagattcatgtgtcatatgatctatagtaattgaatttataatcccaaatgactcgtaacaatcatgactagaggtgcttaatgcaaatccaaggttgcctgtattggctaaattacaggaagcatcttttagggaaaaccactgagcagtcttgtttatttcatctgcttggatttgagaatgttgtggttgggctgtggaatatgaatgtgtacaagaggatgtatgatgtgctttggaatttgagttgaagcccttcctatgaaaccattctggatatcctttcagcttgaaacatgtctctcgagcatgccttagactattacagtgtgtacaaagcaaaaactgattgcttccaactttcctagagttagagataactagtgcattgaagtttgaacagtttttaaggctaaactattttatgggacacctgaaagtgtagtaccttgatgaagatcatcatgctgaacataggcatatatgcaccatgaagagtgggaagaggatcttgccttaaaatttgtactatgatcttatcagaacttgggttgagatcaactagaaaatcgtagaccctctcattctcaatttttttctttagttttgttgtatccacaacacactccatatcacatggctagagaaaatcaagtttagctggtcaatgtcttcccctgttgtctagtctcatgtgcactacatctaagttcataaatccgagaagcatcattatcatcaaaatatggttgagcctcaaaatcccaaataggatgagctatagaagttggagaaaagtggcactaatatctgaagtcattgaattaagaagccatgacatcaacatgacattctccttaggaagaaaggattagaaataactggctgtttcttttctccagtcaagtatcccaacttgccatttcctgtaatacacagcttcaaactgagaccacaaagagttacttgtcccattaagtttgttagaagttatctaatacatgtatgttatcatgttgaactgtcacattggaggaataagtggtggtgcaccagatccagaaagttttatcatcaatttggacatgattctttgtgcaaggctacttgcaaactcaaacagcaagtatagccgggggggaatatgtcagcaataaaagatcagacgtaatggtcacagaaatggccctgataccatgctgattttgggaaaattttttctgtatatctacttcacaggtacaatataatataggaaaagagaaaaactgtacaaagaagaatctaaaataaatccctacaatcagcaataatgataatcaaatccctaaaattaagaagctaaatatgatagctgcaaatctgctccttgcttatagaaattagaataatcaatccctgtaataaaagggttaactaggatcaaacatgaaagctagtatagaaagtataagattagaaatctctgaatgtacagttaacacattattttagtctaaatttatatagtacttgatagaaattattttttgagattctcacagcataatccatcctatcataatctctatagtgcatgctgagaacacctaccaaaactcattttcctgatctcttgatttcattcaaaggggttgaccccaatcataagccaaggtgcatccataaatttatgtcaggaatgacttccagataactgttaaaatactaagttgtttccaactattaacaaaaaggttttggatgctgccagccactgtcaaggcgacgcttttgggctgggacgggtcttttgtgggaaaaaagagaaaggaagtttggagagcaggccctttgtgtattttttggacggtttggaaggcaaggaacaaaataacatttgaggaaaaagtgttgtcaatccaaagacttaaagagttcctttggtcggagatgaaattgttcataaaagatgatcctttgactttagttgattttattgattgggtgggaacccattgagtgtggggttccttttgcacctctgttcttggcagctgattcgttccagctggggagcgggggtgttttcttcttctttgtatactttcagctgctgttgtggtggttttttaatacagtttttctctcttacttatcaaaaaaaaaaaaaaaaaaactattaacaaaaaggtttcacaaggtgctttccataattgtaatccatggaggtgcattttttaaataggagttcctatcagtgagtgcaactgtcttgcttttttactcagtgtggcttagctgtggtttttgcatcccctagaagtcctcttttatattgattactaagatgaattatgcaactgcatgagcttcttccactttctcaggcttgcagcaaactggcctgcgacg

SEQ ID NO: 13620 - DNA, 5872 bp, Vitis vinifera
  Intron number 2 from transcript GSVIVT01014272001 (locus G SVIVG01014272001) derived from phytozome v7.0 (chr-ID chr1 9; pos 2225193 to 2231064)
ccaagtggaaagagagatcaaaaagttaatttaagattgatttaattttatttaaataatcatagtggataaaagttaatttaaaggttaagtttattttatttttaaaattaataaaaattacattagttttaaaatattggtttgatctagcttttattgattagagagatcaaaaagcgtatctgctccaagatttttgaaatctatttgatcgatttggatggattaaattaatttttacttgcacctttttgaaatctatgtgttcaagtcaattaattttatattttgttttgacagatgtattatagaatgagtatccggggatgttcgtccatatcggacggtgcacccctgttaaaattgacgcattctttcgatccgtacggttggattcgcgttttagtgcatggattggggctcgatcgtgactttaaagggtggatgggggaagtgtggaagcgagagtttgccgagtggtcttttggcccttcgggtacagtttggggaccattttttttttcaaaccacgagtcttgacgcgaagatcacaatggcaggctcagatcatcctttcgacggacggatggggagactaggaaggaaaggcgttttgggtcataacttgggcctcgagcctcgaaaaaggttagcgtctgcgccgatcgtcctaaaatggggggaactttcacgtgtgagaaaacggggaagatcggcgacgatcgatttcgacggctgatatctgacgatcgggggatcggatcgacgatcggccggtccggatggaaatgggaagggcggaacctattgcaacgacaagcgacaagccgcttggagtatttccagattgatcgaacggtgggttccttaggaaccctgagttatttggtcaaattttttttttttaggggatatctttttcatggttaggaattatgtttcaagtagaaatgggggaaggatgctaaggttgagatgaatctaccaatgtctacggtttcctattctatggtaaggaaagtagaaagcccatttagaagaagaatttatgcctccaaccgtgctttgtttggggaattgttaggtaagtctctaagagatgtggttttttattattattattattattattaaaaaaaaatcattgactacatcgaaatctcggatttatggtgatcttataaattaaaccaatagactttaaggtttctcaatttgctcctatgtagtggtacaatgttcatattgtgtcacttatgctctttctagcggattgatcctctattaaattataattgcatttaaaataactaggtactaattgcgtccataattaccttccaactactactacctaataattaccttcaaaataaggatgtttttgtaattaatgaaaataaaggggatattttagtaattactcaaaattatatgatttttttgcaattactcataattaggggggtaattttgcaattagtcataatttgtaagagtattttcatgaaatattcataacttcaaggtgtgtttatgaaattactcataattttaggggtattggtgcaatcactcataattgcaagggtttttttttctaactattcataaattcaagattattcatgcaattatcataatttcatcaacttgcacaaatcatttctttatacaatgaaaaataatttattaaaaattcatcaccaatcttatcttatatatgggcaatagagttctttcgtactttaaaacgcatataaatgatcatatatattattacgaaaaaacaaaaatagataataaataataaaatatgataagaacatataaatttaagtggaaaactttaaaaagaaaaaactaagtgtagagagatagaaatccactatgtcaaaaattgatacaagagaagtgagatacaaatagctattgtatagctataatcatcataaccctatattggaaatatatatatatatatatatatatatatatatagtaaaaaatattttcaaacctataacactttttgctactttgaaatatgtcaccttccatcatttttatatcaataaaaaaaattaaatttatattgaaggtgtcctagagacatctttcacaatttttttattaataacacacataaaagaaattgaatttacattaaaagtatctcttcaaaaaacatcttttacaattctataaaatcgaatttatattaaaaatgttttttaaagatacactttttacaattttcatatcagttacatagtggaaaaaattgaatttatattaaaaaaagactttctacaatttcataaaattaaatttatattaaaggtgtcttttgaagagacacattcaacaattcttatgtcagttatccattgaaataagtaaatttatacttaaagtatcttttcaaaagacaccttccacaattccataaaattaaatttataatgaaaagttttctttaagagacacttttaatataaatttaattttttcgataagtaactactaaaaattgcataaaatgtatcttcaaaatacatacttagtataaattcaatttcgtgaaattatagagatgcatttaatgtaaattcaaattttttttaatgtgtgactgatataaaaattatgggagatgttttttcaagagatacctttagtacaaatatgattttatggtattgtggaaaaaatatttctttaatataaattcaatttttttaacataaattattaacaaaaaaaattatagaaaagtgtcttttaaagaaacatttttaacataaattcaattttatggatgaaaggtatcttgaaaatatcctttagtgtaaatttaatttttttttttttttaacatatatcgttgatatgaaaaatacaaaaggtgtcttttcaagaaatacttttcaaagtgacaaaaaatacataaatttatcaataattttgtaattatcatattttaagaattttttttaaaataaccgtacaagtaaaaaaaaaaattaaaaagccccaaaggaatagagataagtggatataagcaaataacattcattaatggagaggaattgaagcacgtatggactttggaaataaaagccatttcaatgactttaccaacaagccataacctgtttttggaagttttaaaaaaccaatattttgataaattaggaaaaaattatattaaagtaccattttttgaaaaaactttttgttatttgagtcatatattataaatttgaaaaactaaatccgtgaagggaaatagtgtttatattataattttgataaattaggaaaaaattatttagtgatcctttccatatttttccccttcattaaatctttattttagtttcaaataattaatatcagtaacttaggaaaagttcccacattaacggacaaggaaatgttttttaagttttccttatttgtgttttcttctaataaaatctttttctaaattagaaaataaaaaaatgaacaaaaagaaatgcaaaactattgaaaattatggattttagtgatttattttttattggaaatatatgatatgttaaattaattccttgattccgttggtaaagatttaggccttgtttgataattatttttcaaaataattttaaaaaaatagttttaaaaaaaaaattgtgaaaactattttataatattttgtaaaataaaaatctatttggaatctaaaattggttttagcttatttttaatatttttaaatatgttttaaaaatattttttttgtccataactttatttttttattttatataattattttttaaaataactctcaaaaaacaactgaaaataattaaaaaaaaaatatctgaaaacacttttattagaaaaaaaaattttgattatcaaatatatacatatggcccttccagtattggaaacatctaatatacgtagagcttcttcaacttggtccctggtgcggtccagtgcacttttagccgtgttcatgcagatttcgatgcattatttgttcctttctgtcacatgacatgacaacattattagatgtttccaaaaatggtagggccactgccactgccactgccactagtgagccacaaatgtcaactgccgttcttctatttttgtggtacaaaattaattatttgttatacaaattaaaagctaaaaataataagaagtcattctcaattaattatcttacctgccgagagagaaggaattccccgaaatttttttatcatacacatcctgaatgaagcatctcttttaaaacttccaaaaacaggttatggtttgttggtaaagtcattgaaatttgcaccctacagtgctaaaaaaatagaagaatggtagttgtcatttgtgaattcatctggtagctgcacttccattattgaaaatactgaaccatgtcgtactatttaggtaggggtttaaatacgtagggacgatgtttttattttagatagttccaaaaaaatacgtcgaaatacgtgtttgtaaggacaaattatgtaatcatactattatcgcccatcatatttgctatttgctattgtttctctctttcttttaacattctttttaatacactcgtttattctctcgtaaagtctttttaattttagggagaattatgttttgggggttgataagcccaaaattaacaaaagattcgtgtaactctttaaattgagcccaagacccaatgaaagtatggaaattgagttgaagaatatcatccttcagtatttccaaaaatgccctttgttgattttgaaaaaaaaaattaatatttttgaaaaatacttttatttaatttaatatttttttaaaatacttttatgtaatttaatattttttaaaatacttttattttatttaatattttttttaaataaatttatttaatttaatatttttttaaaaataaatttatttaatttaatatttaaaaaaatatttaatttaatattttttaaaatactttaatttaatttaatatttttgaaaaaaaaaataatttaatatttttgaaaactacttttatttaatttagtatttttgaaaaaaaaattatttaacttaattttataaaatattttatatatgttcttaaaaggatatatttgcccgttactatttcatatcctttaactcaatttaaagatttatatggaccttttattaatttggggggtccatctaccccaaaaagataattctcccttaattttaattttttttcagtttctaacgtctccatatttattgattttaatcatatttggacacattaaacttaaaataaatagttaataataataaattaaataaaaacataaatataatggataaaaataaaaatattattccataaataatataattgatgtttttaaatattaattataataatacatttcatagtttaaggtattaaatttaaaaattataatttattatttagagatttattatataagaatttttatattaatgttaaataaaagatttatttattttataaatcttaacaagccctcagtaccattccgaaattcatccacatccgttggatgagtttcatgcaatcgtggccgtcctcataccgcctcagctcatattaattatatgagctggcagaaaatgatggtacagtactgaaaagtaaattttggtggcacagaaccaagttattttttgacatgtgatgtgatcatgtgaggatgaactcaatcatggatgttctctaacctaaaaggggaaatcaccacctccccataaattgcaaccaaagtcttcaaccacaaaccaatcaagagaaaggaaa

SEQ ID NO: 13621 - DNA, 1450 bp, Vitis vinifera
  Intron number 3 from transcript GSVIVT01019526001 (locus G SVIVG01019526001) derived from phytozome v7.0 (chr-ID chr2 ; pos 1344501 to 1345950)
taccagtcactgatttggtactaagttctctccaggtacactatcttttgtataccatgcgttttttctaatggattccttaactgtatttttaatctattcagtccctagttagctatgaatagttgtcaaaaattcatgatacatgataagatgcttcttttatgtaaatgaatgcccatcaatgctatatgttgcatcctaagtgcatcagttggacaattacaatgtataccacaacaattgaatgtctgactatttcttccatcatttttaagaaaaacaaaattttaactttttcttcttaaaaaggttcttttaaccattatagttttgttctgtagatgtgagttaaaaattttctctttgtggcacttacattcttactgtatttgtactctcttttttcttgtttttaataaaaagaagtttcttttttgtctttttctttttacttctgaggtagaggggataatagtgaactttagatttggatatgacacaaagaaacatatatgtcataaaaatataatgtagcactcaaacttggacttttttgaaataatagtatttattgttggacttactttgtggattgttgatgaatccatgcattaaaatcatatttagttaagccaattttgtaaagtaactctaatattcaattgttacatatatattatagtgaagttgattatatatttgtctatctttttattggttatatatttatttatcctttatgaaatgagatacacattgctttatacttggtctttgcaatatatatatgcatgccatagatgtatacacttttttgtttatttccctgtatgtgaaaaaaacttataacatataatgccacatgatgataatacagaaaaatagggaatggtacctggtacagtttcaggagtcaaccatggctatgactacttcactaatgcctgctgtatttttttcgtagttggataattacatgcacgattaatattccggttatgataaactctggttatctgctgcaaacagttacggatcatgttgagcacattgaaaaaaccactttataacttatttcctttgaacttttcctgcatggattgatagcgcatacatcttcttgcattacaattgccctgaaaatttcagcaggtggcttttctaatgtatccttagcctgtaaatgaaatttgttatttctgctctgcttacattcagttttaatatttggtgtatccatcatggatatttattgaaagtagaagattagcttgttcagttgtccatgaccattaaatgtgattgttttactttattctgtggttaaaaatgtggtagttttccttctgaaattcttttgtcagtgctatttcttaagttaaataatttgtcatagtttttatttttatcaggtcctgacaaaactacaataccttgatctttgggg

SEQ ID NO: 13622 - DNA, 6343 bp, Vitis vinifera
  Intron number 3 from transcript GSVIVT01023741001 (locus G SVIVG01023741001) derived from phytozome v7.0 (chr-ID chr1 1; pos 10442703 to 10449045)
ggttcaccaaaactgtcgatcttcagtcttgtcaggtcacattctttaccacatgaattgaccatgtccaattaattcattattaatcttcagaggcattcatatatagctagtgaattggggaatttggaattataatattttattataaataaagtatagaggaaaacaagaaggacaagagaaaaaaaatggaaaaccaccactaccaacaacaaaacaaacttgttctattatgcataaggttgttgatttaagagtctttgattgcatcaaaggatgaaaatatcgaaatcaatgaaaatatcagtggttcaattttatagtgttagctgtatatatctgtacataccataaccataatttggttgtttccttagggataataccttcctaatttaggactcccaattgtatatatatataagtattatttctctaataaagcattaggggaattgagaaataccttggttgatttacatggtatcagagccattggctcaaattctgggtttgttcttgggtcacagaataaaagtgacctggtagtgtcactgccttcaaagggggaagcgaggtgtcaagatcggtcggtacccgaagtccggcgacctgaagctgaacacgtgaagctcacgcgccggcgcgtggaggagtgtagcagcttcttttgacctccgactccagccagggtgatctcattcttggactgtcagattctgcccttgggacgactctcccttcgtcgaacaaatctagacgtcgatcgagggatcgcaaagattcatcgatgactgcggaatcgctgtcgctagtccggcgaaccctacccttcgattcaccttcctgagacgccttcttctcagatcccaccaccctctcacgccttctctccgccgccgaagcgacgctgtcatccgagatcattgaaagccccgacctccactgcccagaggagcgcctttttattgctgcttctcgggcctgacacacgacccacgtttgtcagcagccctgacgagacctctgtctccggctcgtgctgccgagctccagcgacggagccgatccagttgaactgctcctcttagaaaccggaccgatttgagtttcttcgcccaccttggtcgccacgacaacaatccattttccctcacaactttcagggtgagaaagagagggagtcaagggtttgacgcacgcttttgaccctttcacgcttttgacaccttcttgtaagagaggtacttgtctcttccttcttgctgtggtaaattgtaatttctggtctgactgattactttggagatcgaattttattgtcatggaagagaataagaattttgttgctgatatagtgcctattgtgtcaaaaataactgaacacaaattaaatgggtctaattatattgaatggagcaagactatcaaaatttatttgagaagtgttgctaaagatgaccacttgactgaggaacctcctaatgatcacactagaaaactttggatgcaagatgatgcacggttatttctgcagatgaaaaactctattaatagtgatatcgttggtctgctgagtcattgtgaatttgttaaagagctaatggattatcttgattttctgtactctggaaaaggaaatgtatctcggatgtatgatgtatggaatgcctttcattgtcctgagaagagagctaaatccctcactgcatattttatggacttcaagaaggtatatgaggaattgaatgcacttatgcctttcagtccagatgatagagtacaacaggctcaacgggaacagatggctgttatgagtttcttatccggtctcccatctgagtttgagactgcaaaatctcagattctttctggttctgacattggttctcttcaagaagttttcagtagagttctacgaactaagaatgtcccgtcttctcagcacactaatgttcttgctgccaaaggaggaaatgcagaaaatgcaagaatggtgaataacaggggtggaaacagggcatttgaaaatcgtggcaatgattccaatactattgtgtgtttttactgtcataaggctggccataccaagaagaactacaggaaattacagaatcgaaatcggagaattcaaactgccaatgttgctacatctgatactacgacattttcagactcctcagacaagatcgtcacaatgacagcagaagagtttgctaaatattcacagtatcaagacgcactaaaagcatctactcctgttagtgctctggcagagttaggtaaaacatgtcttgtctcctcctcaaacaaatggataattgattcaggtgccacagatcatatgacaggtaatcataaaactttctctaccttcagaacacattctgctcctcctgttactgttgctgatgattctacctatgagattaaagggtctgggattgtgaaaccaacatcttctattacgttatcttctgtgttaaacttaccaaatttggcctttaacctaatctctgtcagtaaacttaccaaaaatctgaattgtagtgtctcatttttccctgatcattgtgtgtttcaggatcttatgacgaaacggacatttggtaaaggacatgtatctgatgggctctatattcttgacgagtgggtacctcgaccagttgcgtgtgtcagtactgcctctcctgttgaagctcattgtcggttaggacatccttctctaccggtgttgaagaaattatgtcctcagtttgataatttaccttcattagattgtgagtcgtgtcattttgcgaagcatcatcgtagttctttaggcccaaggattaataaacgggctgagtctttgtttgagttagtacattctgatgtttggggttcgtgtcctgttgcttctaaaactgggtttcgatattttgttacctttgtggatgatttttctcgaatgacttggatttattttatgaagaatcgttcggaagtattttcccatttttgtgccttatctgctgagattaaaacccaatatgatgtgtttgtgaaaatattaagaagcaataatggaaaagaatatgtgtcgaactcatttcagaactacatgagtcacaatgggattcttcatcaaacatcttgtgttgatactccttctcaaaatggggttgctgaaagaaaaaacaagcatttacttgagatggctcgtgcactcatgttccagatgaaggttccgaaacaattttgggctgatgcagtttccacaacttgctttctgatcaaccgtatgcccactatagtgcttaaaggtgatattccgtacaaagtactacatccacagaaatcacttttttcactggaaccaagaatttttggatgtacatgctatgttagagatacaaggccttttgttactaaacttgatcctaaggcgttaaagtgtgttttcttggggtactcaagactgcaaaagggctatagatgtttctcgcctgatctaaataagtatctagtatcaacggatgttgtgtttttagaagacacatcctttttctcttcacccacaagttctacaagtgaggaggaggatgaagaatggcttgtgtatcgagtggttaattcaagaccaactgttgggcattcaagtgtggttgattctgatgcgtctctagctcatttgggtcctgttgttaatattcctcctgctccagtcaaaccaccaattgtacaggtgtactctcggcgcccagtgaccccagatacatgtcctgcaccagctccttcgtcatctgatccttccagtgatctcgaccttcctattagccttcggaaaggtaaacgccactgcaaatctatctattccattgctaactttgtgtcttatgatcacctgtcatcttcctcaagtgttcttgtagcctctatagattcaatttcagtacctaaaactgttacagaggccctgaatcatcctggttggaagaatgcaatgcttgaagaaatctgtgcattggaggataatcatacatggaaacttgttgatttgcctcaaggaaagaaagttgttggctgcaagtgggtctttgcggtaaaagttaatcctgatggctctgtggcacgactgaaagccaggcttgtagctagaggatatgctcagacatatgaagtagactattctgatactttctctccagttgccaaactaaattccgttcgactatttatttctattgctgcttcccaacagtggatgatacatcagttagacatcaagaatgcttttcttcatggtgatctagaagaagaagtctatctggagcaacctcctgggtttgttgctcagggggagtatgggaaggtttgttgtctgaaaaaagctctctatggattgaagcagagtccccgtgcttggtttggaaaattcagtaaggagattcaagcgtttggcatgaacaagagcgagaaagatcactccgttttctacaagaaatcagctgttggtatcatacttcttgtggtctatgtcgatgatatagttattacaggaaatgatcatgcaggaatctttgatcttaaggcattcatgcattccaagttccatacaaaggacttgggtgaactgaagtatttcctgggaatagaagtatcaaggagcaagaaagggatgttcttatcacaaaggaagtatgtgcttgatctgcttaaagagaccggtaagatagaagcaaaaccatgtactaccccgatggttcctaatgtacaacttatgccagatgatggagatcccttctacaaccctgagaggtatcggagagtggttgggaaactgaattatctcaccgtgatgcaaccagatattgcatatgcagtaagtgttgttagtcagttcacatctgcgcctacaataaagcattgggcggctttagagtagattttgtgctatctaaagaaggctcctggtctaggcatactatatagtagtcagggacacactcgcattgagtgtttttctgatgtggattgggcaggttctaagtttgatagaagatccactacaggttattgtatgttctttggtgggaatttagtggcttggagaagtaagaagcagagtgttgtatcccgttcgagtgcagaatctgagtatagggccatggcacaggctacttgtgaaatcatatggatacatcaactcttatgtgaagtgggaatgaagtgcgcaatgccagcaaagctttggtgtgataatcaagttgcccttcatattgctgcgaacctagtctatcatgaaagaaccaaacacattgaggtcgattatcacttcattcgtgaaaagattgaggaaaatctagtctctactggctatgtgaagactggagagcaacttggggacatttttacaaaagctctaaatggaactcgagttgagtacttttgtaacaagctgggcatgatcaacatctatgctccagcttgagggggagtgttagttgtatatatctgtacataccataaccataatttggttgtttccttagggataataccttcctaatttaggactcccaattgtatatatatataagtattatttctctaataaagcattaggggaattgagaaataccttggttgatttacatatagaaattttgattagtgaaaattaaagaaatcacgaaaatttacctcaaaatatggaaaatttgaaaaataaaacaattaataatgcatatattgaatttgttttttttttttaatcataaaatacaatatgtatgataaaattggtgtcattaatcaatattacaatatgcgctgataacaaatatgacctttgaaagtcaacactgaatattaacgtggagataaaattttattttatttacttctagtatttaaaaacattttatatttaatgccaaattatgacctccagagtttgaagatgatgatggaatacataagggatggaagccaaatgagaggaaaatgaggggggaacttatttataaaaatttggggtctaactggctgttagagctcaaaagttatcatcagaaacagtaaagataggccacaactggtcatgagggaaatgttaatattttcccaagatattacctaagtatctggaaattctgaagaaatcttgtaaattttttttaacctctctatatactcccaaattatcaatatttcaatggaaatatcggcaaaaatatcagttttttttttgtgtttgattgcatcccttgcaatacttgtttgatttgttagttttgggttactgatatttgtggtttgatttgccaccaggaaaatccccaattagtttaaaacc

SEQ ID NO: 13623 - DNA, 13277 bp, Vitis vinifera
  Intron number 5 from transcript GSVIVT01011373001 (locus G SVIVG01011373001) derived from phytozome v7.0 (chr-ID chr1 4; pos 29081220 to 29094496)
tcagtgcaatatcacttttgcaactaaaagacgaagttatttaaatgacatgtgagttggtatgtaattggagtgaagatgtttattttccattcttctttttcatgcatgttagtaatgagaattttatagtatatgtatcccttctttcctattaattactcaaatgtagcttttctatttgttttccaaagtgacaatagtgtaatgtgatgaaaaaaattatatcaaattgatacataatgatatgtaaactttgaatgattcataatggttaatctttataatgatccttctttggagaagaatccttctttttcttttatcaattttaacatatataccattttctcaattttaatattctaatcaatcaaattagtgatatttgttgtgaatgtgattggtagctattatcaaaggcatatgataaaattggggaaaaaacaaattgaataatttcaatatgattgtctctacatgatgaagttattctatttatttttaaaatactattttacccatttttcctatacattctctaaaattttgtataaaataaaattatttgattttgtataagaacacttaaaaatgttgatgggaatgtgaaatattaggatgacactcaaacaccaaatgacatacttgtgatgcaatattaagaaattatcataatattttacgatttgtctctactatgtagtcacctataaatgtcaattttaaaaatatttaatgatcaaagaaaattaagtgagatatgattaaaaaattctaaaaattttatttgcccattctagaataatagaaaagatattcatactactaattttattaagatgagatacctagttgatatagtgtccttgcttttacataaaattagacattagatttacttaaattattttcataatagtggcatatttataaaatatatgaaactaattaaattgaataattgaggtaactatgaatataagtaggtcattaatgctcctcgttttattgaaatattataaaagaagcattatttcggtttcatatctaaagttttttttttttttttttccaactccaattggtgtatatagatccgattttgtagtgcaggccggcagccaataggatttccttcacagaaaagaatggacacatgaactacacaaaaaccagaccaagaaatgagtgtggtgttctctcctgccttggctggaattcccacatcacaactgcccttcttcactccaaaaccaggttcttttctcttttcctgtttctcaattcccacaattctcattcatacttattgttatttcccccttgttcagttttaatatgttcgtatcctaattgatcttcaatgctcttagtcaagtccaagagttgcagattgattcttggggcgtcaattccattactaatagcagtaataatagtggcaagagagctcaattgccgggtcacaaggtcaaatattattattcttgtataaaagaaaataatttttaatctttttgttttagaaaaaataaaaaatagtgtggctttttcaaatatattcatcccacaacttcttatcctaattttccctaaaatatatgatagaatatttatcttatatattaaaaatatttaattacaaaggtcttttagtctttaaacataaacttgcagcaagggaagtggttgtcatggtctacattttttgcgatgctagaagacacagagctgggtgttatgcattgaaaagaatcaggtggatgccaatacaagagacttgagccgtgtactaaaaaagagttgcttgtcttggtgtgtttgtaggaaaaattgattattattattattattattgcaatgtgaaaaatagatgtactaagtgtagattctaaaatttgacttcaatttatttttagattttgaatttaattttattcttaaatttcaattcaattacacttgatttttatttcgatttacttgtgacatttaaatattattttatattattttattttatttttatttcatattttattttacctttttttcttcttttttgtttttcccttctcttccctcttctcgcttatcctcacatacccacactttccccccatacctctcacgtcaggagacacctctcctctcctcgcttttcctttttttctctctccattttttcttcctttttcttcccctcatttttttcctttctttctcctcatttttccctctctttctcttcttcctctcgcccatcactctacccacacctccggcacggcaccatctcccctactcccccatctttctccattttttttttctttctcaacccaaacccactacactacaccacctattgcgccagtcaccgtggaccagtgggcgacgccacctccgacagccaacgaccacctcccaatcccatcatctcatctctcgtctcatcgctttttcatttttattttattttattttgttttattttcacaacatacagcatccaacaaccttccttcatctccaaaaaaatgtgtaagtttatttatgtatatttttttttttttgctttgatttcaataataattgttagtaagatttgggattgttaattaacattaaacttggatccatttgttattggtgaaatttcttggataatatttaatatgataatattgtggtatatttttgttacattcagactttatatattaaattgcggcttaatttattaaattaggtttggatgatgagatattaaatttttacatttaattgaatttattttattttattacattttgagcttgattgattatgtttgtattgactattaagttagaattttgaactaaggcttataacatataagatattttttttgggctttatttattaatttaggcccaattttattgataaaatttattgggctaatttgagattgcttttgggcttattaaaaaactttgtacatttttaaaaatttattttggtctgatttttgttttgttgtgcccattcctcaatttatttgtttaataaaaattgttaagaaaattgatttttttttaaaataaaattgtccacaaggttaatttttaataaaattgttaaaaaatgattttaaataaatcctctttccttaattagaatgagattaaaagtaatttttcttaattggggttttaaataatttttttaatgagaataggatcagggtcattttcgtaaataaagtttgtaaagaaattaattcctttgtaactaaaatcaaattgaaatacttttctaaataaagttgtaaaaatccattcttttttttagtaaaagcaggtaaaaattatttttattgtcaaattaattttttttttaaattcttttaataatagtaagtgtaaataactttcttaaaataagaattaaatcaaatcacttcttgaaaataaattaaagcctttttggtaaataaataaattaaaatcactaatttgaaattatttttaatggactccttcagaatttctagaaaaaccaaattttgaaatatcaatttttaaattagtttaataaattaatttgtttaattctcatgtcatttgttttgtacattcttatgatatgactttgtcattatgtttatgtatatttatttgtgtgtccttaatcttggtattcataattaattaattaattaattatcataatttcctcgattcgtttaatagacacggtaggtatatgagtttagaggtatgttatgacttatcatcgtatcttctcaataggtaacttgaccctgaaggtaaacttagtttttgtagatatgtcttttccaaataaggaatcatataaagttttctttcttattttatctttttttaaaaaaataaattaaaataagtggcaaatccaattcttttataaaaaaaaataaaaaatttcacaaataaaaagtaagtcttacagttggagtggggacacatgtggaggagtggggacacatgtggaaaacacggtttatagtaaatttgaaaagacaatctccaaagttggctttaccattattattattttttttttattttatcaaagataagttgaaaaaatatattttataaatataataaatttatagggtgctaatggatgaaatagtcaagtgtatttacaacaaatctcaagaggtccaaaatatgtttttttttaaataaatgaaaaaaatgaatgaaaattaaataaaatataaaatataaacccttcatcattgatacaaaggacaaaaatttagaagaaaaatgtttcatcattaccttctctaattaaaaaaaaaaacctatatttgttttaaccataataatcaaagaaaaaaaaggtaaaaaaagaaaatggaaggtgaaaaatgaaagtttccggtcaaaatatatatatatatatatatatatatatatatatatatatatatatatatatatatatatatatattctaaattttcaatctaaacttgtgttaaaaatatttgtcaaaaagtagtgtgtccatacaacatcaagtttcactttgttattattattatttgttttaaaaccataattattaaatgtgattttagttttaaaactatattaatgagggtaaaaccaatattggtaactatggttttaaatttaaacctaaaaccataattgataaccgtaattttttatattaaacaaaaaaagttaagtgaatgtgtagacccgggaggagtttttggggattttctacatgattattcttctgaccaccccgggaattaagttgatgggggcggcgagattggacaggaaacagagagtaggtatgagcttgtagaggaagttttcggaggagggggactgctgttcgccggagatgggagcaaaagggtaaaaggaaaagaaagaaaaaaagagcagagagatgcagggagaggaaaaagaaaggggggaatgcagggaaagggagcgagaagaaagggggcctccagaatttttcccgagtaagcttttccattatgtttttctttctttctttgtttctcttcgtatattattattgagatgcattgttgttgatttctggatgggttatcctctgtccctcctggccggctgttcctcttttgcttatgtgtatgtttgaagattgatttaattccgttttaccttctctgggatattttcaaagaaaagagactttctgactcactcttcttcaagcccactaactaagagaggaaacatagttcttaatgtttcctttatttctctccttccattgctctgtttttgctgctattctctctgtttttcttgcttggtttttcccgaatgtgaagccgtaaaggggaatgggtctatgggatattatcacgcaactcaaccctcaccagtcaccattctccctttactgcatcttcttctcgatccccccatttcccccgctttctactctatagatcaaaactacgactacggcaaattatagaagcggatgctgtgttgaaagcccatctctatgactgaagctgctgccggtggcgctactactatccatgacctaccggatgtgattttgtcgagcatattggcgagcgtgaccggcaccaaggcaaggaacgccgcggcgctggttggctggaaatgattggtgtcggagaggggcacgcggacctccctcaccctccgtggcaacgccgttcacagcaatctgtacaggatcccgactaactttcaggccgtgactcaccttgacttctagctcatcttctttgccatgcctttctgatggtgaccccgctcactgtccatgctcgcactccggccactctccaactcctggctccccaatggctcaatctcacccacagcagccatttcgtccatcaaacagtcactcccagagatgaagcctgccactcatcaccattgccgccttcctcttcatcaagatctccgtccagcgctggagacgacggtgagaccagcagcgccggccatggcagcggcggtgcgagcgccagcagaaacagcaactgttggtttttaaaccagataattaaaagaaaaacggaagccaaaaaaattttctcaaatttttttttttctcaatgatcaatacttgtattaatttaatgaaataacaaatataggtaatttagaattgtaccttgcgattaggctgataaatttgaactccaccaaaaggatcttagaattccaaatcctctaaagcaccatggatctttctctaacgttctccaaaaaatgatgaactcaaaacgagtgggcgtttttcattcttgggttattttttttttatcacacaacttaatatatattgaaaacttgtattcttatcccatcatccgagaaacattgagaaaaaaaaaactttttaataccacgaaataactgacatattttgaattttgaaaaacatgggagagaatatctctccccatgatccccacttaaaaagtgtttcttagggaatacaagtaagtgtggtcttcaccacattgtatcaaaaaatattttaaataatcatattataaaataaataaatcaaatcaagattgtgtgaaattaatttagaattcaaaattccaaactaataaaatcaacccaacataaaaaaaatgttcatataattttaatggagccgttgagaggaactatggacattataattttaagctccaataactttgacaattaattaacaacttaattaaaaaatcaaaattattaattccaaaattactccactaaaaatttggaattgcactcttaaaattataaaattaaatatattcaaaggatttgaattgcccattgatatagtcactacatacgagtcaatcctccataaacggttcataattaaagctaggtttttccgttaacctctttaattatatctttctccttaagtgtcattggttctctaatgaataatatatttatggtctaatcataaattgagcgctcttatcattcaaggcccgaaccaatacttatgggaaccgtccatctgacttcttaacgaaggaatggatttcatcttgtatattaatattcccggctatttattttattatacttccaatacaccaagaatttgacactatgtatttgtgtcattacccggtatgtaaaaaaatacaatagaataaataggagtctattaatcactcagaattaagatcaatgcatatatgaccatcattgattaatattgaatgctctatattataacggaatttatcagagattcataattaatcgtgttccagtcctatataatcaaattatataaagcgctttcattccaataatctcattattaacaatccggataagatcatttcattcagaatgtaatgaaccgcgctagtaattttaaattaaagatcccaactttaatttttaattacgaatatattagattattttactttaaatattatcctcttgtatataacacttatatacaatatttaaagttacaattaaataatctagggttttcgatattcataaagcatctataacatgcatgcaacaataatattgaaataattcctaaaaaaaatattaataatcagcaaaataaaaaacatctcatttgtttatgggcacatattccaacagcaacccccacctctattccttcataccatcatggccatcattgacatgaaggccctatcctccccccccccccccccccccccccgtgggcttgctatcagttggccaccctttttgttcttttaaaaataaggtggcagcacctctagatcttcatggtggatgtttggctggtgggctttgttggtgggctcccaaagcccaggttgtatgttaagattagttcacatgggccttaagccccatcccccaagttcgggccaagtatacagccctctcgagtcttttcttttaatgttataaatatgtttttcctatgaagattttaaaatcagctgtacaaaacatcattttcgaaataacttcctaaaatttaattttaaattcagtttgcaaaattttgattcttgaaaattcaatcccgaaaattcccctatgcaattatactcgtttaaatattaggattattaattattattattttatatgtatcgatttatcatcttttaaaaatctcattcattaaagtctaatccttcaaaaattctatgttttaatttaaattttcaattctaaaaatttcacaatttgtttaaatcccattttcatcaactagaattatcctcctatatttatctatttaaattctaatccttcaaaaattccatgttttgatttaatcttttaatcctaaaaattctacaattaatttaaaccttactttcatcaattagaattaccctcccatatttacttagttatttaaggtctaatatttcaaaaatcccatattttaatttaattattcaaatattcgtttaaatctcattttcattaaatagaatcaatatctcatatttatctagtctaatatttcaaaaatcccatgttttaatttaattcttcaaatattcgtttaaatctcattttcattaaatagaatcaatatctcacatttatctagtctaatatttcaaaaatcccctgttttaatttaattattcaaatattcgtttaaatcttattttcatcaattagaatcattatctcgtgtttatttagctattcaaagtctaaccttttcaaaaatcccttgtctcaatctaatgtttctataattcattttgaatcttattttcatcgattagaattattatcacgcacttatacacttatttaaagtccaatatttcaaaaaccccatgtcctaatttaatttttcaatcctagaaattccattattcgtccaaattttatttttgttaattagaattcttattccatatctatttatttatttaaggcccaattctccaaaaatccaacttctgaattaaattttcaatccaaaaaatcctactattcatctttattcgcctaaatattattcttgttaattagtgttataatcccatacttatctatttattcaaagcctaatccgtcgaaaatccaacgccctaatttgattttcaattaaaaagattccgctattcatttattcgtataaacattatttttgttaattagcatcattattccatacatatttatttatttattcatttcaatcattaaaattcaattcttcaaaatcggatttccaaatttaatctttagactaaaaaatttcactattcacttttattcattcaaatatcatttttgttatcattattataaattccacgtttacttatttctttcttctaaaaattccaataattaaagttcaattattcaaagattcgactttcaaacttaattttcaaaatcccactattcactttcatccgttccaacatcatttttgtcgaaattcgcatttcaaattaatttttaatctcacaaatctcactattcactttcatccgtccaaatatcgttttgattaattaataacattgttccatatttacctatttatttctcttaaaaatctcaatcattaaggtctaattcttcaaaatttcgatttttaaatttagctatttgaaactccaattgtccaatctccgaacttaattttcagtttcccatgctccaattcccgtatttatcccgctacttattattatcattatcattatcatcttattcattatttctataaattctgcattcgaatgatttctaagatttccaatttttacacatcaactttcataatttctatttctcaaataacttacgattctgatctctttcaaaattcaactcccaaagtctcaattttcgcaacttaatctttctttaaaatcccgaaccctcaaatcatcttcaaaattccaacctctttcaaattcagttcctaaaaattctcattctcacattcaatctctaaaagtctaatctccaaataaactctaaaactccaattttctagtgaacttcgagattccaatttttcaattaaatttcaaaaaatctgattttctcttaaatagcttaattccattctggtcttcaaaacaatcttctgctcctctgttttaaaaaatgttttgaaataaacaaataatcaaattttgtaattctgaataatggaatttacggatttggtccatttgataaatgggtattggtgggagcccaacatatgcgactttataactgattgatttagttgtcatgcatgattgtttctattctgtcctatgacatgcttgaaatcattctttaattgtgcactaacctcactttttgataagcgcattgtggctcgtcactcaggtacgtatctattcccattccggtatttccatatacatgttttgattctcctatgtgcatgataattccgggtattcattgttttcctcatcaattgccatgattgctttattttattagtagagacccgactttaggggcttagaggggtgctacggtctttaccataccttcctgatgagtaacttgacccccgaacccgatccagtttttcatagaccaccttttccaaaataaggagtcacacttagggtttttctttcttattttgtttaccctttaaaaataaaacaaaaataagtggcgactccaagtcatttttaatcaataaatcaattttttaaataaaaatcgagctcgtcatcaagtgggaaacgcatgagccgaaatgcggggtccacagaatgattacgttattacaaaggttagattggtaaatattttgggagaaaatctattttcattattttttttttcaaaagcacttgagaaatgatgtaagtatattaatttcatacgtgcacttagttattttttaaaatttataaaaatattaaggtaaggatattttagttattatgctttaaaaatagtaattatgcttcctatataaaataaaatatattttaatctttttattttgaaaagaaacaatggtgttgtttttcaaatatttcaattctattacaccttctcccaacttttccaaaaatacatacatagaagatagaaagagtttttatctcatatatttaaaacatttaaattaggaaggttttttagataggaaataaaatcatattaggtgatgaataagtgaatataaattgctttttttttcatacgtagaataggctgttattgtctagtttttctgttggttagaagacagctaggtcgacagtcagcaagagaagcccgtggacaccaatatttttaatctatatttaatatatatatatatatatatatatatattattttttttgaaaataatttctccacaattaaatattatatatgtttttaaatattagttcatttaaatttaaacttgtcctcatttcttttgatgatatcaaatataaaagataaaatattattaaaattttgaattatatttatattttttagttttttataattaattaatttaattttatatttataacgttactaatttgaccatggttcaattatcagctctgatcaataaatcgtaaattggtaactttttttattcaatgaccagattataaaaacattgatttgatgtataaaacaattttaatatttaaagtaaaaattaaataatatgttttaagttaataacataattaaaaataacttaacttacagttaacttaagtcattaaataataagtattaagttttactagtggttatctaaaattttaaaagtggttttaagaatttgtcaaatacctaatttttctcataaaacactttcatatatcacatacgagacacttttaactttctcaaaatcattctcctgacatacttatataaaattttacaaagattttttggtacatattttttgtaatttgtcattgtttacattgggttgactcatctaagtcttctgcttggtcttttaggtaaacatggcatagcttggaaaattatatgaatgaatccatcatttatctcaacatcaatatttttttcttcaaattatttgataggaaaccttggaaaatattgccttgaaaaatatggttgcattcccattttttccacgatagtagaggtctcatattttggctatgaaccttttggaaaatccattattaaaagtaaacaacacataacttaattgagtcattaaattatttaaaaatagtttttcaaaggttcttcgaaaacttcacattttcattttgatttataatgtctaaaaatcttatattacactataaattcttttaaaaatatgctattaggagtaaaagaaacaagaaccttatattagtattgtagaaaacaaaaatttaaaagaaaaagtttctatctttaccttttgaaattagagaaactatatttgttttaattataagaaatgatggaaaaatagtctgattgaaaaaaaaaaaaaaaagaggtaaaagagaaaaatgtttgttttaaaacataatttttaaatataaacattaaaatatcaaatgtattatcattaatatttgaaattatcaaaatttgtgaggtaataatttcattttgttctccattatgtatttatgtttgtattaaatttatatatatatatatatatatattatcattttgtgtttaatggtacaatatttttattttttgtctattatgtatttatgtttatattaaatttgttttattaattatcttttatatataaccattttttatttaatgtgtttaaaaaaaattaaaatttaaaagatgtaatgagagaaagtgtagcgagaattaaataaataaataagtgtcaaaaacttagataaggtaacatggaggagaaaagagaaaaaaattgacttaattgtgtcaaaaacctgtaaaggtttttgtgtgaatctcattctttttattccatttcttctatcatctcttataatttcctttttcatgtaagcacagtaaaagtttaccaaagttgcgattaattgaaaaatattgccagttcacattttgattcattcatgatgtttaaatgttttgcatgtatttgggttctagcccttccaaaaatccactaatttttgtgctttggaaaatcctcacctaattcatattttttgtgttctcattcttcattaagttagaagacaatcttagtgagtgtca

SEQ ID NO: 13624 - DNA, 1356 bp, Vitis vinifera
  Intron number 10 from transcript GSVIVT01028685001 (locus GSVIVG01028685001) derived from phytozome v7.0 (chr-ID chr 7; pos 12066276 to 12067631 reverse strand)
aagttcctgtggacaagattggagaagccaatgtgatgattatttactttgaccttcttttttggtcactgctctattgtaggttttcagttatatatttgtcatgctattttattgttttatctgttggtggtagtgattatttttctttctttcccctcattttaccatttaatttgtcaaaatagatggctggttggctatggtttcttttgtcttcaatttcaggattgaatttcctgttacttatgtaaaggtacctccatttgatgaataagaaggggaaatttttgtatgaaaggtagaggaacagatacattgatggtatagaattggaaggtatttagatgaattggaaaggaaaacattatttgtaaagatagagaagatacaaaggaaaggaaggaaaaaagatgtaaccatggacaactgtagatagatggtttggaacactgtagacatggatcaacagtatattgtcctagctcattggtttctttgaagtgtcaatttatgctgccattttgtcctatattcagttttgattttacctatcacaaaagggaaaaaaaaaaaaatttatatgccattttgtgagctatgcagcatttagtaaatatgctattagatctttactatttcaaagctaaatctggtactacattaacttgcggaagcattctaaatatttcatgctgcattctattttaaaggtggcctatagatttttcttctttaatttttcaccaactgttgggtttttttaatatatttaaagcaaaaatgaattctttaaaggacttgggaggctgattaaattttttaattcctttagtggagtaaaaaatgcacttagatattattagattttgttgttttctgattgtaatgaataacaatcagtgtctcctggattccatcggtttgttgatttaactttcaaatttggttgcataagtatccttgcacacgtcattcttctgtgacaatcagacacttctatgatgattgaacaaagcttttgcattgtagcttctgataagatgcctaccatcatgtttgagctgaatgatttcatcatgtagctttagaaggcttcattgtctggagttattgatatagattgcaaattgggctgtctacctatcataagaaaaaaaaaaaaaaagactgcaaattgggttgtctgtgaattgtcataagctctgcccttatggtctcttcatggtgatccatagatacattatttcctctgaaacatcaaaattttctcttatcttttgtgatatatagtactcacagatgtggtggtcttgggcaggaggctagcaaaaaactggagcatcctggaaaaac

SEQ ID NO: 13625 - DNA, 7392 bp, Vitis vinifera
  Intron number 9 from transcript GSVIVT01018572001 (locus G SVIVG01018572001) derived from phytozome v7.0 (chr-ID chr1 6; pos 13224345 to 13231736)
agattgctcaggttatttgtcttcatgttcaatattttgattagtattaaatattgtatgttataatttacatgagatgaggtgctgtagtttgattttgtagaagaatgttttatgtgataattatttagtgaatatgttagaatacttctatcttctgaatgtacttatgagaaggccctttaatcaagttatttaaattttaacaattctctggaggaagagtctcctgaatatcctggagaagattctctctagcaggcattactctaatacacaaggccagagatatggtttgtttggttttagaaagatgggatctatgatcagacatgaagatggtccattagtccatcttgtacagggtttcttttcttgtggtaactagttaattattgtaccttaaactctttatttggattttgagttcctctgttatatctaaatgaatatacaaaccatgtctaagtgcatcactctcataaccaataagaattctctggcttgatgtgcttttaatttattgatgcttatctaccaaaagaaatgaagggcttggttatgtaagagtcaccacaagctttgaacctcatgttttatacagtgcttaaaatattgttgtataatgatttttctttaatgttttagctagtgactgccaacaagtagctttgaaatccccaaacgctaactggaagttatctgtgccatattgattgcatgctagttatttcccactggaggagatacaactgacttttggacacaataggctcacactcagaattaatgttgagtcctgttagaagtaagaaattgtaattttagggttcaggttatgcaaaagaagaagaaagcatagaaaaatttaggtttgtctaactgaattccttacaccttctcatcaatttatattattcaccatgattgtaataatgccatattattgtatatggataagctaaactcaatgtctgcagctctgaattgattaaaccaagcataaaattgttcatttctagatcctagtgaacttgcacttgtgatttaggaggtgaaggagcaattggaattgaaagagtaatagaacataagcactccccgtaacaagtggatataaggtccagtgacaaattttgtcttggtactcgctaagtaacatcaacaccaaaaagctgatatcatcacttacaaaattattattgtcttagaattgtaacaatggttacttttttgagtatgagtatccaagaaaccacaattgtaagtatgaggagaaggtttttcacccttgaggcctagctcaggtggtaaacggtcaaggagggttagtgggaggttctaggttcaagtcccaatggggataaaaatttacccataaaaagaaaaaatgcagagaaggtttgtcgcaacaagggtctagattatgcactaagataacacaaccaaatacctgagaagcgagttataaaaagaaaggcctggatgtaaaaagcaaaaaggggtctgattgttaataacaacatatggtatatgattaatgatgtgccttgatgtgagagtaaatgatagtacattttcatacctatatatgaaaaaggtatgaacaacatttagtaaatgacaatgtttttccatagcaacaccatttttttttgataggtaataaaatgggcttacattaatagtgcctaaaagacagcgaaacaagtacacatgaagtatacaaacaaagcccaaaaaaagctaggtagtgaggagacaaaaaaaagccttctccttacctaacaaacaaccaatctacaaaatcaattaaagacaacgtgtgatcttctacatacacccttgcccaattcacaaaagtatacatgaaaatagatttaattgcttagtcggactgcttgatgtcattgaaagctcttctattcatttccttccaaatagtccataagaagcataaaggggcagccctccatgctttctcttgttttttacccacacaagagtcgtgccaacctaacaaattccttctaattgaggaatgcataacccactgcacaccaaaaagggagtaaaccgagttccacaacatcctaacagattccttctaatcgaggaatgcataacccactgcacaccaaaaagggagtaaaccaagttccacaacattctagccttgtcacaaaaaaaatagtaggtgatttgtagtttcctcatcttttttccacaagtaaaacctatttgggatattccaacccctcattttcaactgattaagagttgagaagtctactccaagatgctttccaagcaaaaaaattgatcctcattggagcccatgaccttcaaataatactaaatggtaaagaatctctagaagccctagtataggggcaataaagagatctaactgaaaatttgccgttctagctttctctccagcttagaatgttctccacttcccttctaaaaaccaagggttgtagtttatgaaacaaaatctccatttctcccaactcctagttgttaagatgtcttgaaaagtgagggctccagatacccaaatcttcaccctcctcccatggctttgaaacccaattgtctttgtttactaccaaaaaaaaaaaagtcaggaaaaacttctttcaaaatttggtcctcgcactacaagtcttttcaaaacttaacccttttcccgttcccaactataaagcgagatttacttcttacacccttccattcatttctaatggttttccacaaccccacaccataacctcctctcactcctctcgaataccatccccgttcttcttctctaaacttcccattaatgatttgcttccctctcataagcaaatctctaactccacttattgagtaaggctttgtttagggaaataaggctacaaattccaaggcctccctcatctacatgaactaaatttcaattcacaaaatgaggctttttctctagggcgtctctgtcccaaaaaaatccctttggatattttcgagtcttgaactcacctttctaggaataacaaataaagaaatgaaataaatcgggagacttgataagtagtttttgatcaaagtaagcctcccgtccttagaaaggtattgcctcttccacattgttaatctttttctaaatctctctttcattgcatccaacaccgtggaagatttaaaagaggcacccaaaggaagacccaagtaggaggtgggaacttcccaactctattacccaacaccgaagtaacatcctccattgttgcaacccccttacaggaattacctcacttttatccatattcacttttaacctagagattgccttaaaccacataaacacctaactcagatatttcaactgatcactattggcctcgcagaagattaaggtgcaaaagcaaaagatgggacatccattccctctctattgcttcttcccgccttaaactcaaagatgcaaccaccacttctcgctctaaacaacaattggctaagagcctccatggccagaatgaacagataaggggatgatgggtcaccttgcctcaagcccttagagttatgaaaaaagatggaaggggttcagttgacgaggacgcaaaagcttgttgtggaattgcaccattttatccgacttatccacctttgcccaaagtcattttagtcaaggctgccagtaggaaatcccaattgacgtgatcataaaccttctcattataaatatctttaaagggagactgggaatgctgccctttaacctagaatcaattgccttactagcaatgagcattgcatccaaactctgtctaccttgaataaaagcatgccgagtatctgaatgataccatgacaactagtacaactagtttgaataaaaataaagaaatgtatcaaaactactagtttgagaacctattatgttccgatggactatatggtaggcttcacattcaaatatggacacaagaagaatgccattaaagagttaaggctgtgacacttcataccaagggagtatttttgtgtcccccccccttcccccccttttttttgcttggtttttgtatatgacccatgtacttttatacgcattttgcgttcagtaatacactcttttcaaaggaaaaaaaaaaaaaaaggttcaataatatagttatatttctaatggcatgaaccaatcatcctcttcttcttgaggtcttgggaaatgcatgaagtggaacaaaaggttaagaaacaatttaagattttagccaatcacttacagaaagcaaactaaaaggaaattaagaacatagactagagagtaactgtaagaacttaggagagcatagaaaccctaagagttaactccatagtcaatgacctttgaaggaaaagattgggctacagatgtattattacttgagttggctaaagtagcagccaaagaggatggaaatggaatgtggaatatatgaatgaactcattaagttgagtagtgaatgtatcacgagagctagagtcacaaaccacatgtccagatgtatcaaaaggctatatagttgtgacttgatgcacgcaatccggctcaccatatttcacccgacaataaagctcggtatcattggtattgccacaataattacacttctcttaatcatgttcactaatacaaccatctccactatcatgaaaaccatgatcgccatgagacaccagtagaaccacaacaactgccaatgtcaatgattaaggcagaagattgtagagggcccacgatggagccttgtcgtaaactggaccttaatagcagagattaatagctattgcagtaagtagaatctcactagcaagaatatgatctttatacccacaaaaattagagtctaaactagataacgaggaagtaatcctaaactttcttaatgacactcttactgctccaagctagctgtgaaagattgatataacagtaactaatcccacaagattttaagggtgctttaatattcagatagtggttttccagactgctttctgatgaagattttcacacagagctcagaaccctgagagacgttactttgttgtgaaaaagtttagccctaagtcttcttagtagtatcaaagaattcagatactgttgaaatgtgaggttccaagccatgccacggtcatctaagaatgatgcagttctcacacgtccaatcttcatactcttcagccttaatatgtaaggtgggctatctgtagagtattttaatttcctctgtccacatggaaaaatctggaaaacatgggccaaagcaaggtaattagtaccatgcgatttctttgatgtaattgacttcagtaggctgtcattcttgaggcttctaatttattttcagctacagggaaattttgtaatcatgatctctagttttaagaacatgagagctccaaactgtgaaaacttgaattagctgaaacaaaaaattcaaaaaaataaaaaagttaaaaataaaaataaagaaacaatctgcaaaacatcaaagccaacctgtcgaagcttcacataacacagaaaacatagaaaacaatcttctaaatgccaaagtaaatctgtccaaactttcaccaacacatgaaccagcaagagcaagctaccaaacccctcttaagccatgaaagcatgtcaatattaaaaaaatcagcaaatcactcttccctaggctagatgctttatataggaagaatcaaagccagcaagagccaaaaaagccagccccaaattctagaatggaaacatgaggactagaattactggaaaatagcaccatcataatcataaaatcagtctatgcagccattgaaatttcggacatttttgttttgtttttttttttctggtttgtttttgttggggaaagtggggatgatctacttggtataaaataaacactaggatatattatctagtgccaacttagaaataagaacttgtaagatttgggttaaggttaggaaaaagaaaaagaaatacaagggagaaaaagaaagtacaaaaatgtttggatttgtttgacttgatttctctgcaccttctcatctatttataatattaatcaagataagaataacacctcaatagctaataaataaaataagtcttagcataatataaaaaaatagcatataaactcttacaagtcaatatcctttgccctaagatatgaatgaactttctagaagaattcatgaagatatttcatggtgtatactgtttgttgatggtatggtttaatcgaggaaactggagttacagttaattctaagtgagaaccatggagtggttctccagaatcaggttttagatgaagcaggagcaaggcagattatatgaaatgtaatttagttaaataaggagtgaagagagggtgaagagtatgattttttttctagagagacccaaaatatagttcttcataatgtttaaagtgcatttggtgatgcctagctctttgagagatttatagatgtttgggtgtcttaagtttgaaggttgaaggtgaggcttatgttgaaggaaactttggttgatagatcatttgattaccaggaagcatatgatttcctaatgtcgtaacattttttcaaatatcaagaggaaaatgatcaatcattaacttgtaattgtccttttccttctcttcttggagggtgtttcttcgaccttttttgtatgcattaggtgatgatggttgagagtatttaagggaggaggtgtgatgcaagtctgttcagtgaatgctattttaatttcctagagcacttgtttgagttaaacaatgtaaatgcaagtgtactctaattggatttttattttagtttcttttttaacactgagagtcatgtcctttatgatgggataggtatatttctgatgataagaactggttttttaggggcagtagccttcatatatcttcaagtgatctgggaaattgttcacctcctatttttcatgcaaatatagtgaatgaaaaagcttaaggtttgtaacctactcaaagatattgcccttagaagtcaggaccatgatcctgaaacaaattcaatcttgagtgaactggactaaacagtcttgtggctgtacacaaaagtaatgttagctttttaggtttatgaacctctttcaatggatgaattgaatgcatgagaaagtggatcctaaaaatagtaactgatagattgccattagattagctgtcatgagctcattttttcttcttatatcacaggctacctgaaaatttatctaaatttataaaagaaacagataatttagtaggaaagctgtctttattatattatgagtcattgatgttccttatagatgaatgcagata

SEQ ID NO: 13626 - DNA, 877 bp, Vitis vinifera
  Intron number 7 from transcript GSVIVT01019071001 (locus G SVIVG01019071001) derived from phytozome v7.0 (chr-ID chr4 ; pos 17099286 to 17100162 reverse strand)
agtatctgttccaagttaaggtaagtgaaatgggttccataatttaagtgagaatcctcgactgtcatgcctctttttatgatgtgcctgcaaggttgtttctctgaagttcttcacattctaatactgtatagcatacatatcttgtgtaaaatttagtagttgaatatgaactcaagcatgtcgctctgaaactgtgcttacaccaaagcaaaaataggttcatatttatttctaaagcttcttcttgtaaaacctttggattctgaagtctttccagagttatggtttaaaattaacctctctgttaacaaaaggatttccaattttgtgactcaagtggaagatttccagctttgttcagtcgggtggaagaccaaaaatccctcaatgtataccttgttgtgtgtgcattattcttagaattggttgagttgcttaaaaaatcatggcatgtgaagggcacatgctttcttggttcttggaaataattagtgtttgaattattaaaatatttatttgtcattgtgatttggaccattacacatactggagaggcagacaaacatgtgctaaacaaaccaacttgaacaccagaaggcagagcaaatagattgagaagcttgaagccattaatcctgcacttgaaagcctgataccatgttaaacaaccactccccctaaaatctaaagctgttagggaatgcgccaacaatatgtatgaaactaaaattctttattctttgtttatgattgtcaagaacaaggcataatcatattaaacgacaaagcttttccttagtgttttttcaactaatgtgtttgttacaatatttgcgcaggagtttgagtggtgtattggttggcagaacagtgg

SEQ ID NO: 13627 - DNA, 1664 bp, Vitis vinifera
  Intron number 5 from transcript GSVIVT01016380001 (locus G SVIVG01016380001) derived from phytozome v7.0 (chr-ID chr1 3; pos 4352369 to 4354032)
atcaaactcttctactggtaaaaataactgaatctttctctataagaagtaatgattctttttatttatttatcttattttattttatttttattgacataacgttcttaaagtgcttatgaaaatttggtctttttctggtgcatgaatcttggatgtaggtcttgtttgggccttcttccttgtctttaataactgttatataacttgcaatggaatatttataaagtacacccttaagagagctgttgtcattattatgaaattgtgcagtagatgactttggtcttctgccttggtaatattttgttggaagctagtctcattgtacgtggctttgttgtggatattcattgattttctttgacatatccttactagaaaaagtgtcttagtaagagaagcttgtcttagtttactcaaaaggaaaggaaaatatattgtgttaattctctcttcttaattcatagtattacctaaaagggttgaaaagaattggtagtccaattttagtttgatttatggcctcaaactctattttcttgaaccttaattattaatcaattaatttaaccagaccaatggtatccaagaatatgtcaagtataaaaggaataaccaattgcagataatgaacaccagatatatgtgaaataccgcctacagaatatcgactgaaacctttgcaaatgtaaaaaatcacaggtttattgaccacaaaaacaatctcctatatatgaaagaagagtaacagttttacctgattcagaggttaccaattcccatgagacttatgccatcctacacctacacttctttgtctccttagcacaaccctgctcgtgctcctcagtgaatcacctcaaaactgtgttaaggctaaaccaatcgaaaactttaaccgttgcctttatatctaaagaactttcctgatctctttggaaggtttctgtgagctttggatctaaggtaatggtgaattgttacttctttttttcttttttttctttgcaaggctctcttgaaaagttattttctttttgtttttctatgcaagccctaatttttactcatgtaactttaggaaacattattttcgaaaaaaaaaatattctaagaaaaatgtgtggtgcttgagtgccatcccatggtggcactcaaagttcaagcatccaccttgatttcctctttttttgcgcttaaatttacttgattgttcccaattgctttcaagcatcttttgttctccttttcagcttgtactcgaatctttgattgtagagtcttcgacttattcttgaagcttataagtttcagtggaagttaagtagtttctggagcaaaattgtcaacttaactattttattaacatattgtttagctctacactattagattgataatgatttttatgatatcatttgatgtagttttctatctattcgtaggttttagggcagtctttttctcattaacaaactctgagcccctgtaatgttgtcgtgggatttcgggtgggggtggaaggattagggatggggagaaccaagaataagtttatgcagtattgatgttttttggaagtactaagggatatagaaatcttgcattttttcccttgtcttgcaggtcctcaaacgggtctacacggtaacaaagctaac

SEQ ID NO: 13628 - DNA, 1069 bp, Vitis vinifera
  Intron number 3 from transcript GSVIVT01032322001 (locus G SVIVG01032322001) derived from phytozome v7.0 (chr-ID chr1 1; pos 15060620 to 15061688 reverse strand)
tctagacctcttgaacctggtgaaggtatgcataacataattggtacttgtcaaaatatattttaaggggatatttggtgggggcaacatagttgtgagcaaattgaaaattcccccaatttcaatgtggtttaatgcaagaaaaatttgtgaatcatttgttttactttgatgtggatagtatggtgggaaagaaatgcaaggatctttgaggactagtggagggaaactgaaatgttatgggacctcatctgcttctatttatcattttgagtatcaactactaatgttttcaagggcattcctctcagggttattcaacttgattaaattttgatatgtagtttgaaagtgtcaaattagtaatgttgagacgtttggatgtcttttggtttgtttttgttttcctttgttttgattaggtttgtatttaaagaaggatttctcatccttttcaattttactttgctaataaaatctttgttgtttcttatttaaaaaaaggaaaaaaaaattgcaagaaattttttaatttatatagcatttgaaatgatttatttattgcatgttttcaaaaatgattgaatgcctttttgatgattttgagaaaatagatgcttattggtttgtttttgttttcctttgttttgattaggtttgtatttagggaaggatttctcatccttctcagatttactttgctaataaatctttgttgtttcttataaaaaacaaaaaaaaaaaaacaaaaaaaacaaaaaaaaatgcaagaatttttttgatttatatagcatttgaaatgatttatttattgcatgttttcaaaaatgattgaatgcctttttgatgattttgagaaaatagatgcttattctttgaaattgcacaggaaacataatggtttccattggagatgtttcttaaaacagagccttaaagttgtctggaaaacgatttttctattgcttttgaaacatcttgggaaaacctgttgttttacattcttcaggtttatacattttttaattcttgcaatgacatttatatttgctgcagtgaaccctctatc

SEQ ID NO: 13629 - DNA, 21737 bp, Vitis vinifera
  Intron number 8 from transcript GSVIVT01000394001 (locus G SVIVG01000394001) derived from phytozome v7.0 (chr-ID chr1 7_random; pos 626224 to 647960 reverse strand)
aagttatcaaaaaggtacacatgtttgaacttatggctgtctagttaggttgatatgaactacatttttgtctttccttattttgctgggggtagaaccattgcttcttatttattatgatgtccctttttttgtggttttgataaggaggaatatgttgaaaaataagaaaattatagctataagctgtaaggataagggatccctaaaacaaaaaaaggtgttctatatcttagggttaggatcacctcctaattgaactctattaatctcccattgctgaagctgataatgggagagaaggagctgcaagatgaacgatcaaggagctgggacaaactaacagccaacttgcacacattatggcaatgttaagagatagtgagacaaactttaggtaagactggcatcaggaagcatctcaccatcatttggcccaagttttggatgaaattatggagggagattggtgggagagaagaggtaggggcacaggataagtatttggtaatcaagctcaagcaatcaaactggctgtatattttgagctttgagggctttggatatgctaccccaatacccaaaaaggaacataaagaagccaaaatctttcatctgaaaaactggcccgttagaattccttggcacattgaatatgagtgggatgatcctgaaaagtgtccatgccactgatttaaacaagtaggatagtatgccagtgaatcaagtggtgagtgatcatggaaaatattgttttcactaaggcgaaaactagcagatggaacagctggacagaatttctcaaaactgagcatgaggtacctgtttgagactatgaagatcatagtgaagactactagtacggttggaggtgagagatacctgcaggcagtttcatacagacttccttgtaaatattaccatgaaatttttatttttttgatcttcgaaaaataaaaaaataaaaaagagaaaaacaaaagatcaccatggggaacgcattatcttcatggtagaacttatgtattaaactcttattttgttaaattgaacttttcaaaactttttagtattcaatgtttttatatggttttattttaatcctttaaatcctattgtctttcatgaacttagttatattactcttcacttcatgtttgtaatacatatgcattacatgcatgtacacatttttttgtatttattttccatcatgtaaaaaagcatacaacatatgatatgatacaataaatgatgtggaaaaatagaaaaacaacacaccatatgatttacaagttagtaactaaaccaataagcatacaaacctataattttggcaatttgagtaaagtttcttttgggagcgctttttagaaaaacacttctagcctgtagcatttttattagtaacacatagctgtgtggatataaaccagggaagcactttttgatattgcttaatgatgattttggtaatgtataaattatttgttatataacaaaaaaagtacttagttttgataaattacaaaaaaggacattataaattttatttatcattatcaaaattcttcatatgcatatataactggatgtatttgtgtatataaaattgaaaaaacaattttttttatgaatttttttttttaaaaaaacacttataagaagatttacaattagatcatgttccaaaaaaagggtgtagaggtgaaggtttgcatttatagtggtggctattgacatcactagcagtcatagagagataagggtagaaaaataaaattaattaaagctggtacagggggaactcaaatagggtagagagagaattctagtagaaagagagatttttagagagacaaagatgtatttttgatacatgaacattttatttgaaatcaaagtccttcccttgtttttgatatatagtgatttttgtaaaaaacacccctcaaagtcctttccctatttttgagagataaagaggtatttttcatacatgaacattttattttgttggttagatttgtagatgattgtactcattctacatgtgcttaatttttgaaatctaaatcagaagtctcatccatatcttctatcttccacaatcttattcaaaactaatttgggaccaaaatagataccctttgagctaataatgggagggagtacttcaaaccaaagtttgattgatccggacaattaaggaattttccatcattcttcttgtatagacactccccaacaaaatggggttcttgaaaggaaaaataggcccttattcgaagttccctgtgccttgctattcgaacaaaacattatgtggggatgctattttaatagcctcgtatttaataaataggatgccttccaagattcttgattacaaaaccctaatagaaaaaatcagtactctttttccaaattttcatcgtattgggaaattacctccaaattttttggatgtatatcttatgtacatatctagagccacttgagcgggaaacttgatcctagagcccttcaccgcatttttgtggggtattccttcatagcaacgggataaaagtgttatcatcaagtcatcaaccaacttggaagcagtatgttacaagggatgtaatctttgtggaaaatcaaccatacaatgggaacacctatcttgaaagggagaaaagtaatatgaaaaataggtggtgggattcttcaagttattcttaccattctggttggaataactcctctgaccagcagtaaaataattcttaccatactaaatttaatactcttctaaatgttgggattttatttctcctacatcttcggtaataaaccgaagacgtgattggaatgtggtccacatcattccatcaatttaggaatcaggattcatgctccaaaccacgttcgcatcactaccccatgttctgtgcacgttccaggtagacttagtgatggagagagtcttttaaaatgaggcaaaacactaacgggagggtaccctaagcctgcaatctcttttcaattttcaaaaataccatctaagtggagattgtgaaggtttagaagcacttgaaatccgaaattagcaaaacccattttaacctgtagaatggcaatggcgggaggtatgttttccgatcagtttataattccgtttatgatctaattgctatttaatgtttttttatagcatgtttagatataaagattacagttggtatcagagaatgtatacctttgccttgttcattttacaatctacattttttaatcaagcgagttatggtattttggaggttttggttttagaagtttttgatgaaaaatattgttagaaatcattaggagacgagatttctaacattttggtgttttaaatcatcaatttggtgtctagaatgcctagaaaccgtcaggtttcatttcgggttgcagatggggcaaacaaacccggctgaaggtaggggacgactacaaggggttatcgtttttactatcaataagacttaaataagtaaacaagtgatcagaaaatgggcagtagctcagttggtcacaaccttgtctacattcattgattgcacaggttcgagtcctcttagtagcaacctctaaacttattttattttattaaaggggttgactgtcaataacatttaaataggtaaacaagtaatcagaaaaggggcagtagcctagttggttatagccttgttctcattcattcattgcataggttcgagtccacctggtagcaacctattttaattttaaaggggttgatttagctggtatttctttccttcaaaaagcctctgcctcaaggcttgtatgacacagatttccatgtcctgcatttggatttagtgaatgtaaaaaaaaaaaaaaatcataaaatttaatgttttttaaaatatgttaatttatggatattttatgtgatagattatttatttttgttagttgaatacatatttttatttttaatggtttattgtgcatacaacattaaattaaataatttgcacattaaatttattcttaaaggcttttatggttttaattttagatattaatgtgcttataatttattcaatttcagaaattttgcacattgatattgagttttgtgtaaaaattgcttatggtttcatgcaatttatataagttttcttgtgaattaattaaatgtcaagtgatccatataattttaattaattaaggagtagccacaacatctttaattatacaaaattatatattaattgttttaggatcacatataggaaaatgacattatgggtaattaattatatctgatgtaataaaattttatcccagatgaattttttattaaatttgtataattaattagggtggaatatcaaattatatttcttaattacccacaagaattaggaaatgaaacataatttgatagttttatcataaggttttacatggatctaattgaattagaactttagcccacaggcaagttttatgttactagattcataatttttgaacatgagttacataggtaaaacatgatatttgtttattagtctcaaaattgaattataagcatgtatgtttaatttttgtgcagtcatgcaacctgcgaatttctctaatataacatgtgacattcccgaattgaaatgtgataactataaggtttggaaggagagaattctccttcatttggggtgtatggacattgattatgctatcaggaaagacaaaccaaccattattgacaccagcactacagcagaaaaggctctttatgaacaatgggagcgatcaaatcgccttagtctgatgttcataaagaccaaaatctctgatggtattcgtggttctgtggatcagcatgacaatgtcaaggcattactgaaggccattgatgaacaatttgtgacttcagataaggcacttgccagcaccctgataatgaagttttcatctttaaggctcaccaatgtgagtggtgtgcgagagcacataatgcaaatgagggatattgcggcgcaattgaaaatacttgaggttgaaatgtctgactccttccttgtgcacttcattttaaacactcttccacaacaatatggacccttcaaaatctcctacaacacacacaaagataagtggtcaattaatgagcttctgaccatgtgtgttcaagaggagggaaagttgaaaatggaattgggtgagaatgcattaatgacaatggaaggaaaggatcagaatcaggccaaaaagaaagggaaaggtaaaataccgtcctaaggtggaatcaagaaggtcaataagtgcttcttctgcaagaagaaggggcacatgaacaagggttgcaccaaattccagaaatggcttgagaagaaaggtaaaccaatctcatttgtttgttatgaatctaatatggttgatgttatttataacacgtggtggattgattctagttctacaatccatgtttcgaataccttgcagggtatgcgaaacctaaggaagccaatgccaagtgagcaatgcatttattcaggaaacaagatgcgttcacatgtggaggctgttggaacatgcagtttatttttaagtagtggttttattttaaatttagaaaagacattttatgttccaagtttctctaggaatttgatttcagtttcaagaattgtacctttgggttattcctttagtttttatgagacatctttcagtttgttttataaatctaatcttgttggaaatggtacattgtctaatggtcttttctttatcaatttgaaaaatgataccactaataatactatgcatgttcacattggtacaaaacgatgtgttatgaatgaagattcctctatgttgtggcatcggagattgggacatatctctatacagagaattaagagattagtaaatgatggagtacttagtactttagattttactgattttcacacttgtgtggactgcattaagggaaagcagaccaacaagtctaagaagggtgccaagaggagcacagacatattagagatcatacattcagatatttgttgtccagacatggacgcatatggttcgaaatacttcatctctttcatagacgattactcacgatacatgtatatctacttgcttcataacaagaatgaagcattgggtgcctttaaagtttttaaggctaaagtagaaaaacaatgcggaaaacaaataaagattgtgagaacggatagaggtggagaatattatggtagatacaccgaggatggacaagcacctggtccttttgcgaagtttcttcaagagcatgggatagttgctcaatacaccatgcctggttccccagaccagaacggtgtggctgaaagaagaaaccgaacattaatggacatggttaggagtatgcgtagcaagtccaagcttcctgaatccttgtggactgaagctcttaaaacgacagtgtatatattgaaccgagttccaacaaaggttgtccccaagacgccatttgaattatggaaaggttggaaaccgagtttgcgacatatacgcgtttggggatgcccgtatgaagtaagagtttacaactcacaagagaagaaactaaacccaaggaccattagtgcgtatttcattggatatgccgaaatgtttaaagggtatagattttactgtccatctcacaacactagaattgtggtgtcaagaaatgctaagtttcttgagaatgacttgattagtgggagcgatcgatttctggacattgtttctgaaaaagatcatatagatgctcaaccatctacttcaagtgatagattgattgtcattcagaatgcccctcaagttcaaacgggtgataggcaaccaatcattgaagctccacaaattgctaatgacaatctgatcaagttgttcaagattcgccagaaattgttgaacaacccgttgagcaacatgatcctcaggaaaatgttgattaaatattaagaagatctacaagagtgagaaaactagcaatacctagtgattatgttgtgtatctgcaagaattggactatgacattggagccgaaaatgatcctaaaacgttttgacaagccataagttgcgaagagtctaatttatggtatgatgctatgaaagatgagatgaattctatggcatctaatggagtctggaatcttgttgagttgcctgatggtgcaaaagccattggatgtaaatgggtcttcaagacaaagaaagattcattgggcaacattgaaagatataaagcgagactcgttgctaaaggattcactcaaaatgaaggaattgactacaaggagactttttctcctgtatctaagaaagattctcttcgtgtcattatttgcacattttgacttagagttgcaacaaatggatgtgaaaacggcatttctcaatggaaatctagaggaagaggtttacatgaaacaaccagaaggattttcctctagtggtggtgagcatttggtatgcaagcttaagaaatccatatatgaattgaaacaagcatctcgtcagtggtatttgaagtttcatgatgttatctcttcatttggtttcgtggagaacattatggatcaatgtatatatcagaaagtcagtgggagtaagatatgtttccttgttctgtatgtggatgacattttacttgcaaccaataataagggtttgctacatgaggtgaaacagtttctatctaaaaactttgatatgaaggatatgggtgatgctacttatgtcattggcattaagatacagagagacagatttcgaggccttttaggtttgtcttaagagacctatatcaacaaggttttagaaagatttcggatgaaagattgttcaccaagtatagctcccattgtgaagggcgataggttcaatttggactagtgcccgaagaatgatcttgagcgggaacaaatgaagaacattccttatgcttctgctgttggaagcttgatgtatgttcaggtctgcacaagacctgacattgcatttactgttgggatgttagggagatatcagagtaatccaggtatggaccactggaaagctgcaaagaaggtgatgagataccttcaagggaccaaagactacatgcttatgtatagacggactgataatttggaagtgattggctactctgattcggactacgctggctgtattgatttgcaaaaatcaactctaggatatgtctttatgctagccggtggagctatttcttggagaagtgcaaagcaaactttgattgcaacttccactatggaggctgagttcgtgtcttgttttgaggcttcctcgcatggtgtatggttaaagagtttcatttctgggcttagagttgtggattcaatttctaggccattgaagatatattgtgacaattcagctgcagtttttatggctaagaacaataaaagtagtagtcgaaacaagcacatcgacatcaagtatttagccctaagagaacgtgttaaagagaaaacagtggttattgaacacgttagcactgaattgatgattgctaatcctttgactaaaggcatgccaccgttgaaatttaaggatcatgtaaatagattgggacttggttcctttatgtgattttcgttgtaagaatgaatgttattttcaatgaaactctatttgtgatgttttctcatatttgattttctttgtgtacacttttattcatttattgagaaatatcattaatatttggacctagaataaacataaggtttattcattaagccatatcggctagtgtttaagaaacatgatgcattgtgatacatggaagataatactcgatattagaggacctatcaccatgattcatgtattttgtttcttgctatgatgaatgatggaatatatgaaccaagtgggagaatggtatcaaactgtaatctttatatctaaacatgctataaaaaaacattaaatagcaattagatcataaacggaattataaactgatcggaaaacatacctcccgccattgccattctacaggttaaaatgggttttgctaatttcgggtttcaggtgcttctaaaccttcacaatctccacttagatggtgtttttgaaaactgaaaagagattgcaggcttagggtaccctcccgttagtgttctgcctcgttttaaaagactctctccatcactgagtctacctggaacgtgcacagaacatggggtagtgatgcgaacatggtttggagcatgaatcctcattcctaaattgatgtaatgatgtggaccacattccaatcacgtcttcggtttattaccgaagatgtaggagaaataaaatcccaacactaaaaacattcctctctatttctatccctacccctattgcttagttgaatcattattgtgaaaaaatgtctaaaatttatttcaacactgaaattcctacaaaaatcaagagttctaagccacctatcctcaatgtgtattccaaagaaaggcggcctgctgttgctttaaatgatccaatctttgactttgaaacaggttttgaaggagataaccagattttgatgacttagatttgcctattgcacttagaaaagggactcggtcttgcattgctcaccctctttcttagtttatgtctttacaaaaactttcaccccaattccatgccttcatcactgaattagctattgactgatcagcctttatgaccgttatttagtagggaaataatggctggtatttggcctcttaataggaaagtcaatagttgtatatagcaatttaaattaggaagttagaattaaaattcccatgatttttgggatagacttctaggagttaatttgtttccattttttacttcatagccgtctataagatatacaaattttcctcaaatcaatatacgattattctcacatatgcctacatggtatcaaagctttaggtgtttttcggaataatcgttcggattaaagaagttctgcaactgctggtatttttctgttagtgacaacgaaacaccccgatttgaaaaacaaccctaaattcttttgtatccaaccttgttagaaagctttaagatgagtaacgagcaggtatgtgaagcattaatggctgattttgaggtgaaaaataatttcagcaagtatgtgacaacttgagaataggtagtgaggcagatagacatatgttgctcactttgaagaaatcagcccaaagaagaaaggatcaaacaactccaagattggccaattcaaaaaagatgagataaatcagcttagaagctttcttgcatctttcttgcatcatttgataatcctagtgcctcgtgctcccttgcacgctcagaaaattgttttccaagtgcttgggtcattgactcaagtgctacttaccctatgaaaaactctttccactctcttcatccatgttttggaaataggaagattaaagttgctaatggtacattggccacaatggctagttaaggcaaaatatatttgtcacccactctatcattaaaatcaatattacatgtcccaagattatctgctaaccttctatgggtccatcaaattaccaaagatttaaaatgtgaagtaacattcttcctgactcattgtgtattttagggtcaagctatgggtaaagatgattaggcctgctaaagaacaggaggaactctaccttcttgaagcttgttgtggaaatagtaataggttgccattctccgacctctctgaatttcatcaaataaggaatagatttggccatgcatccaccctttttttttcctgaaaaaaatgtttcctcccctgtttgaaaacttaaatgttagtgcattccattgtgaagtctgtgagttggctaaacaccatcaaacctcatttccattgaatatcaaaaaagtctttttatccatttactttgatttccatactgatgtatgaagtccttcaagaattccaaatatttcgggtactagatggtttgtatcattcatagatgcttgcgctagggtcacttggctttatcttgacttacccatgacctcttctatgcccttcacccacttggtatctttgagccaccattggaagaaaaaatacctgacaatactatcactgcaccattgcaagtctattcaaggaagtcatctcactctaagcaccaataggtctaatcagtggatcccataataggtactgaattctttccctcttctaatccttcaccacacattgaccagcttgtggaagagcatgtggatgaacttgtttgtaacaatctaaatttgcctattgccattagagaaggcacccaaacatgagcccaataccctatgtctaattttgtctcctttgataaactgtcaccctcgcataaagccttacttagtcacctatgtcccttagaaatcctaaaaacagttcaagaggcacttagggatgagaaatggagaaataccatgagtgaggatatgagagcacttgagaaaaatcaaacatgggaggttgtaagacttcctaaagggaaaagactagttcgatgtaagtgggtattcattgagaagtacaaagctgatgggactctgaaaagatacaaagctagattagtagctaaagggtatacttaagacttatgaagtgggatcaccaagaaacctttgtaccagtggcaaagatgaacattgttcgagtcttattatctttggctactaactttggttggtctttgcagcaatttgatgttaaaaatgtcttcttacatggtgatttagaagaggaagtttacatggaggctctccactaggatttgatggcaacttcagcggtgattctatgtgtagaccaaagaaggtgctatatgggcataagcaatcttataggggatggtgtgagagatttgctaaagttatgcggagaatgaagtaccgacaaagtcaatgagatcatactctctttatcaagcactcaacatctggaaaggtcaggttttaatcatttatgtggatgatatggttgtgactagggatgatttagaagaaattaaatggcttaacaaatatcatgtagcagaaattgatattaaagatctagggaggctgaggtacttcttgggtattgaggtcactcatttgaataagggcatctttatttcacaacaaaaaaatgtcctagatctcctaaaggaaaccaggatgttggggtgtaagccagccaatgctcccattgaacagaatcataggcttgtggatgacaaggatgaggcaacagttgattgaggtatgtaccaaagactagtgggaacattgatttacttgtcacacactaggcttgatatagcctatgctgtgagtgtgatcatccagttcacgcattcaccaaaaaatagccatctagaggcaatctacaggattctcaaatatttgacactcacttttggagaaggcattctatttaagaggaatatggaacctaaatttggaagaatatattgatgcattttaggcgtaatcaattgtaaaacaaagatctaccttaggttattgcacatggctaggaggaaacctagttacttggaaaagcaaaaggcaaggtgttgtggccaagtcaagtgtaaaggtagaattcaaggctatggcacaaggaatatgtggactttgattaaaatcattcttgatgatctcaagattaaatgggaaggaacaatgaagttttactatgataacaagttggcttttgacattgcccctaattccatctaacatgatcgaacaaagcatgtagagattgatagacacttcattaaagagaagctagataatgacctgatttgtactctttatgtttcaatagaaagatagttggtggatattttgactaggggactcttaagtcagatttttcagatgattactaccaagctaggaatagaaaacatctattcaccatcttgaggagggagcttgactagttagcctttatgacccttatttaatagggaataatggctgatatttagcctcttaataggaaagtcaataattgtatataaaaattgaaattaggaaagttagaattagaattcccatgatttttgggacaaatttctaggagttaatttgtttccttttttcattgtgtagctgtctataagatgtacaagttttcctcaaatcaatgtacaattattctcacatatgcctatattagccaaccatgaaattccaaaaatgttcaagcagccatgagcatagaaccatggaaggaagctatgaaaaacaaaatgaggaccttggaaaaaaacaatgtgtgggagatggtgagtctaccaaaggggaaaagaacagttgggtgcaaatggattttcattattaaatgtagaattgatggtacattggagaagtacaaggcaagatttgtaacaaagggaaacactcaaacatacgggcttgactacttagatataaattgaaatttttaaagaaaaaaattgttcctctatatctttgaagtttaggattacaacatatatataggactactcttgagtatatgcaaaaggaagaaaataaaagatgcaattgtgcaaataattaatacctcaaatcagaaaaaataaaataaaactaaattagaaacattgacacagctgattctatcccctaatttaccccactaaataaaatctcacatattttatgattttccacaccccacccccctcctcaaggtggtttgaagatgtttaatagtcccatcttgtttactagaacttcaagaggctgcttttaaaggcctttagttaggatatttgctagctatttttctgtaggaacatatggcataaagactagtaccccctcaagtttttccttaatgaaatgatgatctacttcaacatgcttagttctatgatattgaattggattgtggcctatgttcctcattgccttattgtcacagtataatttcataggtttctcataaggaatcctcaattcctctaatatcctcctcaaccaaatgagttcacaaattccacgagcaatgacccgaaacttagcttctacactacttcaagcaacaacattttgtttcttgcttctccaagttacgaagttccttccaacaaaggtataataacctaaagtttatcttctattcttgttatctcctgcctaatcaacatcaatatatgcctcaatctgcatatgcccctttttctcgaacaacaatcctttccttgggcttcctttaagatacttcagaatttgatatacgacttcaaaacattcttcaatacaagtttctaaactggatgaccatactaactgcaaacactatatcaggacatgtatgtgataaatatatcagtttgcccaccaaatgttgatagtgtcctttatccactcttgagtttaactctatttgccccaatttcctattaggatcaattggtgtattagctagtttacaacccaacattcccatttttttgtttttttattttttttataggtaaattttgtctccattgggacttgaacttgaaacgcacatatcctccccatccctttaccacttgtgccaggccttcagggcaacccaacatttctatatctttaaataagtctagagtatattttcattgggaaacaaatataccacctcaaaaccttgcaacttccataccaagaaaatatcccaattgaccaagatctttaatttgaaattctttagcaagtaacccctttaatttctccaattccataatgttatcacctgtcaagatgacatcatctgcatatactatcaagatgacaatcttattgtcactagaatgtttgtagaacatagtgtgattagcctaactttacatatacctaagattccgaatggactttgtgaaacgatcaaaccatgctcttggggattgcttcagcccatagagagatctcttcaatttacaaacttttttcagtttcaaatgattgctcaaaactagggggcaaatccatatacatttcctcctccaattctccatttacacaatctgagtctcattgtcgcttgcaatcaatctaaattagccattacaacaactagatgtaaagaatggaatcatgtaaatgtctcttgatagtcaataccgcaggtttgtgtaaagcccttggctaccaatctactttatacctttccattgaaccatcgggcttatacttgacagtaaatacccatgtgcatcctattgttgtcttccctcttggcaaacttattaaatcccaagttccattcatttcaagagccctcatttcttccatgattgcttctctctacttaagaacaactagagcatcctatgtagattttggaattgccactgaagacatgttagtagtaaaggctctaaaggaattagacaacctatggtatgacacatatttaaaaataggatgtatggtgcaagatctggttcctttcctaagggcaacgggaatatcaaggtcattagaagtattagaatctgaaattgaagagaaaataggtaaaattgtaccttcttgggtccctatgaccagttttgactcttggatagtggcaaaagtatgactttttggattaccttgttaatttctccttcttgtgtagacacgaagctcaatttgagattttatttgtagtgattctcccctttttaacaattcttcattgttttcttcattgtttgacacaatagaactcgattgaagagttgaacttgaacctaagtttttttaccccatagaccagaagaatgtgaaagacttaagactcacattgtcatcaaatgttggcaaaggtaaagacatttcccaaaagcaatcttccttgaccatactcttcacctgaagagtgtttttagtaaagtagggttgattttcaaagaaggttacatccatgctaacaaaaaatttcctaaagataggattataacacttataccccttttctataggtgaatatcccacaaaaacatactttagtgcacgagaatcaagcttagttctatgttctttatgaatataacaaattttgtacatccaaaaattttcaaaggaattgaggaaaatatttttgtacgaggataaatcttagaaagatgattaagaggagtttcaaaaccaaaaattttagttggcattttgttaattagataagaggccatgagtacagattctccctaaaaacttttaggtacccccgatgtaaacatgatggctctagcaacctccattaagtgatggtttttcctctttgcaatcccattttgttgtggggtatcaaaacaactaaactgatgtatgaactcattttcaagtagataatctccaagaataaagttaaaatattcctttctattatcaatccaaagtacttgaatttgagtttgaaattgtgtttttatcatagcatggaacattctaaaaaccttttttgcctctgatttttccttcaacaaataaatccaacaagctctagtgtggtcatctatgaaagtgataaaccacctagttccggttaaggtcaccacacatgagggtccccaaatgtcactatgtctcaatggaaaaggtctagattctttataaggtcgtgcaagaaagtagacacaatgatgtttagataggtgacatgcctcacattaaaacattaaaggattttattcttaaagaaagatggagacaattgttttaaatatgaaaaactaggatgacctaacctacggcgtcataacattatttgatgttcaatagagaaagaaaaaacatcattacttgcaacttgagcttgtatactcttgataggatcctcaacaaggtaatagagtccatcaatctccttagcactgccaatcgtcctcctcgagcataggtcttgaaattcataattagatggaaaaattttagcaacacaattcatgtcccttgctagtttactaatagaaagaaaattgcatgaaagattagggacatgaagaatggattctaaagtcaaaattttttaaatagggactgaacccttccttgcaacggatgaaatgatccatctgcaattttaattttgtggttattggacaaggagaatatgtcaaaaacaaatttgacaagctcgtcatatgaccagaagcaccataatctatgatccatggtgtaaaatttttagaatgaacacttaaagcactaagagatttacctgtttgtgttagagaacaagatggtaaagactgattgaataacctatacaggtgctctagtttctctttgccgaatggagatgcttcagttatgatttttggactcagttgcagcctacatgccttggccatttctctcatgaaatctgccactatttttcaaattttgtgtcttcccatgcaacttccaacaggtgtgccattgattgttacaatgatcacaccctatcttccctttaccccctgctttctttgagatcccttgaccaccagcattggcagcagcactggcagcagaattgattgcaacaagtgctgagttctcataaatggttgaagaagagcctcccatcatgactgatctgtggctttcttcccttcgaacctcagcaaacacttttcaaatagagggtaacttaggctctttaccaaggattcgtccatggacttcatctaattctttattcagcccaacaaggaactcaaacactcgctccttctccatcatcttcttaaaacaggcactatctgtagcacatacctattcaaatccataaaataggtctaattcttgccaaagacctttcaagatgttgtaatatttagtcacaccttcatctccttactttatctcacggatctttgatttcaactcaaagatttgtgctaaattcccaaggtcaaattaagtttctataaccgcttcctagagctcttttgctgttggtaaaaacatgtaagtttgacctatctccagctgcatagaattcgctaaccaaaccatgatcttggagttttctgagtcccatgtttgttgcaccggttagatatcctagtttccctttcccacgaataaacaatttaacggactgagaccatctaagaaaattcagtccacttagtttatgagtggtgatgtgcagtgaaggactatcattggtgccatgagatgaaacttgaaatggaggcattgatacctattgcgaggaatctccaaaattctcctcgttgattcccaacatcaaatcctcctaccagtagcctaatagttctagaaaaaaaaaatccagtacttgaaactcctaccagcaataaatgtatcacttacagtagaaaattggctctaataccatgaaagtttgagagaaaaaaacttgttcctctatatctttgaagtttagcattacaacatatatataagactactctcgagtccatgcaaaaggaagaaaataatagatatagttgtacaaataattactaccttgaaatcagaaaataataataataataataaaattagaaacattgactcagttgattctatcccctaatttactccagtaaatcaaatcacaacatccaatttaaagcactaaatcaaatctcccacatattttatgattttccacacatttacattagtagacaaaatgaatatagtgagggtgttattatccctagtagttagcttaaattggcttttacaacaatttgatgtaaaaaaagtcttcttgcatggagacttagaaaaggaggtacatatagatgtttcacctggatttacacacaagacagggtcaaataaggtgtgctagctcaaaagtccctatatggactgaagcaatctccgcggacaatggtttgatagatttacctagtcaatgatcaagaggggatatcaacaaagccaaggggatcacactctattaatcaaccatttcactcaaagcaaggtaatagttctaatagtttatgttgatgatattgtggtaatcggagatgatttagaagagattggtaaactgagagagtaccttgcaaatgaatttgaagttaaagaccatggaagtcttaaaaacttcctagaaattgaggttacaaggtcaaaataggggatgtttatttctcggcaaaaatatgtacttgatttacttaaggagaaggttcacatggttgtaagcttgctcaaacatcaattgaagtcaaccataaactaggggagaagaaggaagaagtggctaatagagggacatatcaaaggatggtaaggaaactaatttatctatttcacacaagaccgacattatgtacacaatgttgtgagtcaattgatacactctccattacaatcccacgtaggcattgtatacaaaatacctaccttaaagcatcccctggcaaaggtggcaaagtagtaaagtaccacaacacttgtaatctacagctagaggctacaaagatgtggattgggtaggttaccttgttgataggaggtctacactaaggtattggaaggaaatttagtcacttgaaggagcaagaagcaatcaatgtcaaattcagggccatgacacttgtggtttacaagctactgtggttaaagtcaatgcttatagatctgaaagtgaaagttcaagatcatatgaggcttttttgtgattataaggcaaccataaacatagctcacaaccccattcaacatgatagaactaaacatgtggaaatagacaaacactttattaagaaaaaattatatggtggactaatttgcatgccctacgtttcaacaaccaaacaaccagttgatgtgtttaccaaaggattagtagggaccctttttcataagttcttagataagttggtactgcaaaacattttgcatccacttgaggggaagtgttgaaatattctggtgataatcttgggattgtggctgagttgtgtttgaatattttgtatttattttcttcctaaaatagaattgtatagttgggtgtttgactaagaattattctgtatcccttggattctgctgtaaataggtagtaatgtttcccttttttgatcctagaaggtcaaccttgattatatcattatgtacattccttcgagtaatagaagtgaaaattgtgatcttcgaacaagttggaaatgtcctatgaaactatactgtgacaacagttaactatcagaatagcccacaatccaattcaacatgacaaaactaagtgcattgaaattgatcatcatttcatcaagaagaaattgtatagtgggttggtatgcaccccccatatatcctcagaaagatagttggcagacatattgaccaaggtacttgcagctcaatcattctaatctgtcacaaacaagccaggaatggagaatatttactcatagcttgaggagatgtgttgaagaatcggtgtagtaattgtcagattgtacagcctaaataggttgagattttgaatggaatttatttctttttctgtactgttgacttgatttacttctcaatttaattcctataactagggactaattaagtaacttatttatttcatgtaattcgtggctattttagtggagtaataattttagacctagaatagagtaatttccttttccttttcccattgtaaacatcataaatagggtgaaaatatacccagtgaatatacaagcattatccaaaaatcattctcttttgtcataggtttcaatggggaagttataggcacctttgcatactttgtatctagcctacttcacttaattttctctacaatattggcattagaagtatttatcatgcacttttggactattgaagattcttttccattttttggatataaaaaaatatcctaggaacactaaagagttagccatttagctgaggtcccaaatattgtctagaagagtgatatctagttaatatagtaaagggtaggatagagtcatcatgaggccgtcatatattggcacatctgaggctccctagatagaaaaatgcatcattgatgctcttcacaaggttgtatccttgaaataccttggacagaggatcattgtctaggcaccccatgcatggggcacatctcaattcttcttgtcaaattttctctactgatttactttttatgccacatgctacttagtgagagtcacatgttgtgaattgacaaattattttgccgtgtatcaacttattttaggtctactaataaaatatgcagattttctaatatttctttctgcttaatacaaatgtgcttgtggctcattaaactagatcataaccaagctgctaaataatgttcacttgcttaaccatatgttatcttttctaaaactttactggggtagattttctttagatgtcaattactgcaccatagatttggtcatcttctgcttggctttatttgttgatcactatttaggtttgctggaacattaaattttaccctcttcttttaattgaaaatatgagagacagctaccctggctgatataccataatatgattgataccagctcagcaatcttctggttgtgacaactaacctgcctcctgtactgtgacaactaacctgcctcctgtactatatggtttcagggaggacaattagcagctattaacctggagtcccg

SEQ ID NO: 13630 - DNA, 8169 bp, Vitis vinifera
  Intron number 1 from transcript GSVIVT01031676001 (locus G SVIVG01031676001) derived from phytozome v7.0 (chr-ID chr5 ; pos 20039307 to 20047475)
ctaaatcccccttctgcaacaacaccttccaattggtatttttcttgttctcatcccctcctcttcctcctgcattttgaggttatttccttgggggttaagatgttgatctgatgctatgtttttcttttctttttctttttctttttttctttttaataatttccttggattaagagctcatttgttttgggtgtggctgttgagggaggtgtgggggatccagaatggggagatttcgaaagatattttgggaaaaaaagggttttttggtggggggaatgtggggaattatgcaatttaggagtgctaatcaatttaacaggaatggtgaaaggggttgggtaattgatgttctcttgaagaaaaccaggagtctcacttttgaaaattggatttgtatatactgtatagtgattgagctccgattgagcatattattgcggcctgaggtttcatcatagggtttgtttctggcatgtgtgctagaaataatatttttgcagcacatacaaggcctgtgagccccttttccagtgccccaaaacaacacacacaaaaaggggaaaagacgaaactgaagataattgttacttatgaatgctatgttgtagcacttgataaagtattcttctaccatgattattggttgttaacaggcctactgcataacacttttttcgacaaagattagcgacatgtataatatgactcaataaagattaatgaggtgtataatatggcttctttaaggctcataattagtagcacatagcatattggcatatagaatggcattctgtaaggtttaagagatccaagcttaacataacaaaaacacctacatgttgtacatctttcacgtgtctagtgcctggatgcagtctcatactgaatgaaatatggttctatagctgttaaaagcaaatcttaaattttgattttctatatttaattgggatgaatacctgcagaaaccccatgtaaggttttgtaagcttaaattttgatgactatttaattgggacctagggccaaataggcattggtggtgttttttagataccattataacaacatgaaatgaattttctccaagattgctagttttagtttagcctttgaagtcgaggctttagtttttctagaagatttttgaacacgacatctttgggcattaaataattttcaggctaaaggggtggggatggggctggttagccattgtttcttgggtgtcctagtgcagcaagggtggccctagaaattgaaggtgtggattggaagaattttagattgatcaagggttaaagttgctttttcatataaattgtgaagccaattgatgagattacaaatgaatttcctaagtgaatgtccttttcattagaggattttgttggggatttcatcatccttctattgtaccttttacaacctaatttaatatatagcattgttgtttctcataaaaaaaaaaaaattgttgggaatttcatgcctcccttagttatagtttttcttattgtctcttagggtcccttgatgggttcaatgtgtttcttgtttttgctggtctttcccttttgtactctttctatttaaactagcatgaagaagatctcattcttgtatttttgcttgctactaacaaagtgtttgtttcctataaaaaaaattgatgaagcatttttttttgtcttagtttctattatttatttatttattttttatcgaaaagagaatattcattgataaagatttaaacgtacatgtgaaggatgaggaattcttcccaaatatacaaattctgatatataccttggtataataccacaagaaactatacaagggaatagtggctctactctctataaggatcaatacattagctattctacaaaatgagaccaaagtattttacacttttcactaaattccaattgagttgaatttgattgagatgagtgcccttgaaagctttagttgttaaggcctgagaagaggaataaaaataaattaggtcccatatcgactctattttttgacgatgtaaaaataaaaataaaaatttcaaacgatttatcgtagattttccacgatttattgacatggtgcactcctagcaacttattcttgcctattttttctttccattgccattaataacccattatattagtgatatttctctgcctttcaccaatcttttaaaccttgctccacactaagtaaagggcacaccatctaattgaagatcccataagttcaactctcttatgatctccgagaagcgccacatatcggacgatatccttgagcagtttcatttttcccttgggaatgtaacatattaaaatctccttataagcaccaaggtttatcccaaagacctcttatagttcccaaattcactctttcctcccttttgactagattgtacacccctgagaacaaccatatgaatctgtcttcataatttttgaaaagacaagaaatagggaatgcacccacttccatgtcaatcaaatctagtactttgttgtcctatggtgggaaatgaaccactttgtgcttaatatcctaatttctttagagttattttttttttttttgataggtaaatttttgctccttcggaacttgaacctggaaactcccacaaaccctccccatccttttatcacttgatccaggcctcaagggctctttagagttgtgatgattaaagacactcatatttcattctttttagctttctcttcttcctcttcaatttgaaatttaactttccatgcaaattgattgatctggaattttaggagcttggacttttcaaacatctcttgtcctatcatacttatctacttattttcgagaggtaagattttgattattgacttccttgggcttttttttttttgtaaagtcttgcttttttgctttctctatgtccttgatttcaaccgcatttttttccaatcaattttgaaaatctaaggttaagacctttgcattgctggtggcctataagaaaatcaacactagtgatttgcaacaagagaggagtcttttcaaagttttcatcttcaactgttgcattatgtgcctaaagagcaaaattgattaatcatcttctttacattgccctaggactttgaggctttggcataagttattcagctttactaggaaagattgcgttccacccaataacatgacatatataatgattatctcttttataaggttagggggtgctaatagaggaatgacactttggtgtgtgacttgcctcactttgttattggtagtttgaagagatagagatgtaaagatttctgaatgaactctcttctctaaagtcccacctcatgtaaaaaatccctttgaatcttctctaatctcaatttccccaatctagggatagtaaaaaaggacataaaatagattggcaaactgacaagagtgttccgaagtagagtaagtcttcccccttttgaaaggtagtgtctcttccataacgaaagcctcctttgaaaacgttcttccacactatcacggacttataagaggcccccaaggggagccctaagtaagaagagggtagttttcccaccttacaacctatttcacaagccaactcttctaacaagtccacctcccctactgggattacctcactcttttcgaaattgattttcagccccgacatggctttgaaccacttaagcacccaacacaagggggtaacttgctcttaagaggcctcacaaaaaataatagtatcatccgcaaaaaggagttgagagatttcctctccatcacccccttttcccccaaccttaaaacccaaaatgaaaccaccatcttgagctttcaaaatcaacctactaagggcttccatagcgatcacaaacaagtagggagaaattgggtccccttgtctcaaacccctagagctttgaaaaaatccggagggggttccattgattagaatagaaaagcttggagaagagatacaccactttttccactttatccatttgtgcccaaaccccattgtagcaaggattgctaccaagaaatcccaatttacatggtcgtaagccttttcaatgtccaacttgaccactacctttcttctttagcactgaatcaattgcctcatttggcattgcatccaaaatttgtcttccctccacaaaagcattttgaaaacaagaaatcacccttcccattactttcttcaacctattggctaatacttttgtcaaccacttatagagacttcccaccaaacttatcggcctaaaatccttgacgttgaaagccccttttttcttgggtatcaaaaccaaaaatgtcgtattaaggtttcgaacaaaattgccatgctcatggaactcattaaaaaaattcagcacatcaaatttcacaaactcctaactaaaatgctaaaaattcatcgaaaagccttctgggcttggagctttgtcgccattcagttccaatagtgcccccaacacctcctccaaggaaaccccatctaaattcctcgcctcctcctcttccaacgcctcaaaagataacccttcaataccaggcctcctgtccccttccttagaggaaaaagatttaaaagcccccactactccctctctcaactccctgtcacttgtaagccattccccattcattttaatcttggcaatgaagtttttccttatgtgagtattagtcatcttatgaaaaacttagaatttttatccccttcctttaaccatatttgtcttgatttttgtctccaagaaacttcttccattgaagcccattttttaaactcctccctcgcaaaatttcttgctttttcctcaactgaagataaaactccttccctttccttcgcatcctagaaacctatgtacttaaaggcctcttttttccttactgagacattatcaaactcctctttattccattttttcaaaagcaccttgagagcttttggctttaaagccaaaataaaactagcagaccctgagaattacatccccacccaccaacctttgagcagataaaaaaaccttccttttttaaccacatgttctcatgcctaaaagaagttgggccatttatgatccccttccccccttccccccttccccccttccaacaaaacaggggagtgatctgagataggtttaggcaataccctctgaatcatcccactgaaatagctctcccaaccctcagacactaggaacccgtctaatctttattttgagctattgttttgacctccacaccaagtaaaggagtcccctgctagtggaaggtttgttaattctaattcattgataacataaaaaaccctcctcatttgcacattcaaccttgagccactagtacgcttaataggaaatcttactacattgaaatcacctcttacacacaacagatcattccacaaccccctgatcgcccctaactcctcccaaagaccctctatttcctccccagaatagggcccatacacccttgcaaacacccacacaaaatcattctcacaatttctaaacctgcaagagatagaaaattctctcacttccaaatctaacaactctaacactttgaaatcccaaaacaccaagatcctcccctaaacaccattcgcatttactgaaccccactttaagcaactccccacgcctagacttataacaagatccatcgtcattgtttgaacctttgtttcttgcagacaaaccaactttgctctttgggacctaatcaccaacttaattaacttcctcttctcagcatcatttacccctctcatattccaagaaagaattttaataatcattgacaaactgacactacaacccatctttctttcctccttcctccttttttagatatattaacatcatagttaatagagttttctagcttcttaagttccctctcaaacttcgaagcaaccaaaaactttcttcctttaccatactcccttattttcatctctgtcctccactatggttcgttctctttcgttgttcaacaaggctctcctttgtaagtggtgttggcattttgcaagtgaaggagattctttatggaagaaaatcattaagtgtaagtttggggagaaggaaggggggtggaggtcaagagtggtgagagattctatggagttggggcatggaaagagattgagaagcattgggagctttttaattctatgatttcctttgaggtgggtaatgggaggagggtgaagttttggaaagattggtggtgtggtgaggagcctttatgtgagatttttccgtccttgtttgccttatctgatttcaaagaggcatgggtagctgatctgtgggagcatagagaagaaggtagcaattggaatttctgttttgttaggaacctgaatgattaggagttgggtgccatggagcgctttctttctttacttcaaggtcattcaatgaaaagggaacaagaggatacagtggtatggaagggtgggaacaaaggggtcttcattgttagggggctttattctatgttattgtacaatcccgttctgtttaaaaatagtgtggaacccttggattccatcaaaggtgagtttcttgacttgggaggcttgttggggaaagattttgactttggatcagcttcaaaaaagagggtggactttggccaatggatgtgctttatgcaaaacagagttagagaccatagaccatatacttcttcattgtgacaaggcgagattactatgacaattggtgttctccatttttggtgttcggtgggttatttatgagatagttagggaatccctccttgggtggaatgggacttttatagagaaaaggcgtagtaaggcttggagagcagcccctacttgcagtttttggacgctttggaaggaaagaaacaagagattttttgatagtgaggaattcctaaacaatttctgatcaaaggctaaaaagtttattcctaaacaatttctctatgtgggttagggtgtatataggtgatgggtatacgcatttgattgattttatagagtggttgggtattgggtgagggagagagtatttttttgtaccctcttttctactttttgcttgttttacttgtatatgatctgtatactcttgcgctcttttcgtgcttttttaatacaatttcttacttatcaatatatatattgcttctgataaaaacagaaaattgtgtcttaagaccaacaaactagctgagctgccatgactgatttgtgactaaacaccactattctcacccatgacatctcagacacactttctcatttaacatggttcagatgggtgtttttttaattagaaacaaccatcttatttctattgataagaaagaatggattggccgttgtggctgctttatcttagaactatgaagatggattcgttggagggggcgcattgaagctattttggtttcctttgatgcctttagtcatctttgggctttaccttatacttaggccatctttggttcttggaaagcaagatggggtccatcctattaaaaaagggaagaaagtacactcatacccatatgtggttcctttttgggcaagtccatggatttttaagatgtgtgagtttgtggatgaattagatgttaaaataaacaccctcacttgatgcttacatttgtatccacttaaaggctcaaaaattggaactgttctatcatttctctaacacatacaactaacctattctaattacatttgtacacatatataatacatacaaaattgacttctcttaggccaaaagagaaaacgaaatacaactaacctattctaattacatctgatttctaggaatacagaataattctagatagccatgtaatctatttaaggaaaaatgaattaaaccactattctatcaaatatttcaacaccatgcaatataactttcacacaatgacaaatgaagcctcacaaaaaagatgtcatgtgttactcagaaacatttttatgttttgaaattgtgtctatgtcaaatatacaaccaatattataattgcaaatagactgatttggtgtgtttactgaattaaattttcaggtcaaggttaagaactgggttg

SEQ ID NO: 13631 - DNA, 1389 bp, Vitis vinifera
  Intron number 3 from transcript GSVIVT01012906001 (locus G SVIVG01012906001) derived from phytozome v7.0 (chr-ID chr1 7; pos 13270153 to 13271541)
tttaccagaaggctggcggagattagggtttataacttgaactacttcttctagtttctgttatgcgtttctgttttgtagaatttcagagttcataattttgaatcgaatggattggaatttgactttgaatttgaatgatttgcatgtttaatcgtataaggggcttatgatgttcttaatcttacagggattctctttttatttttatcttatttgtttattatttttatatcctttggttattcgttgatttgttgaatggctgagggagtgttttattctgttattgcttggtctataacatcctttttgctgatggcatgaatctactactgtcaagaacatcgtcattttgttgaaatgcaatgattgtatttttattttttttcctttttacatgcttttagaaatcaatatataagcttaaatcaccatcttgtaatattctcaagcattgaaaatggggttaacttatttctgtggtatttttgtgtcccattcttgtaggattttatcatttgctggtttatgtttgatcatttgctgacttgtgttctcttcttggcttggaagagaaatgaatagcccctctaaacttaacttgtagagaacttggtatccttgaactcgtttgtgtttttctccaccacttgaactaccaaactagaatgtcaagatctttttcttagtccatgagttatgtatttgattttcaagctgtggcttccccaattcttctcatatgtccctcaaattaattgaattggcctgatcacccggataatcctagaaaaaagtgcagtttgcccaatctctcctcactagcctcatgtgttaaaagacaatgatccttccaaaatgtcctctaaaacaggaaaagcactgtctctctgtttggacaagaacaaccaacaggaaagattgtttgttttcctgctatccacaaatggatcctgtaattagtgggttgtccatttttttttttaccatcttgttgatttggttatatctaatatcgatgtagggcttacagacttagcccaaaatggtgttcgaatctaatatcttcttataaaggcagctttcctgctaaggagctcttctaccgttcaaagagttgcttctcttgttaccagttgatccagaaaggttcatgatttgcttgaaaatattcagcaccttgctcgagataacaagttcataatgtatttgattaacaataaaacctcaaataatcatgtcattatcttttagatgtctgctagacttctcccaaccttatccctgaagtcataatgtctctgtaaaaggattcctaatttatgcgcataatggtttgcttcttttggaacttatgtttgactgctattgtttctgtagtataag

SEQ ID NO: 13632 - DNA, 18815 bp, Vitis vinifera
  Intron number 1 from transcript GSVIVT01029449001 (locus G SVIVG01029449001) derived from phytozome v7.0 (chr-ID chr9 ; pos 22752125 to 22770939)
aaacatttatctataaatatatttgtatcatagataactatttaaataaaaaatttattattatgaagtgatttatatttttctccctaatgtgtaagaaggtgttttattatataattgtgtattcacgtgttaaaagattatatgcaatttctctttagcataattgtatgtgtgttttgtaattattttaataaacaagtatgttaagttcaaaacacaaagacttgctattattttcattgattattaaaccatttgatattgtattttttgtaggtaaatcatgtttgaatatattgttcctagaatttactttggtaaaggaaaaatgttgaggacagaaacagatgtaaagtatattggagatcaagttgtaattgtgcctttggagttcaacatatgaacacttgttatctatgatatactcgagaactggcattgacaaaaaacaattacaattagtcctcaactgtaggtatcctttaaaaagggaaaataggttccaaccttgtccaatatgggatgataatagtttatcccaaatgttgaaattgattaacacatttagaatggacgaaattgaattgtatattgaacaagtgccagtacaaccacgagtgagagggcaattattgggtaacttcacacatttattacttagagaaaatgataatgttgaggaatttgagtatggttgtgaacctagtagtgccccagttgcaatgacttatgagtgtagagcagataaagatgaagatgaatgtgaatcctaagaaggtgatgatcaaagtgagagagtaggagatgttcaacatgatggccatggggtatttgaatttatggatgaggaaaacaataatgttaatgttgttttatctttcttagctctttacgaagcaatggaaagtgaacaagggagatatgtctctgtagatggggaaggttgtgatatgtcaaataacctagattctgaggacccaatagagttttcctctgttcagtatcactcagcatcatctttgtagtttgaaaatgtagaaaacattggtaatgtcgttttaagtgactggaccccatgggggaacactaatattggaaactcaggtggagagttcatggttggccaagtttttaattcaaaagcagatttataacatgctgagaagttgtattctattagtgcacaccaagagtacgttgttgtttcatcaactaaaaagttgttcatcttaagatgcaagaaggctgagcaatctcaatgtccatggaaacttcatactatggttgtaaaaggtacaactttatttgcaatcaataaatacaatagttcgcacaaatgtgtaaatccttgcttgaatcgggaccatcaacaattagattccaacttgattgctagtcatatccaaggaatgattaaggcataattcacattgtcagtgattgctattcaagcaagtattgtggagaaattcggataccaaatatcatacaagaaggcatctaaagtgatgcttaaagcacttacaaacttctttgatgatttttataagtcatctgcaaaggtgccatattttttcattgccttagagtaggaaaatccatgatgtgttgtaatttcaaaaacatttcctggtattatggagaatacaaagatatttcaacgagttttttggacatttcatccatctattgaaggattcaaacattatcagcccatactcagtattgatggtacacatttgtttgggaagtataaaagaactttaatgattgttatgggttataatggaaataatcaattattcccattggcttttgccctaacagatggtgagaatattgatagatggggatggtttttggcatgtattagaactacaataactcataggagaggactttgtgctatatcagatcgacatccaggcattatggttgcaatgagcgatgttcatcttggttggtttgtgccatacgcatatcatagggtttgtatgcatcatcttgccaacaattttatgactcgatttaaggataaaatattgaaaaatttgatgtacagagcagccttagcaaccaagattgaaaattttaataaacatatgaacacaattgggaggattaatgcaaccacacaacaatggttggaagcaatcccttttgagaaatgtgcgctctctcatgatgaaggtcgaaggtatgacatcatgactacaaacatgttaaaggtgttcaatagtgtgcttaaagaggctcatagcttacccgtaactgctttggttcaattgacattttttcacctaaatagttactttgttgtgagaatggaacaaggtgctaattgacttgcttcaaatgaggaatacactccatatgtcaatgctaagattaaggtaaatgtggttaaggcaggatctcatgagattgttttatattatcacatccaaggacgattccatgtgaagactagtaagggtactaagagtagctcagctagtggtcgaacatatcgcgtcaacttacatgagcatgcatacatatgtggtaaaacactcatatatggattcccatgtagccatattctagcagcatgtcattttcgttcagttgattttagaccacttattcaacactactacagtacacaatcatactataatacttgggcacccttgttccatcccattttcaatgtctatgagtggcctccttatgatggtccgattatcatgccttctgagtcgatgaaacgtgcatcaagtggacgacctaaattaagtcatttgcataatgaaatggatgttagagagggcaagacttctattacatgtgggttatgcaaacaaagtggccacaatcgttgctattgtcaaaacagtaatagagtttattagaccgtgtgatgtatgcgtgtaattttcttggatattgtgatgtaagctactatgatactacctttatgcaattattggatttggtttgattataaatattgatgttatttccacaatcaggttatttgtatttggaataatgtccatactataggggaaactctatcaaaaatttgaaattttctattaaaaatggtaacaaaatactccattgtatttgtatctctaattttaatttagactagtatgacttgtttattggtcataaatgaattgatttacttaaatttatcaaattgatatatacttaatatagggaaaactccataaatttttaaaacttttccattataaatatttttaatttaaaaacaataagtattgtttatttatcttcacaattttgttatagatatggagtataaaggacatagttctgatccagatccattagatacgtttgttttggttctacaggatagacataggtctcatttagttgactctggccaggtatatatgtatatgaaagcacataatatctctttaaagaatgaaaaattttcaagtttattatctaaatgatttatttgtatttttacaatttgcttcagtcttgactttttgacaacatatatctaggtctatgtaggaatgggagatggatcctcgtcttcgatcttatattattcaatctagattttatggtgtataccatattggacacattacactagattgaggactgatcactagtctagttgagaaatgacatcctaagacacacacatttcacctacctgttgggaaaatgaccattactttacaggatgttgctgtcatattagaactttgtattcatgggcttcccatcattggcacatgtgacatagattggtcactgctatgttatgaacttttaagtgtgacttcccctacatctgagaataaaggattagcgatatcgacatgatggctatgtcaccagttctctcatccaccaattgattcagatgatgtcacattagagcggtatggacaagctttcatattaacactcataggttcaacgcatttacagacaagaagggtacccacatccatatgtgttatctcccactgtatagagacttgactcatacatttatgcatagttggggtagtgtagtattagcacacttatatagggagttatgtcgagcgagtttggatggtgccatcgatattgttgaatatgtcacactattacaggtataattaattattcacattagattaaaatttatagttgtttcaagtttataatttaagtaaaattttaatgttacatttttttccaattgtggtcttgggagagaatccatgtgggtcaaccagattttggttgaccaccaacccctctagcaactcagcatttagatcatgatgcagccaatgatttaccagttaagggtcctattggagtacaccatggattattggatgaagactagggattacaagatgaggcattgttagatgagggttcaccaactaatccgttaggatgtaggtggagagtacctttatcatgggctcaaaatccatcacgtgtgttgacattttatcaagaccaattagattcatagacccatgaccaagtacatataagatgcaatgtgctattgttaaccatataaacattaacattattaatgtcaaatgttgattttaacaggttttatgggagccttacatgggagacttagttgtctatattcaagcgatatctctagcagaccagagatttggcagacgatgtcacctcttatctgctttgacattgtcaagtggcatcgacagatgcgagtgttgtgacaatttggcctctaataagggatacctccatcttgttccatagagcaagaccttcattctgtggataggcaaggacaacataagtatgattagggggcattccatgcacagtatattatcttatgggctagttgtgcgaagcatattgcaacaacaccgtctatgacgggtgctatgcaatttcatgaaccatatatggagtggtacagacgtcatataagacatttgatcacaccccctctccataaagatcagatgaggtatcatagtacaacaacaactactcaattgttggtaagattttttaatttagaaatggtttattaaattataattaataaaaaatcatctttgtctattttaatttttttatttatagatcactggtatggttgagattgctagtcgatttgttgggcctacttcaagtgcattaggtgacattcatcggattgctattgatattttgcatgttattggagaagagcatcgcatacattcagtccgtcagtcacttacatcatcagacccatccatgagaccacctatgtcatccactacagttaggatgcaacctattcgaggccgagggagatataggtgagctgattaatagcctcgatgatctatgcatccacccgagattatgttagcactatccacatcatctgccccatttgtacctgaggttttcacatttcccccttcacccctaccatcaccttcacctagaccttctcccttaaagcacgtcgcatcagatactactctaccatcacctgtatttcctcccatagaggccactataccttatgtcactacaccagagactaccccaccatctactaatctgccatatcctctactttctcttgaggagaccactacacatgtcacctcaccatcatcacttgtatctcctctcttcgagcccactatataagatgttattgcactagctaccactacatcagatgtcattcttccatctcctatatcacctctcctagatgctaccatattatatatcactttaccatcacctacacctcttcccatagagactaccatgcatcataccttacacatgttacacagttagatgtattcccacctagacgatgttgtgatccacgtagacgtcgagtcttgcctccatcaactctatctcaacctatacatactgagacatgacatattgcatagatagattcgaaaaagatgtctttgtatcataggcgtctacagagaaagaggaagaccccatcatgtggcactcattgaggattgttttttagtttttgtgtttattttcatttgcattatattgttaacttttatgtgtgtgtgtgtgtgtgtgatattatataccatttgcatataacaatccaacaatctaaaaaattggttttaggtttaaatttaaactaattatatttattactaattagttacatacaacaataacactatattgatatagaaaaaataatgcattaaaaagatttacaatctaaacctccaatcaaaataattcttaaactaatactacttactaacttgaacattcacatgatttgaaatttaaacttaaaatattggttttaggtttaaatttaaagttatgatcaccaactactattttgactattttttaaaaaattcaaaaatcgtgattaccaattacggttttgtgatgtgaatacccacatgaataagacacacatcactttaaaaattattttgagaataaaattaatttatgaattttttattttaaagaaatcatttttgcccaaaactcccattagtacccaataaggaacatttgtcttattctcaatgaattgacaaaaatatttcaaaaacattttcatctatttaccaaaaaaataaaaaataaatagtgaattgattgagaaaacaaaggtattttctttctagaattctatattttaagaagtggaaaaacaatttctattaggttggcattttaagtttaaaattttaagcctttccattccattttgatcccattttgaaaggaaaaatatggggaaaaaaaatgttgtatttaagtaattttccaatcatttacccacttgaagtcatattatattttgtacaaatgcataattggctttaattttttcacaaagttacaaaataatattatattcttcattatgagggtataaaatagtatatttataactaattatatttatattgagtatagtgccaattattttaataaaattaaacaaaaatatttttatatcaaattaaagacatcaattaaattactattttttaaatagtgagatcaattaaagttaaatatttttattataccatgtggtcacatatttttagtaaatataaaatcaaaataatataatatttttatttaaaaaaattaaagttaaatattttaaatcaaatagcatagttttaaatatataaattaaagttaaagttgtagttcgtgactacggctttgactacttttaaaaatagtcaaagtcgtagtcaccaactatggttttaaatttaaagttaaaaccgtggttggtgacaacggttttgaccggtttttttttaaaataaaaccgtagtcaccaactacagttttatgatatgaaaacctacgtggtacaaacgcactacattggacattattttgaaaaccggtttactttatggatttttttttaaatatttcattttgggtcaaaactctctatctcaagagtgcctagactatttaggcatatttgcatgaacgtttccgttagatgaattttccaaatcaagcaacaattacatggtctctcacaaggttcgcttgatgttaataacctattatacttgactaaagattctctaggatgaacttaaaaactaccaaccagttcccgtctaccactatggaagtatgaaagcttagatagattatcaacagcaagagtacgtgatgcaatttttaatgggtttgaatgaatcttatgctagcacaagagactagattgtgatgattgatttgctccctcgtatggcaaaagtattcaatcttgttgttcaagaagaacgtcggtggtctgttggatttgggtcctcagctccatcggattccatggcgtttaatactattatctagctccttcaatagttgttgcatcgtctcacaacaagcccagatgtgaatgcctaatttgcacccaatgtgggctcaaaaggcatagtagataggtgttataaattgcatgggtttccaccgagttataaatccaaagggaaagccaaaacacaaatggctcaaacaagccccttcaatcctaatttactccaccaagctcctttattgaaccatccaaaggcattcattatttttattctattgttatggtgggatcttccccactacctacctctctctcgctagatcaagtttaacaactcattgcctacttagcacgcaccttcaataacagactatcgacccacttgagtctctatcggcgtcgagaccttcaatttctcaaatatgtggtaacaattgttctactttgtctttttctcatcattttgttccttctaatgcttggataattgacacagggaccacctaccatgtctgttgcaatatttctctgttttcttattccacacttgttcataataccattgtcactcttcccaatggtcatgttgttgcaatcaatcgtgtaggttctatgaagttatctaatactttgagcttggataatgtcttgtttgttcccatgttcactttcaatcttctcaacattagtgtttttactcttagccataattgtagtgttaatttccttttaaattcatgtgtcattcaggacctcacttgggacttgatgattgggaagagtagaatatgaaacaatctctattttctagaattagggaatgaattttctaattttgtatttgcaaattctatagtgttgaaaagagatatttggcatttttgccttggacatccatctcatgtaaaaattcaatttctacacaatgaattacacattcccagttttttatcccatttgtcttctcaccataaaatttgtcatatggccaagcaaaaatgtttgtcttttgtttcacataataacatgtatgctaatccttttaatctagttcacattgacatttggggaccatttcatgttagtacactagttgaacatagatattttctcactattattgatgactacacacaaactacatgggtatatattctttgtgctaaagctgatgttctcactatttttttttaaaaaaaattcaatttgatttctactcaatataacattgtaattaaatttgtttgttttgataatgcccctaaattagcttcccgtgatttttttattttatgtaccaagggtgttattccttatcgttcttgtgttgctatacctaaacaaaattcaattataaagcgttgatcgctcagatttttgtcgtttattggatcaaaaaaatttataacctaattcactattctagagtagcttgtacctgatcaaaaattggttttagtacaaactactatagtatagtggtttttaggtgttgtccactaggatggattattctcagtaattaaggcttgaatgagaggataagaaattattgtgatcaagtgaaattgatttgaaaattcatagtgaaaaatcaatttaacaatggtctaaaattgagaagaaaaatgaaatgtaaaatatgagaaaatgaatataaaatgaaattcacggagttaagattttatagaaatcaatttccatggtgaatagatgttgaaatctaattttcatcaaattagattgaaaacctaaatttttatctaaaccgattattgatttagctttaggtctaaatataatttctcttcaaattagatcatctaatccaaaagatcaattcaaatcatatattcaattcatcttaaattatcttccaatgattcacacaatgcaactattcaatctcatcaaatctagcattaagaatttgatgaatctacctagcttgcattgtagtaatcatccaagacaatttgaagagaaaaatcctcaaatttcaattaacaatcaattggatcaaattacctttgcaattcaagctcatttctctaattcaccatagattttgcctctagatcctcccttctccgagaaaaacgagatttagccactcatgcttggagatttgatctcacaaggcatgtttgactagtgagaaaatgagagaaaaataaaggaaagtagaaaattctatagaaagaaaatctggaaagttctacaattagaaaaatgtaaaaaaaaaagtttttaaataagaaaatcaagtttctatttataggccaaggtcaagtgggcacttgacatcatctaagaggtcttctagaggcttcttcaccaagaaatctggaaaaaaaaatgcaatttcgcacgagctccaacaatttcgtacgattgtgcgaagtggaaaatgcaccagcgccaattttgcctttctggagcattttgcataactgtgcaaaattttcgcatggtcatgcgaaatcaatttttagttttctctttgagctacaaccaaatttttttttggtccatttcgcacgactgtgtgaattttccgcatgttcatgcgaaatggaaaaacacagtttttcaactcttttttttgtcatttcttccatttctttcttttgattctacttcaactacctccaaatcaactccaaatcccaatccaaatcgattgcattgcttctttcattatgcatttggatcatcatcaactttatttgttctcttcaatttgattcatctcttttgtcaccaatttatcaaaatgataccttgaaatgactccaaaacttcataaaacttgttagtaactcttgcaagggcaacaacatgttaattgagtgttttaggcataattactactcaaaagatgtgaaactcatgaaaattattatctaaaatatgctctttttgagtagtaatcaagcgtaaacattagcacatacttaatgtggcatgaactctactgtttcaatcttgtattcctttttgttattggggtgattgtgttttgaatactgcttatttaatcaattgtacaccctctccattactatccaataaaaccttatttgagttgttgaataacaacaaacccacttacaatcatttttgcacttttggatgtttatgttatgctttcacgttttctaaccaacgtacaaagttttcctctcatgcttgagccttgtttttcttggttatcattttggttatatgagttacaagttacttgacttagaaaacaataaggtctatatttctcgaaatgtcatttttcatgaatcactccttctgtttgcttatttttccatgagcaatgacgttgttgatttgtttagtgattgtgtcattcccaagccaattcactccatctatgagccttcttgtagtcaacttagcatgtcttttccctatagtccagagtccatttcctcaccaaccccaattcaaacatgctcacatccacatcatgttgtcacaaaactagttacttgtttgattatcactattacctcactgaacacatttcttccaagccttttttatgtcctatttcttcttgcttgagttaccacaagctttcccagctatatcgtgaatttgttctcaccattagttctcaaactgaaccaacatcattctcctaggccattgaatctcaagatggcgcgatgctatgaatgttaaattgtaggcatgacaagtcattgtaaaaatttgacaaagcacttagaagcaaggaaaatccttgaatcccatgatacttgagattctactaatattattgatgaggagtttggtaaggaaggtgatgttttttaaattatagttgatgaaaattttgctaactcttggattttggattatggatgttccattcacatgtgcccatataaggaatgctttggtacatacaaggaatgtgatgctagtattgttttcatgggtaatgattcaagctctaaagtaattgagattggtcccataaaagtgaggatgtttgatggtgttgtaaaggcattgagtaatgttaagcatattcctaagttgagaagaagtttaatttatttaaagactttggataatttggactatgatttttctacaaagaatggtattatgaagatcaacaaaggtactttggtagctatgaatgggaaaaaggtgaaaattttatacactttgattgggaagacaattttaggtgaagctatgaaggtggaaccaagccataaagagtcttttgcgagtgttaaagaaattgtcgaagtaaatgaacacaacaaaatgatcaagactcagttttcaattaagagtactcattggcacaaaaataagagtaattatgaagaagacaaagacggtttctcgagtcaagtttgatgagaatttaaacttgacacatgtttattctcattaattatgtaggattgagagaatttgagtcaaggtggagtttcttgggattagactcaaattatttattatttatttttagaaaagtcaatatttatagagtttatgttttggtaaattaccttttaaagtttgattacgtttaggaaactattgttttagggttaacacataaagctctataaatatgtggttttatagagaggaaaaaaaatagagaaagaagaaaaaaaaagtaagaaaagagtgaagagagataggtaaagggtgtattgggttttagatagaaaaaggtttatagagtttgaagtgtgtaatcttgaagggtataataaatttgatctccatttctcatggacataggtgtttataatgaaccacgtaaatagtttgtcattttattcttctctattgtgtttaagtgttgtgatttttcccaacaagtggtataaaatttttttgcatctcaacacgactaatgaggtcttaacttatatataggaccaccaataggtccctccccatggtataaagaaaggtaagaaagtttgctatcaaagtaagcattttcaaaatattcatcaaagtgatgtgtccatgccacatcaacatctacacattattatttttattttctatatgacaaaaccacagttgttaactgtggttttaaagtcaacaattgtggttttattatgaaaaaaaaacattaaaataaaagttgatatgattagaagattagtttttggtaaatattttgaaaagtaatctagatgtgaatttttattttaattttttgaaaaataaaaagaattaattttccaacaaacttaagggaagaagatattgaaaagagtttaagtgtgtatggctaataagtgatcataactcaaaatgtaaggtaaatagaaaaaagattcatgaaacgatggtgatccatcctttatcctttgaccataacttcaaacatagtgttctaagttgacccacaatatttttcttttagaactagtctcacctgaatccgttgatcgtattgagactctcaaaccactctcttaattatatgaaaatctatctaaaccctttgcaatgaccaaatatttgacactcattgcactcaaccatctcaaacaatttccatggaatctaagtcacctctcattttacaggctttacgtttggttcaatcttctcaatctaacttgactagactaacaagttagggagtaccatacatagcttaaataaatagattttagggctataaaatggacaataaggtgagttgtattgtgaggctcaaatggacaatatgtaggactatgtgacaacaaaaaggtaggtggtattgtaccaaataagccaaaagactatgaaacaacaagacaaaattataataggtagataggttgtagggctataaagtcaaggaaaaatcatgatagatgggcaaagctttactttttgggaaaatcatgcaaccatacatcacccaaaaaaattaagctttttagaactttgcttttacctttccaattttaatgtaaaatggaaaaaaaaaaaatattatccattcatgcactccaatagtgctttcatatttgttccaaaattatcatcattgacaagtacatcaatcacttttatatttatttttttatttatcttatatcaactctctcacacatctaatttgccatgtttctacattttttctttcttttttcctctcttttaccatcgtatctattgtcacctattatattttttattgttatttttctatcttttctttgactctttttttatatgctcatgtattctctcataaaacttctttaattttattttttttcactctctaatctctccatatttattgattttaattattttttagacatattaagctttaaatgataatatataataaataattaatataacaaattaaataaaaacataaatatataatggataaaaatgaaaatattatcccacaaataatatacttgatgcttttaaatattaattataataatacatttgtaaattaaggtttaaattttaaaattctattttattatttagaggtttatgatataagattttttatattaatgctaaacaaacgatttatttattttgtaaatactctcacatgtgaaagtaaaaatatctttgtactactatttattatttttattatttttatttttattttaaatttatcatatcaaaatcagtgatggtgtttttatctttttttttttcttatggttttaacttgatcatgaatttaatttttgtttggttgaaatctttaatttttaaattaaaagaaaatatattttttcataaaaaaatgtatttaaccttttatattaatttcataaaaataggtatgtcattaagaaaaatagctatattcattcctaaagaaatcaagactctatttcccttatcatggtccatatattcctttaaggactcttggtaagtgactggaagtcctccctcaccctaaaacaaactttgaaaccctaagtacattcattcctaggggaattgagacccatatatccattatcatggtccatatattcctttggggaccctttggaagtgattggaagtcgttcctcaccctagaatggattttggaaccttaagtacatcattaagaaaatttggtacatccaatctttaggttatcaggacccttatttccctatccatggttcatttgttcctttagggaccttcagaaagtgattagaggtccttccccagcctagaatagactttggaatcctaggtatatctttaagaaaatttggtacatccaatcctcggactattgaaacccttatatctcttcccatggtccatttgatcatttggggaccctcgaaaagtgattggaggtcattccccaccccagaacgaacaatggaacactaggtacatccttaagaaaatttagtacatccaatcatgtacatattgtttgctttaggcctaaaggaccctcatacctttaaaacatgtttacttggttaaaaaggagctcatatttatatattcctaagaacttttttcccaatctaatgtgggacatcacaatcacccctatgcaaacacaatgctcttgttgtgtctcatgggattatggggttaaacagataaacacccctcatggggctaaacaaaccctccacatcgaggttaaggattagatttgataccatttgtaatgatctattcctaaccatgtagatattgtccagtttgggcttaaacccttatagctttaaaatgtgtttagatggttagaaggagtccatacttatatagctctatgaactttttcccctattcaatttgggatattgcaatattcaaagtcattttcatcaatttattgatgatatatcaatatttagctgatttaaattgaatttttggtgattttttagccacgtcattgaattttagggatgtttatgtattttaaaaggacttaacttaatttagagatatttatgtattttgaaaattcaaaatgatttgttttgattttagggatatttatgtgttttgaaaatttaaaaagacctatctttatttttaaggatatttatgtattaaaaaaattataagtgagatatttttggtcctttaaccacccactatctttatattgttatgttttctctgtgttgtcgaaaactgaaaagctaaaatataaagtaaaaaaatgatttctaaagaactttgatttgaagaagagttagaaagaaaaatgttttagtatttgcttcgctccgcaatttaaaggtgtgaattgattttttcaagaatttgagtgacttcttcgaggtaagggttaatagtacaataattcattttattattccctatctatttttcatctatttttggaagtatcaagatgtttaaattccataaagttgatcaagtaatatttttctaaaatatgttttgatgtgtttcttagtttataaaataaattgggaatatcatatgatttgtttgattattatgaaagtaaattttacttttttaattgactaaaatgattttggaaactctagatatcaattgtcctaattagaggataagttgttgatttcattacccttggtggggataggatgctttgtaatcctagtcaataagagtgttattggcctttcgtataccattgattagaaattgttctgtccactagtaaaaggaacattttgaggttaatcacctagtgcaagtcccaattttagggcacaatattagtagattaaagtaaaatgtttgtttttgaaattcttttgaatatgaattgattatgcaaagtgtattatttgttctatctttaaagtaaaagtgttgaatttttgagaaagtgaattaaattattgaattaaatgagtttgcttgctaattgaattttataaagatatgatatctcctatgatttaaattttgtactatacttgaacctccttattgaagtatttttccttattgtgttgtcgaattcattgttctttattatttcacttttcaggattaagtaatatcaatgaggagagatcatgatagaaagagtgttttgtttataaacttctttaaactcgattttatttaggaattaacttgagactcttttcaattatgtctttttaatttttttttttcaagtgtttgaaagaatcatgaaatttattgtttaaatatattgaaatagtttttgtttcgttttaatacacgtccgggtttggggtgtcacacttctactccgagaaagtaatgtgattaactaaagatggcggtgccactactttttttattacaatcatttctctgggacgaagacacttttactctcttttgtcaatagggaccatagatatacttgagactcgcatgaataaatatctataggatgagaaaaaccgaattaactgtcccttaggaacctggatggagtagaattaccccatgcatgtatagaatcaaatttgcatggggataattcaaagataaaaaaactctggctgcggttgtgagggccgcagatgatcgaggaactctgggatgaattttcaaatgtaactaatgagttttatttagagcccactttagagtaattgttttcgtgtttgataaactttttaaaaagctagtaaacactcgaaggcatccctagataattgatgatttttctaaaaattacttatcgctatactacaaattacaaaaaaagactagtaaagcacattcaaggatgaaaatatcgtgatatatatagccaatcgtgtatcggagaaggtgaatacgatatataggtaagatatgtcgtatgataaaaatatcgataaatattagcgatatatcggtaatcacagatatatcgactatacaaataaaatatcggtcctaaaagggaaaaaatcactgaaatttcaaagatatatcggagatatatcagtgaaatatgtaaacaaattaaattattataaataagttaaatttaattatcttataattttttttgtatactaattaaatataaaaaaaaatataaaatcataaataaaattatcaatatatttaaataaaaatattttgtgtcaaaatgtaccaatatttttaaataaaaatcataaatacatttaaatcacataattagtacatttgcaataatttagttttaaattaattattttattttattttgatatttaagtgtaataatagcatattgagaataaattgacttagtacatttttaaattaatatagtattgaatttaaattagtacatttttataattaattaatgtgttttcaatagatataagtaaattaatttagcatagtaatatatttgaatcacataattagtatatttgtaataatttaacttcatatatatgagccaatgagagataaaagttgtgagcacttttgataaaagcaaattttgcgggtactatagaacaatggaggagaagcatttatctttttgaatgttttgattatgatttctggaattttgatgtgttcattaatcttgcttctttcttaccatagagttatttttgcaattgtccagttctttgtcctattgtggttaaaacaattatggcgagaatttaaggttctattagacaacaaaggctttaagggatcttaatgttattctagctctttctcttgtctgctctgcttgtttatttctcaaagaaagggatgaagaatctttttgtgaactttaaaaagccttgtatccatctcattgatgagttttttgtttactgtgtaaccagatcaatctaggcgatacattaattgtttttgatgatttatcatctcatatccagaaatgtaaggctgtagcagatgtgtatatagttgctcacttggttttctgtcttcaggcggcttacactgttggggggcattctttcagtgc

SEQ ID NO: 13633 - DNA, 3395 bp, Vitis vinifera
  Intron number 3 from transcript GSVIVT01011702001 (locus G SVIVG01011702001) derived from phytozome v7.0 (chr-ID chr1 ; pos 4967453 to 4970847)
aaagccttgacaagtttctcttcagtaagtagtgcatgtcttcttctttttcctttcatgctgttattcatactcatttctccattgaatcctctgtttggttgttgagaaaatggggaaagaaaaacaagtttttacttttcgatttctgtcattttttaggtcctatatagtggaagatccaaaatatcttttaatttcgtacactttcttggcaactaaggagggccttagagaaacataaacttgaaatattcctaagagcttaagatgatgacatctactcaattgaaatcctctatcttcagtaggttttaagttctgattgaaattgttgtaatattgttaaattcttctgcaatattcaattcttaggagatttgagattttgtttcaagttggattttcggttcaagattcatgagctctttaaatttttaaagcattcatattcaaaatattgtggtaaattttgtttcaactccatactgatgcttatgaacttttagaaaattttttagaaaggcaatcattttcccgtttatttatttattcagtccatcgctttcaaattttaccaagtttttcaaagctttagtttgaattttccaggtggtttactttgaaggtgatatatgtaaagatagctgatttttcaaagatttcccttttttttagtgaataaaattttcaaccatgaagtatgtttgctaaattcagattctaagtaatatgtttagcatatagaagtggaatggatctctttttcttagtaggcatagaagtgcattcaacctcattgacgaacattgttgttgactttaggcatgctttatttccctgtcaaataatttctctctttctagcatgacttttggcattctcctttcttattttctttgtctacaatcatataagcagggatggatactagatatatttatgtacttacatatgtggtaaccaaaggtataatcaaccttgaagcaatagtgacttcgacattcatgaaagaaaaggatacagacccattatcaaaataaaaatggtgttttacaaaatttacatttcaaaaacgcacaaaaaaagagaaaaaaaaagtgttgtttccatttatgaaatacttattttaaaaatagaagggaattaaaaatctccatctctttaatctttgtattgtttagttttgaaagttttttatattaaataatctagaataaaaattaggcatttatcatatcaagttttagtggcaactaagaaggttttcctttttcttttttctttatttttttcaaatcaaaagttccaaaggacagtttagtgaacatcatatattttcttctggattttaatacatcaactagatacttctatactagctgtagaacactctactttcattgctactaatagaaggccattgaactctttttttctttctttttttttttttcttttttccctttttgaggttctgttatattaggtaaggaattttctttccctcaatatttccgaggtgcttgaatctatacacatgcatttttttacattaatttagcagcataatatttcatttaaatgtacaggtaataaagtggcatataaaatgtgtaaaacaaaatgaaatgtgagaagttatttattgaatcgtttcctcttcaatctctcttctgcagttcttgaaattactactattaagcagttcagtttggatatagagtctttgaaggataattttatttgagactattaatcatgagaagcattagttcaagggtcctgaagggtgaatctcaaagatgaaatacacctaggggggggtgaataggtgtttttgtgcaattttaaaaattcccaacatatattatctaaccttagaattttacacaatatattcttctctttaaatcttttctaacaaaagaattaaagtcacaagcaagtatgaatgcaacaatactctcccaacaattttcaaatgtaagtcacatgcaaatgctacaacactttcccaacacaattcataagaaccatttctcatcaacacaattttcaatttctattgaatatctatatcaaaataaccagaaaaaatattcaagataaccaattgaaaatcacaactacttcaactcattattttccatgtaacttttatgcccaagtaaataataatatcaaatgtaaaactaaacaaaaaattaatcaagcattagaacaagagaaagagagacattgacaccaacatttacgttttccaaatccttcttcggactacttgcttaatgaagatcaagacattaaatttgctaagagactaaggtatgtagttaaggttggagttggatggaattaaatcgatcatattatttaaatgttgttttacttgaaatatttttttaagaaattaggaaggcttgggaatttttttttacttagtgttcaaaatgccttgttccaggatcaatccaggaataggtcggatcgatccaagttacactttcttgatttaatttcagccgttggatctaagccttgattcatttaaaaaaacccccaaaatttgcttcttgatgggtagagagaagcaacagtagccgtctcctttcctattttggggtgtttgtttgccaagaaaatccgtctttctacttgttttccaaattgttttcaacggattttcttgataaaaaaaaaaagagttgattcttttattcattcatctctctattttgaaactattgggtttgggaaaaactcgtttttcttcttgtgtggattcaagaagaagtcgagatcaagcttgctatggattccaagtgtgcttaggaataagaaggtgagaagctgaaagtgaaagatgctagtcaagtggtccgagaaggattggtaagcttgagttaggtaaaaccttgtgtttaatgtttgttcttcatagtgaatgttttcgatcaatcgtacgctcgtggttttttatctcctcaggagacacgtaggtattttgtccgaaattgtcaacctaactaaacactcataggtcccataaaaatgtgtgtaatcataagaaacataatttcaaaaatctaaaaagacaaatggattgtgaagaaatgaatgcaattaaccaacccaatgtgctgaattagagctttttgacaattcaaggataactgtggtggctctaacaggaaaaagaacccttctattttcaaagccatcgctctaagcaatatgttgattagcattaccaatattgatctggtagttatcatatttattattttccttaggcttgactagactgggaagagattgacagtaacattgatggtgactgtgatggtcttgattcagaaacaggtagacgagaggaactggattggaaacga

SEQ ID NO: 13634 - DNA, 2708 bp, Vitis vinifera
  Intron number 17 from transcript GSVIVT01027213001 (locus GSVIVG01027213001) derived from phytozome v7.0 (chr-ID chr 13; pos 18116465 to 18119172 reverse strand)
cactgtgcgggtatgtttcccagtttgattcccccttttctcactattttgatggtctgactggaacatacacaaattattaaataaaacctgaagaattgcactgctgagtactaaatttgaaaatatcctgagtttcgtgatatttgtgttttatgatcgagtaactactgtactgttgtgctagactaaaattgcatttggttgcatttaattgaggcctgggaattggagactgaagcccctatgaacttagtgaaaaacacattatttggcatcaatgtgaatcaaggcaatcttcttatcccttttagttggcccctttcttatcattatatctattagaggggaatcctaaggcccgagttttgggacccatttttcaccctttctttttctttttttcagttttctgtcttcctttttggaaagaatctctaggaggttggataaagctggcatttctttccttgggttagagaatcaagtctgttcaagcttgtttgacccatattccaacttatgttcaagcttgttctagcataacttctgtactcagagtcagggaagggaaggaggttgcttgatagattagaatcaggtttttaaactagagatcgaagggattttgggctttctgacagtttttgtgaggaataaaactcttttgaatagtgatttcttgtgcatagggtatgcatagttggattctaatgaatggaaagccaacagtgtggttgggctatcacattgctacttataccatatcaagatataataacatatcttgaattatagtttatgccaaaaaaagtgtatgaagttgcaaaattttaagtaaaaagttttacagcctagaaaggggacctacacaggatgatgatcttgcatcactattctagattttttttgttcctttaaagatgtttttcccccaaggaaattgggaatttttcatcatcttggaagttttgtgaattttgtaaaaatgcttggtacaaaattgcatgcttatctacatgcaattgatggaatcagccacctcttttacctattgttgataagccataaccatgagaattagaaatgaatcatgtgaataagcttacccatctttgaatgttgttttagttcctttggttgtttctctcttcgcctttgtcttttaatggtttgtgatgctttcaaatcaattgttattggtgcagcaactctaatatttacctagccacaaggaagaacttggatgggatcttttttgttagtttatgtgcatgaagccacgcaaaggcttgtgcttgtggcacgtagtcctagtggattcctcggcataaatactccactgtttgaacattgtcctctttgatgatttaggaagtgtcattcacaatcactatccattgtttgttgcatgcttataaatgactgaaactacatagcatgtacatggataggggacatgtgaaccaccagctaactaaaagctgaagtttgtgcaaaagtagactcaacaatatatatcatgttgaaaccatcttctcatgtgaagccccaacctgtttgtagagagaaataccaatcacaaacaccaattgttatgcagacaaaaatgttattatagtctgtacaaaaaacaatcaaattggaaaattaggaaactatttgaatttagtctacaaatcagcctaccaatcggcctagaatcaagtaaatcaaaatatggagattggctttccacattgagttccaaaatgagtttgtttgtgatttctggcagtgaagcaaaggagggactgacgatgaagtggaggggaggtcgcccacaaagtggaagtgctctcactcattcttttgtgggtggctgaagattgtatcacacaaggatggaaatgtcaatatcaagaagaacatcaatgggccaattatacggaaatattgatatcaacagaaatattggtcaaaatggaagaaacctctgaaactaacgttaaaacatgaatgttttggatgaaactttttggaacaataaaacaatcaatgatgcacagattaaactagtttcctttttaaataaaataaaatatatatgtgcattaaaattagtgttattgattaataataaaatgtctgttgatagcaaatatgattgtgaaggtgaatattgcatattaatttgaagataaaaatattttcatgtgtactgatatatacatgttatgcatattttcttcgtgttgatatatatgaacaaacaaacttcttgtaattagccaatatggagtttgcaaaagtaaataaagaatgcttatgagcttatctctataattctgcaaagtctaattttgaatttaagatgtgaacaatatgtatggaacagtatctgataagtattcttgtcagacatgtatcagatacacaggcatcttctctaagataggcatcatgctcgtgagatatacactaatttcttggatgcaccaaaagcagtaaatagtggaatgcaaataagttttatgtatttttgcatgaaacatacatagaattcagttaatcatcacattttagttgagaattcttcatacccggcatgtgttgataaataatatcaaaagcttcatgaatatgaaatttatttcaggtatggttaatgattctaagaattgctccctgtttttgtaacagtttttttacggcttcctttcgcagcc

SEQ ID NO: 13635 - DNA, 1126 bp, Vitis vinifera
  Intron number 20 from transcript GSVIVT01020920001 (locus GSVIVG01020920001) derived from phytozome v7.0 (chr-ID chr 5; pos 17147285 to 17148410 reverse strand)
gagtggagaaggtccgagacccctttcaaggccaggtattattgcattttttcatatgtttagatccttgtcatgcttatttttactctctgaccatgcctctcacaaaaataaataaataatcatctttaccttctgactataggattctttaattaaccctttcttttatattgggtattttatttgcaaaagaagctaatatagtctgggcttcataggtagagtatttatgctgtatgaatgtttttctttttttctgtttttctttttttttcatgcattattattacatggaagtactgtgcctttccattttagggcagaaaagtcattcttgactaaatactctagatctagtacccctaggccttggcccaggtggtaaagccgtggattggggtgaatccctactccagtctcttgcatatgtgcaaacaattctacttatattgtctttggctatgtgttatggttcaagctgaacttgggattgcatttgcagcatggttttaactttttatcagcatatgtattactcccttttttttttagcatttaatatttttgcttgtatgagatttttcattttttcttgcaaattttgttttacttaagagatatctttactaaatttcaaacaatttgaagccccattctgtgtatgttcattttttaactgactatttttaacaatttttttcatttgtgcctcatccatgataaggcattcctctatatttttttgagtgcttccagaaggaagaaattttattcattgcttaaatggtagtgtggacattgttggctacctatcttgttgctattattgagcatgttgattgtggagtatatagcattttctgtaacagtaccatatgtttattgcctttttttcagtttgctctgtatttattattttaatatcttgcacccttcattgttgtagatttctttcattgttttttgttaattggaacttgacatgctcagttaagccacccttgatttttttcctcctcattttgtagatttcttttattgttttttgttaattggaacctgacatgctcggttaaaccacccttgatttttttcccccttttttcttttcagcatagcacaa

SEQ ID NO: 13636 - DNA, 28957 bp, Vitis vinifera
  Intron number 4 from transcript GSVIVT01023546001 (locus G SVIVG01023546001) derived from phytozome v7.0 (chr-ID chr1 4; pos 9853355 to 9882311 reverse strand)
caactaagccaggaaacactccaactggagtcaaggtaaacacaaccttttggttaaaagacatcagctgattcttattgtgggcatgatgagaaactatttgataattttctgattctttagccttgttaccactttgactgtttgtgattgtcattggcttgcaggatgttaagtaataggtatgtatgttgtctatgctgttaataaatttactattgtactgctgaattgacatttccattagtagaatcacataaacaaacttgagatgttttaaggttttgtgtgactagcacaaatgattaccattgcaccctctgcccattgcccaccctaaaaccgattctacaattaacatcctcctacctgcttctgatagcctgccatactctcaatccatacctttccctcacctcttttaggcaccatcccccctctctctctccacactttgctgtaatctcccttttggctctcccaaaaagagttcctctcagtaacaaatcatcaataccaaccaagaagagtcttgttaaggttggatggacttctaatacccaagcttccctcctttgcctaagtttcagttgccgcagctttttctgcctgcagcagatatttggaggctagtgggtaggttgaggggatggtctttaggcatccttttttggcttgagttgggctggtgggccaagcagtgtcaaggcctccttctcctacaggcaaggaggtgggaggccctgagtgccttaggccttgctctgtctgttgacctggatcgacccctttccctgggatgttgttctctggcccattccttttcggttggagacagagcccctttctgccttgtgttgagctgttcctgttgagggctcacatgatcttgtcatggtccagcccaaaggttctttaaagaggcttccttctgctggtaggtgaaggacacatggtccagaagcttgccttaagcctttgcttcttggcagcaacacagatcactgatgaacaagtgctatatgctgatgttgctctcttctgtgaggtggaaggtttcacaggtaaggcctcgtcttttgttttgttgttgaggggtgggatttctcctttttcttcttctattttcaaagatgagggtgtgctaatggatttggctaagagcataattctatggaaggaacaagacgaggggttttctttagaaagcaagggaggtggttatggacctttgtggatgttctccaatgaggatctggtagtggatgttccaaaaaattcttacaacaatgttgggtgtgcggtcattgatttatgtagtgaggcgggggctctaggagcaataagaacatgctggatgatgggagcttctcctctttcaggaatttcatctccttcagtaagtctttgtgtagaacctcagacgctaccaactcttccaaaagcaattgttgttaggaaagacacataccctagccttatagtgcattcacccaagcgcccacggcaaacacaaggggagttgatggacggggccaaccctccgatctgccaacaatctcccccccagcgacacccttggggttcgaaccagtgacctcgactctgataccacttgtaggacttcaggcgctattaactctcctaaaaacaattgttgttaggaaaggcgcatactttacccttatagtgcattcacccaagcgcccacggcgaacataaggggagttgatggacgtggccaaccctccgatttgccaacactttgggatcacctatggatggttttcagaaggaagttgtctccctattgaggaagttcgaagctagaaagggtcgtacaatgaggtctcaagtattaagaggagacctttgtctatatctcgttttgatagggagctttggaagttagagagcttagttaattacaatcaatttagtggaaaagagaggagctggaagagcgggtggaaagtggattttgagtgtttaggttagagttgtgaagagtggctacgaggttaggtagcagtgatgtaggctctgtttagtcaggagttagcatatttggttggctgcaagttggatgtatgagtgccctctgtttttctagaactatagggtgttatttttgtattgggttttggtttgtttctcttttccctttgcttgcttttagcgcattttgtatacttcatgtgtacttggtgcgccttttccaagcgctttttaatatagtttgctttttacctatcaaaataaaaaacccaagctcccctccctcgtctgtgcaaactgttaaaccaatttgttggctttttcatcaaagcacctgcccctaaacaaaatcccttggtaggctaggaaaagtattttttttttttaatcagcgttagctttcctccttttgataagtcatttctcttctatatagcaatcaatttctgaaatctttctctccttcatgtgtaagcatccttgggcttatatgtgggcttaataaattggggaaataaagtaaccttttttaggcttttaataaattgaggaaataaacatgcagtgatgttcaaatacatgaccttttgctaggtgaggctctaataccatgttgaaccaccaattttcctaaaagcttaaacttgtacgatttgagcctataatgcatatcattcactctaatagaccacatccaagatttgtctaccttttacacatgcatgttgagaagttgaaaccacttttcccatcatgcaaacccacccccccaccaacacccacattcacatccacctaactaattggattctgggcaggccaaggataacggtttaaatgaggatcttgggctggtaagggctcagcctcattcagggccagagggcaaagcccaagtgggagaggcctcttcttcaaagagactagatccaaatttcttgggatggccagtatcagagtcttccactttctgggagaaggatggcttacgtaagcaatttgaaagagagatccaagctgtggagaaatcgaagactgatttggccttaattgaggaagcttcgaggtatgggaatgctcttaatcttaaaggagcattagtctctggattctctccccctctctatttttttcatggtcggactcctgaaagggagtattacgactattctggggccgtgtgtgagaccgtccagggggaaacgccgttaggtatgctcaatgcttcgggtttcacggagggtaaaaccgttactcggtgggagctggtggaggcaaataacggttgcagtgaagtaagcggagcggaattgagaccagatcaatctaagcctcgagaaggtagagattgggaggaggccagttgggaggaaagcgatttggttagattcagcaatttcttggggttttccacagagggactggagaaggagatcatggattttctggttaaaattagaaagagaagggaaagaatccatagtaagtctttgttggaaaaatctaaatttgagagggagttaaggagattagagtgttctatcaactacgaaggagggaaaaggcagattggtggtaggcaaggaagagggtgtcaaatcttagaagtcctatgaagttaagacttttgagttggaatgtccgtggagctaatgatagttccaaaaggaaggtgattaaggccctgattagaagccagagggtggatgtgttctgcctccaagaaacaaaaattcaagctatgtcggagggtgtggtgagaagcttgggtacgggtaggttcctaggttggggggccttagaagcttcaggctctgcaggagggattttggtttgttgggataaaaggacgttggacgtgctcgatgtggaggtgggccaattctcaatttcctgtagagtccggaatgtagaagatggtttaatttggatgttcacaggagtgtatggacctttctctagagaggaaagggattgtttgtgggaggagctaggggcgattaggggcctttgggatgttccttggtgcttagggggggatttcaatatcaccctttttcaaggggaaagaagtaggcaaggaaggactactggggcgatgagaagattcgcccagatggtggacgagcttgagctgactgaccttcctttgcaaggggggaggtgtacttggaatgggggtaggaggagtcagtcgtgggctagactcgacagattcttggtgacccagaattggcttgatcattttagtggggtgattcagagcaggctgccaagacccacttcagaccactttcccattttgctggagtgcggaggtcttaggaggggtccttctccgtttaggttcgaaaatatgtggttgaaagttgttgggtttaagaacttgcttcgggggtggtggcaggagactgtggtgagagggactgccagcttcagactggcctcaaagttgaaggagttgaagaagaagatcaaagtgtggaatagggatgtttttggtcggttggaagttaacaaaaacttagctcttcatcaagtagagcattgggatggggtggaaagtgagaggatcctttcagagagggagatagagctgaagaaagaagctaaggaaacctatcagaagtgggtgctgctggaagaactccattggaggcaattgtctagggaactttggttaaaggaaggggataggaacacaggctacttccatcgaatgacaaatgcacaccgaagaaataatacattggacagaatcaagattaatggggtatggctgtcggaggagcaggaggtgaaggaggggattgttaatgcctttcagcagcttctctcagaagagtcaggctggaaagctgacatagaggggctgcatctaagtcatttaagtagtcaagaagctggaaatctggagttacctttctctgaagatgaaatacattctgccttgttggagatggatggggacaaagccccaggcccggatgggtttacagtagctttttggcaagaatgctgggattttgtgaaggaggagatcttggagctattcaaggaattttatgaccaaagatcttttgttaagagcttgaatacaacgtttttggttcttattccaaagaaaggaggcgccgaggatttgggtgactttcggccgattagcctgttagtgggtttgtacaagcttttggctaaggtgttggcaaataggctgaagaaggtcctaggaagggtggtttctttggaccaaaatgcgtttgtgaaggggagacaaatattggatgcttcgcttatagctaacgaggtgattgatacttggcaaaaacgtaaggagaaagggttgatttgtaaactggacattgaaaaagcctatgacagcataagttgggattttcttatgaagattctgcgtaaattgggctttggggctaggtggatggagtggatttggtggtgcatttcaactgccaaattctctgttcttgttaatggagtgccagcaggcttcttttcaagcaccaaggggttgcgtcaaggagaccccctttctccttatctttttgtcttgggtatggaagtgcttagtgcacttttaagaagggctgttgtcgggggtttcttttcaggctgcaggttttgggggaggggcaggatggagctaaatatctctcatttgctttttgcggatgacacaattattttttgtgaagcaaggaaagaaaacatgacttttctaagctggattctggcttggttcgaggctgcgtctgggttaaggataaatctagccaaaagtgagttaattccagttggcaaagtggaagagattgaggagatggccgtggagctaggttgtaaggtggggtctttgcccaatgtgtatttggggctgccgttaggggttcctcacaaggcttcctcgatgtgggatggggtggaggagaaaatgaggagaagattagccttgtggaaaaggcaatatatttccaaaggtgggagggttaccctcattaagagcacgctggccagcatgccgatctaccaattgtccctctttcgaatgcccaagatggtggcaagaaggcttgaaaagctccaaagagactttctttggagagggggaagcttggaaaggaaagttcacttaattaattgggaggtggtgtgtgctcaaaaggagaaggggggtcttggcattaggaggattgcccttttgaataaggttttgctgggaaaatggttatggaggtttgcctttgaagaagataagctttggaagaaggtgattatggagaagtttggtcaagagggccttggttggaggactaatgaggctcgtgggacgtttggagtgggagtttggaaggagattctgaaggaagctgattggtgttgggataatatagagttcaaggtgggtaaagggaccaaagttaggttctggactgaccattggtgcggcaatgcagcgctgtcccaaactttcccccttttattcgaattggcagctcataggaatgcaacggttaacgaagtatgggaccctagctttggccaaggaagttggaacatcagtttctctagagactttaatgattgggaggtggatttggtaggtaatttgctgtatatgctaagggactacaaaatttcttcagaggaggattcggttttttggaaaggtgggggaagtggcatctttagggttaaggaggcttacaatctgctagttgcttcaaacgatattgtatttccgaataagggcatttgggtggacaaggtcccaactaaagttgtgttttttgcttgggaggccacgtggggaaaggtcctaaccttggataggctttaaaaaagggggtggcagttccctaaccgatgttttttgtgtgggtgtgaagaagaaactgtaaatcacattcttctacattgtacagtggtccgggttctttgggagattgtcctagccttgtttggcattcagtgggtgtttccagaaacgattaaagatatgcttttcagttggaggggttcttttgtggggaaaaaaaggaaaaagatttggacttccatcccgttgtgtattttttggacggtttggaaggataggaatagattagcttttagggggggatttttatctatacagaaactcaaaaattcttttgtatgtaatctgtggagttgggctagggtgtatactggagaggagtcctcttcactcttaggttttctagagtggctcgcgtccacttgagggtaggtatggttgcgggcttcttctggtttttgggttgggctgctttgtatacgtcctgtatgctgtgtggctttttgcctttttaatctaatatctgcttacttatcaaaaaaaaaaaaaaaaaaaaatcttttgcaccccgttccttttgggactaacactataaaagtggcatttaggcttcttttaaaagagcttaactaaaaaaactatgcaaaaaatcccatcacctcattttttcacaaagtccccaaaaaaggccaaaaagccctatgggctttatccctatacaaactaagagtgttgaatagaccaccaccttaaaaaatggagtctctagggactttaaatcttctctacccgaacttttaaacatcccgttgagatttatcctttatgctccaaactcgaaaagaagactatagaaagcacttgtcattctttcctttatgtctacatcttccaataacatttctccattcaccctagttttagtcaaatattttcttcttcaatgagcattagtcattttatgaaggaactctgtatttttatctccatttttagtcatatatcttttgattttttcctccaaaagacttcttccattgttgcccactttctaaacttatccactgccttcctcctagcttcaacctcctcagttgaaagaaagacttccttagcatcctagaaactaatctaatttaaagctataactttatggatagtgacattctcaaatacatctcgattccataattttagatcatgttttaatgcttttagcttgaatgctaagatgtggctatattaaccgctaatattgtatcatacccaccaatttctaacaaggtcttggaacccttacgctttcagccgcatattttcaaacttgaagagtgttttgccctttcttatccctcctccatctaataaaatgggagagtgaggttggaaatcagtcttgggagggcactcgaattaagctactgaagtggttcccctttctttagaaacaaggaattgatctagccttgatgaagatgaattattcaacccattagtccatgttatagaactaccaactagagagatgtccctcaaatgaagttcctttgtgatctttgaaaagagccacattgctgttgagcatcttaaacatttgctccttccctcaaggaatcttatcacattgaagtctcctctaatacattaaggtcattccaaagccatattacatcaaccattttcacccaaaattcctctctccccccattttggaccaatcccatgcatccttaaaaacattttgacaaagttgtcctcatagtttttgaatcaataagagattgaatgcaccccacttcatatcaattaactccaacaccttattgccctaaaagactaaagtctcccttacctgacctctagcttccacaaaacactccattccaagaatttgcccatacccaaacttctcataatttgtactgtcatttgctagaccttggtttcttgtaaacacacaaggttttgtcatttgtgatttaatcaaggatttaacaaatttccatttttaccctcatttaacccttctaacattccaagaaagaatgcgaagcttgatcatcaaaccttgatcaactcctaattgctcttcccactcctccctttgcctaaagcaaaactatagttgatgaagcacttcagcttgcgaagctccatctcaaatctagacccaaagatagatttcctttttaacccaatattggagactttgctgcccatttttcataagctctatcctccttaagtggccaagatttctcctttaaatccaccaattggcatccccacaaacttgctgaaagatgcaagcttactgaagcatcccacgaagcgtggaaatccttatcagaacaacaagggggagattcctttattgcaatagtccccgcttccaactcctttgcttccacatcactaacgcttctcatggtgttttcaatggactccattgatgtgccaccaatcaaaatcatgtgtagagtcccatttgcctctccatcgggtttaacaaagtgcactctaagttgctcactccaccctttcttctaaatgctttcctttagatagaggagaaggaagagagaccttgtaccctaagaaggaaggagagggaggagccatacttgggaagcatgacacttctagcataagagttttgttgattggaataggtctcaccaaagttgcctttacattagccagcttctctattgtgtgatggcaaccacccttactcctcacgttacgcaattgactttatgaagcaacaccttttcacaatggctagggcttgtgttagcaagcttctatgaatggtagagggcttgtctgttattgggaggcccacatcgaaagaacgtgtcggccccctgcctccatggtctccacaatgcatgacatacccacttcatcgtccctaacctcttgcctccttttaagcggcattgggttaacttgagaaagccatggtgggacctctcaccacaaatgaatgacaaaacaagacagacaccaccacctacagctttttggtaacctccttccatttgttttaatcaaaactctcaccctttgcaaattgcgccgcttcatcatgtcttcatttattggcatagattatttagatcgactaagttgggctggatttctcttaggagtatttgtaacatgatgaccattgcatacaagggattgggaagctccaataaaggcttggtattgtggcaaactacttgtctggctttgatctaggttgtgcggcaggaaagaaatgttagaatttctgagtctaaggcaaggacttcagaggttgttttggacaccattcatttccttgcttccttttgggcctcttgcaccataacttttaagggtattccccttaatatggttccacatgattggttgtcagtgtgttggtccaaagatgtgagctagcaaggagaggtggttttgtgtactttccatatggtgtataggtttacttagtaatttggaggttccatttgtttagttctttgtttttgggaggatttcttatccttcttttctactttttaaatctttatttaatagattacattgttgtttctcataaaaaaaaaaatggtgtcttcatttattgccatgaaacccccatatatatatatatatatcccaactacttaaaaaactccctatcccacaaggaaatcagcagccccacaattctcacccaagcttcctttgcatggatcctctaaaacaacctaccttagggacccacttgtcaaacaacctctttttcttaaaaattctcccctctcaaaaaaccttgtttgctttggtgaccttttcaaacttcaacgatatgagagatcatcctagcaatgctaaatggaggctcccttgcagacaagttaaacctaaaccccatgcctttagtgaaggcaagaacggggtttggtttgagaagtcacccttaccttatgggaagactagggaggacctttttgcctccattgagtacacaacaaaataggaatcgcttagcaacattactctgcaactctacttataattcttgccatcctctatccagctcttcctaaaaggcttcaggtcctcttttagacagcaggcctccacccctccaataactgacaaactcttcttgccaaatctgacccattttcagaagcctcaactcctctctataatctttccaaccaccttgcttttgactagctcaaatcaaaatcttgaatgattatgattctacttcaaactgttgtcttcctcctctcaattccataccaattctcttcctttactttcctccaactatacaactattagtaaatgaattacttttatgtcaacattctaccaaaaattggattaagtgctatataaaacctagtgaaaattctgaaactttgttgtgtccctgaattcatcagtatcaccctacttgctcacagctttctccctgttggaatgagcatagcctacctaggctaggctcaagcaattgagattgggagaatcatccatgacatttgcaacaaggattgatttcccaatgatcatacatattgtttaatgtccattatcattctcttcaccagtgagcataacccattaggggttattggctgcctagaaatctattctccagtcatggactaggattgatttcccatcaccatttcttaaatcctgtccttgcttattctcagttcatatattttgacttcgataattttgcaatgattgaggtgtagtagacaagactttgataacattatcattttgacttttaagtctactaatggaatgtactctcccaatttacttttggaactgtgggaacaaaacagatatctatattgcatttttcctttttagtttatagagaagtcatattttcttcattaatttgtatataaaacatgacataaatggcgctgaaattggaaaataaatcatgttggttttcttggttaaactgtatattatctttttttttttgataagatcttctaagttttgggatgatttctcatcttttgttttacttttatttctaattcatttcaatgaagttttctctgattaaccaacaacaaaaaaaaaacaaaacaaaaaaaaaaaaaaaaaaaaaaaccaggcacatttcttatcaataatcttgtccacctggtagtattgtctacaagtgcaaaataatgctaaaatcacatattagttggttaatgatacattgaaatgatttacttatgctattgttagctgttactagaaggaaaagatgaagtacattgtttaacaaactgagacacttgaagatgtaagtctgatggatttagaagtaagccatcatcggtccatagaagtaaggattcaaatactattatatctatgactatgtgagcttatcattggagccaatagatagggctaactggtgaaaaagtatccatggaacagactttataattctgattttaagcttggctgagttgacttgtatgcatgactcctggatttgattcttttgaagaattaggacatgactctactatataaattgcttgactcatgacaacttccaatcatatccctgtttgtggagcaaagaaagctctaatcagctttctgcttcaactggtgaaaatcacaggtttgatgcattcccattacataacagaaaatggcaaaaggttatattaggattagaataggaacacaaggtgattccattcaactactggggtgttgagcaccttccgtgcacatttttaaagatgtttccttgtcaagagatgctaaagctatttacagttggtacttctaagttggaagcaaggattggggcaaagggcaacttgaaagaacttcacttcaatcccagtaccaaaggacttgacttcaggagtggattttgaaaggttgtttacttcctccaaatcaccttgtgtaagaactagtggaaagaaaggaatttgaaacaaaataagacagtattaatagactgttgaatgaaaatgcttgaatgggaatcatcttagtgactggttatagacttatgagtaaaagcctccgggaggggagagacaatctttcatgaaagaggggcgagcaagtgatggattaggaaagaaataggtaggccgtctaagtggtttttttgggaccttggtagctatatatcatttctaagctatcagagtccaatcaaagtgagcaagagatacaagaatcatcactgacagatgtaattgagaaagcaagccctaattcttttgaattaggtttcatactccggtcctggtccctgttaaagcctgattgttatctgcaagtgttattttgtctgtgggctggtgaactttgcaaaaatgcttatgttgggaaaaggaggacatctaactcagacttacctacccttcctgaaagcaagtttcagctattgatgtagcctgttattggtactgctagtcttgttgctacctactagaggagtgccttctataccacttaatagaagcaaaatctcatcaacattgattgaacaattgacctacacttcaattaaaggaattgaacatgacttcattgtatgaacaggttcttgataaaggattaatttttcttaagaattttctcttaaaatctcagggaatatctctaagaaataaatcctcaatctcaaattagtgagaagatatgaacttgagcttggatggggctgtatcaagtatatttcttgtaaaatagaactttttaaagaaagactgagatcaaactactcgattaattgatgtgcacttcagcaattctatcaatcaaagcttaatttggctcactttcatctttggaagctcaatttaaacgaagacccaactagttattattagaaccaaaaatatttttggttccggatacatttatagttgtatctagttttaatttattttatgattaatttagaccgtctttaaaggaattttggaaggattaaataatttggaaaggtctcattagaaatgttgctcaagggaagcttggatgagtcctctttttttttttttttttttttgatatgtaaaaagaaagtatatttatcgaatagaggaaacaccaaaaaccagtgccctcgaagtatatagggagtatacacatcaccttccctaactaggagcctatccagtctacaaaacttacaagagaagaatgactctttactaaggaacccctgacccaagaccaaagattacatacaaaagaatatttcaacctttgaagtgagagctcctcattcccaaacgctagtctatttctctccttctagactgaccaaaacatacataaaggagccatttgccaagccctcttgctccttttccccacaaaccatccattccatccaagaagggttgccttcactatacacgaaagagttcaagatacaccaaaaagggagaaaagaaggttccacaggacccgcgtcttgacacaatgaagtaagagatgatccaccgtttctgctttggatagacaaagaaagcacctatttgccaaagagaaccccctcctttgaagttgctcctgagttaatactttaccccaggaagcctcccaagcaaagaaagctacctttggaggcactcttagaagagcccccccactccaacatagaataaagagacttaactgagaaagcaccatcatttgaagctgtccagatcattctatcttcctcctccctttgaaccccgaaggcatgaatcttttgcaacaaacgctccaccaaatcaatctcccaatcattaaacgcccttgcaaaaaggggagtccaaccatccccatcaccgacggggttccaaacctcagaaacccaaacattctttgacatggacatggagaaaagagaggagaatgactcacaaagtggcccatctctgcaccacttgtctttccagaatctcactctttgcccattacccacatggtaagctaacctgccatctaacaacccccacttcttcctaattgctttccagagcccaactccgtttctccccatcgcatcccgagtatgccatcccccctcctctttgtcatacttgaggctaattacacgcctccgcaacgcctctctctcattagcatacctccaattccacttgcacaaaagggcactattcatcaaagctaaatttctcacacctagctcaccttttcttttctccaagcaaaccaagttccatctaacaaggtgaggtttttgggcgagagctcccccatcccacagaaaatccctctaaattttctccaatctcaacctcacttttcttggcaaataaaggagagacataaagtaaataggcatactggaaagagtgcttctgattagggtgagtctcccccctttagatatatactgcctcttccacatagcaagtcttttgcgaaaaacgctcttcaaccccatcccacatagccaatgaattgaaaggtgcccctaaaggcattcctagataacaagaaggaagcacacccactttacaacccaactccaaggccaatccctttatattatgcacccttcccaccgggatcatctcactcttctctaagttgatcctcaaccccgaacatgcctcaaaccacatgaggagccaacttagataagtcatctgatctgaagactcctcacaaaaaaccaacgtatcgtccgcgaataacaaatgcgagatttgcaaccccttacccctcctaccactcaccctccacccagataagtggcccccactaatagctcttctcagcataatactaaacacttccatggctatcacaaacaagtaaggagagaggggatctccttgtctcaaccccctcgagctttgaaaaaaatcggatggagaaccattaattaaaacggagaatttcactgtagagatgcaccaatctatccacttaatccatctctctccaaaacccatctttttaagaactgccaacaaaaagctccaactaacatgatcataagccttctctatatccaacttgcataacacccctctaacattgtctttcaaccttgagtccatagcttcgtttgcaatcaaaactgcatccaaaatctgtctatcctccacaaaggcattttgggactcgaaatcactttccccatcaccttcttaattctattggccaacactttggccaacaacttggatgagtcctcttcaaatgcagtattagtgctttcttcaaaatttttagtcttcatggactggattggtgagaattgacttggactacattgcaactcaatcttttcatggaaatgccaatttttcatattttgatttgatcaaatccaaacataacttatttttggtgagtgttacttcaatatttaggaataaatctaatgttaaaaataagtcattgatgtgaagttttaggaatttcaagcccacaaagcaattaaaagaaagaaaaagaaaagatgagaaatggtattaagcccatctattcatcaaggattatatttgattgggacttggaaacgatatttcaaagagaagtctttttttagtgtgttaaggtgaatgtctaacaccgtccctacacgttgggctatgagcctattggttatgccttgaggcattttccttgagcctagccttagcctcagggcctttaaaaactatttcttaatctacgccagtatccttatttatttattttatcataaacaaaatatatattgataatagtaaagttcaagagaaggatgaaaggtccttcccacaaaataccagtatcattatgaagatggaagctcatactaattgtcttaacgctgattctttgaatgtagcttcaaacctacaggatttgattcccttctcccaatccctcgttcttcaaggatttattcaagtggttttgcagtttgttattatgctcatatcaaggcacactttttaaggatgtcgttaccttcttagctctatttctatttcttggatttatttaagtgatttttctgtttgtttaaaatttaatatttacagagtagtgtattttccttcttattgtaccattatataacttttcttaactgcattgaactcaagaaatgaaattggtatcttttgttatttttgattccataaaatgagtttgtaatgtcgataaatattgttaattttttgttgttttctggctaataacttagcatagggatagccatgtgttttttagctctctagcttttttttttttttttgataggaaacgacaaaggaatatattgataaaaaggatgtacaagagaaggatgaggaatcctcccaccaaagaaaaacaaaactacaagaaatcaaatacaagaaaatacaaagtaaaaacaggcaaactctctaggttaggccaacccattgggattacacaccgctaatcaatcaagttgtaacacgttaaggggaatccccttaaaaaccttagaacaaaaagcccaaaaagaagtaaggaaatgaatagaatctcaaaggttctctgaattccttgctttatcctaaaaaatccttgcatctctttctcgccacaccacccaaattaaagcgatgcacgcagcttgccataaaacaatccctctcttagaagatccaaaactgttaaaattggtagatagcatgttaaagatgctccttgggataacccaatccgtctttgctaactgaaataatctgtgccacaactccgtcatcaaagagcaatggagaaaaagatgatctactatttctccatgtttcatgcacaacttacaaatgtcgggactaagtgttttgtaaggtcttctcaactgtagcaagtcattagtgtttaccttcttgtgtaccactaaccaaacaaaggacttgactttgaaagagacttgagaatttgagacgaacttagtagggaaaactagaggcaaaccagaaaattgggataaggcaagaaagaaagatttgactgtaaaaaatcctgaaggagataaagaccaggatctcatatctggaaccgaaggtgataaatgtagacgatcaagagaccgcatgaggcattctaaatcttctatatcagaatcggaaaggttacgacgaaagttaaagttccaagagaaggggcgagtagagccgagaattgaagaaataaaagtatttttatccgtgactactctaagtagtcttggatattggacccccaaaggttggtccccccaccagaagtcttcccagaattgaattctttccccatctcctaccacaaaccaagtaaacttggaaaactcttgggagacttgtgcaatagccttccaaggacaacgatgtgatcatctgactatagtgttggcatcccaaccattggaatgtgatccataaatgcttaaaatgacctgatgccacagagctgaaccctccctaggatatctccacaaccatttccctaagagagcgaaattccttatagaaatctttccaaatcccaatcccccttttgccttcagattacacactacatcccagctaaccagatgatctcttttgccttccccaacccctgaccataaaaaatctctttgcaatctctcaatttttgctgccactgaggcgggaatcttaaacaaggatagaaagtgacagggcatatgggtgagacaagattgaatgagagttatcctgcctccaaaagataaatatgccttttgccactcatctaatcttctcgagatcctctcaatcacaggatcccaaaagccacaagccttgagagatgattatgttcaagattaatgccataaatattacttttgtcaaggttaaccttcaacctagaaatatgcccaaacactagcaaaacactcttgagggtcagcatatcctcttctcgagtgctagaaaaaaaaatggtatcatctgcaaattgtaaatgggacacccttgttctgttcctacccaccctgaaacctccaaggcatttctttcctctgctctcaataacatcctgctcaatacatctacaactaaagtgaacaaaaaaggggacaaagggtttccttgtcttaaacctctagatgccttaacccaccctttagcgtttccattcactagaactgcaaaagatactgaggacaaacagcctctcatccatttcctccatctaggactaaaccccttcttctccaacacatgatccaaaaaatcccaactcacatggttataagccttttcaaagtcaattttgaagacaactccttcctcccttgatcgtcttttctcatccactatctcattgactatgagaactgcatccaaaatccgtctcccttgaacaaaagctccttgagtagaatggatagtttcatgaagtacccctcttagacgccctgctaacactttggctattatcttgtaaagactagtgatcaagctaataggtctatagtctgagattttctttgacatgctttttttgggtaacaaaactatgaaggaaacattagtactttgattgataattccgctcctgtgaaactctgcaaacactctcactagatcctccttgatcacatcccaacaatcttgaaacactgtaatggtaaagccatcaagccccggtgccttatccatatccaactgaaaaatggccttagaaatctctttttcagtaaaaggggattccaacctagacgcactctctccagatataggggaccaatttaatcctttaactctccaagactcttcagaagggctcgcgtagagcttttcaaaataccttaagatctcctctttgatgctctttgaattattcaacactaggcctctttcattctccaacaccttgatatatttcctatttcgcctgccattagccactttatgaaaaaaatttgagttacaatccccttccttaacccatttcaccctagctttttgtctccaatgtatttcttccctcaaaatcaactcctctaactccccttttattaaagctctctagactaaaagtttaggggagagacccccttcttgctccatggtatcaaagttagttaaatcaaacatgatacttttttttccctttcatttagctctccaaaagaagccttattccactctttcaatttggccttaacgaattgtaatttcctcatgaatttgtgaccttcccacccatttccttgaagctctctccaccaacttccaaagcgctccttaaaattaggatgttgcaaccacatattctcaaacctaaatggtgttgggccccacttgaacggattggtttccaagactatcgaccaatgatccgatgtccatctaggaagaacttcttgaagactttgagcaaataattgttcccactcattagagtaaagaaaacgatctaatctcttgcatacgggatactcttgcatgtttgaccaagtgaatggtgcgctccttaaaggtgaatctatcaattcacattctcttataaaattatcatagtccttcatgcttggggttaaactagaacctctcaattttaaaaaacttctccttgtgacattgaaatcgccacccacacaccaacacagggaagaaagtccaaaaatgtttgacagcttcacccaaaaatccttcctaagtactgtgttgtttggcccataaactgcggataaccataacggttcgcatccatccaatgtgaacttgactgagaccgaaaatgaacctattaccacctcctcgctacgcagttttttagagtcccaaataatcaaaattcctagtttttatgggtgatagtttggcacatgcctgcaattagctagatgaaatctcatttagctattcaaatggttctggatttatttgtgaaactactttattattccaaataacttactgttgtcctttttataaattcaaacatgtaaggaaacttcccccaccaaaatttcattcttgaacttttcagaatattgattgagtatattctctggttgcactcctgaactcttaatttgccatcatggttttgtgagcggaaaattgatcggaaaaggactttaatgtggctgattgtggatgttcttgtctacatgggtgtgtgcataatatacatgtctttgcaatccataaggaaaataaatgataaggatgaaacaatgggagatagaagccttgacaatgtgactaatctgcaagggttttctgcattagtgctgttaaagaacaaggaatgagtgaagtaatgtgcctctcccttttttttttttaattaattagaaaataataaactaaaacacccctataataatcctgacactcaaataacttatcatcattattttccaaatgaaatgacaatccgcctcaatatgtttagtgtgctcatgaaacataagattacttgcaatacttttagtgacttgattatcacaaaacataatcgtaggcttcttagtttcaacatgtaattccttgataaggttttttattcacatgagcttacaagcaacacgggccatagcatgatactctacctcagccttagtgctatatttggccacaacattttgcttcttgcttttccatgttatcatatacccttccacaaaagtacaataccaatacccactagtagatctcttgttagatttagaaccaacctactcagcagatgaataattgaaaatgttaagtttagtgctcttcttatataaaatacccattcaaactatcccttttagatatctaagaatgcaactaaaggcatcccagtgcacttcttgaggactctccttatattgactgataacctataacaaaggtaatattaggataagtcatagtctaatacttgagttttccaatgagacatctattcttcttgtatcaacataatctacacaagctaccttgtcacattaggattcataggtgtatttataggtttagatcataacatactagtcttaataaatcttacatatattttcttttgagacaaaaccaataagagcaacttcaatggccaagaaatatctaagcaaccccagtttttttagtttaaaatgtattattcaactgtgtttttaactcttcaatcacactcaaagtattgccatacatgagtataccgtcaacatgaataattagaaccaatgtacttaattgtattcttcacaaagattagatgatcttaatggcatctagaaaagccaagagagactagtactctacaaagcttatctaaagatgcccaaggggagtgtttcagcccatatatgactttcttcaacttacacacctttcttaactccacttgagcaacaagcctaggtggttgtgttcaaagtaattagaatgtggttgtggttgtttgttgtttctttttgccttttagatatatacttcttgtattctaggtgtgcgccccttttttgtttggcacttttaatataatctcatttggccatcaaaaggaaaaaaaaaatgatttcttgtatatcattgtataaaaatgcaattttgacattaagttaggataaatgccaatcaaaatgaataaccaatgaaattaacaagcatattaaattgagtctagccaccggtgaaaaagtttcaaagtagttgtgcttttaacctttcaatagcatcatttacatggtgtttaatggcaaaaattcacctgcaaccaacaatttttttccccttttttaaagtagttaaatcccatgtgccacaattacatgaagtagtcatctcccctttttatagcaactttccaaccatgatgagagaaaggcccctaataagtcttaagaatggcaatagccgataaagacaaaataaaagattgagaaaagacaagaaaaatgggcaaaatcaaggtttgggatggagtgggttcagcttagtagtatttgtgatatgttggtgatttcctcaagtgttttgggaattctattagaggtaagaccctttggaggatcgcatgtctctctttgttgtggattgtgtggagagagagaaatgctagggtttttgaggacatttgaaaaataccagagatgatgtgggatcaacttcatttttatgtctctttctgagtgtaatctagcttggatggcttccgttatgtacaccctagggttgggtttatagggtcaagattcttttacttgtataggccttttgtttcttttgtatagccctccttggtttagtggaggtttacttagttatttcgatcaagcggccttttgtacctcttgtataaccttctttggttagtggaggtttattaagttcttttgatcagacttgtatttcatggggaggatttctcatccttctcatgtttcttttctctattaatacatctattttgtttctgataaaaaaagaaaaaaaagaaagagtatactgactagcagttctattacctgttcaaagagcaatggcgaggagatggatcaaattaagtcaaaggattagttataggagataaacctctgttataatggtgggttgctccactagcggagtaatctcaatcgtggccactttccttcttgtataggcttcaaaagtttcttagacacgtgaacagtgggagctgatgacacaaccagtttaggtataggaataatgaaaagaggaggatctgaaggtgaaaacaagagttgtgtatcaggagtcaaccctcttaacagaaaaaccaagggacactaaaaaaattgttgcatctgcactaattaagtatctacctaaagtgggatcaaaacatttgtatccttttttgagtttggaatacccaaggaagatgcactttgtggtccaaagagaaagcgtatttgaacttgtagccacataatgcataaagcaacacatgcaaatattcatgaagaaaaggaaggaaaagaaacaaaaagcaaaaaccaaataaataaataaataaataaaacaaaaaacaaagaaagatatagatataaaatagcaaaatggggattgattattaagggcattggatgggagaggattaatgagaaaacaagcagtaaggacaacattgccccaaaatctttttggaacttgcatatgaaaaagcagtaaaagggcaactttcaaaaggtgtctatttcttctctttgccgctccattttgctttggagtgtcatagcaagatgtctgataaataatcccattattctcacaaaaattggaaacagaaaaatataagacttccaaaggattatcaaaacaaaatgttttaataggcatgccaaactgagtttttatttcatgaaacaaggactgaactacaaaaccaagttctgatctatctttaaagaaaaataactaaatgactcttgaataattattaacaaaacttaggggatccttaaatcttaaaacattaggagcatgacatggaccctaaatgtctgaatgaacaagatgaaagaggactagaactcctcttgttgactctagcatgaaaagtagacctatgatgtttgcctaactcataggtatgacactgcaactaggattttgatataactggaaatctcataagttaaagaatgttaagtggagtgtgatccaatcaatacaatcattgggtggaagaaatagaagtatgtagagcaattggagcaagaggtgggccaatacggtgataaacttcattggctttacgccctccaccaattgccttcttcgtggagagatcctgaagtacagaataggaagggaagaattctacagaacaactaggagacttggttaatttgcttacagataaaagattcataggaaagttagagacatgtgatataggggacaatgagaagttacgggcaggacagtcagttccttcttgcagcacttaggatttagaaccattagtcaggataacagatgaatgcatggaaaaattagagaggtcaaaaaaaccaaaagatttacttgtcatgtgagaagaggctctcaaatttataatctaaggagaatggaaggtagcagaaaataaagcaattgtggcacctcagtgagccaaattagcagtctctgtgaaactagacaagtatactcttcttgtgtaagcatgataggagtataacattactaaaggaggaaaccatgggctcgaaagagctccactttgtcacaaaccacctgactttgcctaaacagtttgaccaaacttaaatctgacatttctctgacatatgaataattttaccatagtggtcatgatatctatatcttcaacatgtaccatgtcctccctctagatctcagcctctaacttgctttgtagattcacctttctcatgactagttgaagtaacaatagctgcaacttctttgttttccatagaagaatactccacaaaagaatctagattaacatgttgaaggcaagagtagacactactcaggataggtaactgttaacgaaagagggtattaatcttagcacaagaataccttagacatagactagagagaaactttactactctgaattcttcttgttgcttttgtaacagtcaatatcattaatgataggatgatagtgatacacattgagtttctctcacataccttgtttgaccataatattcactaataaaatctgtgctagaataaatacttgcatatcttaaatccttgaaatatttttatcttacgagcacctttcccataatatttcctaaattcatttggcagtgtcaaagagcataccaataacattgatactaggtttcatgctattctataattaggtcatgattattgatttctccctatgccatcatgctattccataatcaggtcatgaacattgatttctccttatgccattgttcatgtctattggatcactaggaggaggatcatcagaaaaaatttattgccttttgatgggtaaataggagaatatattaaagagcgctagcaaaagacacaactaactacacacaaattatacaaaaaagacctaaatgctagcaagagaaaagggtagagcaaaaacaaaccacgcaatagcagccaaccctaacaccttagaaacctaggtaaaatgctggatggataagaagccatctgagagcccttctgtaaccaaaaaccaataaacaagttgtgagtgaagacaacgacctcatagcgaaagaactcaaaccctattgctccccgcccttccccctaactgagaggggagaacaattgtaattcaccgagcattcaagctttcagatttccctctccagacaagtagacgaaaatttcctacttccccttgagactttaacctcatgtccttttcttgattccattttcctcaaaagggaattaatttccttttcaaaccccaccacttgcaaccccaaaaaactactgaactttgcaaacttactaggaagacttgcagagctaagctcctccccctgtgacaagcaacaagcctccaaggctttgttgacttcaagatcctcatccctacccaccaacaagtacccgaaggacctttttcttcacttccaataagatttaacaaccttccatcttggagcaacattcagagcgactgagagccagaagaaagagtctccaagggaggcatcgcctttgtcttacctgttgatccatcaatgacagtgggaggcccaaccggagatgaagaaggagtcgaaagggtgggcctaccttcgaagcctattgctttagccaaaagggcttcattaacccccaaaacccaccttgccgacccttgctccgctgcctttaggagaaaattgttgaagagctctaatgaggaagaagtgtcgccaacaaaaggtacccttaaaatgaaactaatactcaatgtttcaaaagacatgggttgggtttcaagtggcctagacttatgaagccaatactgattccctttgcacaaacttaaagagggggatttgggtcggcctaagaaagaaggggcctcaccatcattcacattaatgaaagccctccagcccagcaacccacaagggggcccaaaaaaggccccacccaaattattgaccaactttgactgctacaatcctccaaaacttgcacactgcgaccgggcacaactcccaaagccggctagacaaatgctctggcctgcaagtctaccgcatcacgcctcccttctttcccctccactctcctagttgtgcgcgagcatccctccttgttatccctatcatttggcttttgtaattcctcttagaaaccgacatccacaactgtggcggaaattcccacaagcggacgacaaggacagcatctctttccacaaccaataaccgagtaggcacctttttaggcgacacctctcctctgtctccatgtccatcagcataaaacctccacaggcataacccaccctttaaggaactcttttccccacagatgcactggtagacccatcacccttacccacactacactaatgcaagcgccttctctgaagcacccaacctccggctcccaccagtcaagctacaaacttattcccttaagcaagctagacgccaaaatcgaaactctttcaaccttggaaacagattcaaactcaaataaaatgagattgccacctaccaaagacaacttcaaaccccctttcaaacgccaagattgatgagcgcagaaattcatcacgtccagagctggcaatcggtctgaagaaccatcccaccttcccaccaggcacttcttgaggaaccccaaattacttaaacctcccctgactcactttctatccacacatcattgcccaactccctcttatctctgttcagcacctctgcaaaggaagcaaacttagataggttgtcacctctcttttcctcccaacacctgatcggctcctttgactcctccaaaggtcaagatacagggactactctaatgctcctaagacttgtagcaagaatcttccaacccccttggggagcctttccttttgggagaactaaagaaaaccttttttcctctacgcacacagctgggcactacaaaaacctttcagttttgttgcagtgcaactccaacttgtagccctttccccctttattccacaaccttctgaaaggctccctaaacttcccttcacagcaatcttccacccactcaaggagccaagaaagacccctctccccaaatctgatccaagaggaaaaacccccactcctctcaacaatcttccccactgacttacctttaatttactcaaaaaagatttaaaaggacttcgattccacatcaaaacaacttccaacaagagaccccttcttcaaccttgcttcttccatggtcacatcgttgcttctgcaacaaactttttgaattcaataccatcggaaaaaaattataacatgtcctttgttttaagatatatttcacaactttagactatagtggattattggattcatttaattttatcatagcaaatggatatcaaatattgtcttgagtttgatttccgataaggagactatcattagaagtcatttaaccaaatgatagattgaagtaacttgagtaacaaaatgagcaaagggcaatgtccaattgaaattagttttggaactaggagttagggttttgaacttgccttcataccatgttgaacaatcaattttcatagaatcttaagttgttaggatttaggttcataatgtatatcattctctctaacaccttctctcatgtgtccccatacacatgaagagatagacatgtttgtggacaaacaaatcatggatagtctcttttggcttgctcgtggactcaataaattaaggcaataaaaatgcggagaggttagaactttaagagtataattgaaaataatacacaagcatgaacctgattttttctctctcttatgtcacaagttataattggattatatacatgatattacattaatgtgtacctatataaattgtatacatatatgcatctatgacctcgcctatagcattctttgctgacctttcttttcattcttgtagtccttcctcggtgcaaaagt

SEQ ID NO: 13637 - DNA, 425 bp, Vitis vinifera
  Intron number 2 from transcript GSVIVT01031780001 (locus G SVIVG01031780001) derived from phytozome v7.0 (chr-ID chr3 ; pos 4309516 to 4309940)
ggcatctggttatcaacaacagtattcttcacaaggtaataccattctctgagtgttaaaatcatattgcaatatctttgatctgtgagttttacataaagtacatttgatttttttgttttatgctgattgattctctccatagctgtttgtcttgtatactttgctgcatgatttacatatagataagtcctttccagaacttctactttttctgaacttggaatacttcctcttctttctgtattttgccaattgcatatccgcatattcttcttaatttgaagtgctgaacctgcttttgtagatgattaaaattgtagatcggaaaggagttgatttaatgcctttacacatctgatctgaatttgaccaaaaaatttaactatattttcttcaattagctttggttttggctggtggaa

SEQ ID NO: 13638 - DNA, 4012 bp, Vitis vinifera
  Intron number 16 from transcript GSVIVT01037972001 (locus GSVIVG01037972001) derived from phytozome v7.0 (chr-ID chr 10; pos 11900819 to 11904830)
tcaggtcatcagttttacatttgctattattccaggtaggttatgataaaatgcttctatttctttaaagttgttactagtgcacttgtagtgggtctgagacttgtttgtgtgtatgtatgagtgaaataacagtgtgtatctttgagtgatgcaactgtctgttttgtgtgcatcagtgacataacagtaaatcttaaatgaatgcatctctgtgcagtgcaatatattgtttgtagatgctcaacaatattcaagtaatgtctccacttgaaaacaaactatgaaaaagttaggtacttgttaagaatacagttgaaacatcctagtgcctatttctgtatgctacttaaggacaaggttaattgtcattaaatattacacgatgaataatttgctgtgcttttgtcttattttgtaagctaaatttccattgtctagaatgttaaatcatattaataattgtgcatggaattgaaaaactaaactgatcatattatagacttcttttccaatttttctagtggaattagactttatctctttctacactggaaatacatgcttttattgagggtttatttacctcaagtacccacccccttgcgtaacccctggtttaggatcaataattgcacgtataatcgaaccaggccaaatctagcctacactcccttacacagctgtgagaattttgtcctagctagtaaagacatggatctatattcaatacggaatcaaaggatttcccccaatgggccaatgacaattgattgctatccaaaaaaagtaggcagggggcaaagacttaagaggtatatcgaaagtctattattagtcctggctgggtgcacatgttgtgtactttaaaaccgtatgcttatcgtgcactcccacaattaacgttccagtttcctgaaagaaggaaggcatgctttcctgctcccatctttgagagttacaaattgaaaatggactagatccattcaataggtcaacaataggcctctatctatctatctatctatatatctatatacatatccaaattggacttcatttcttatatacataagtgaagtccaatcacaatagccttacttcagggatgaacattgggtcattgttgttttgcattagttaattcttgagcttactaggcatattgaagaagatgcaccaggacttatgctcacatgaaagaaacataagttcgagcgcttgggaagatactgtggtgggttttagaaaagcaagaaatactaatcatggatatggatccctcttgctggatccatcttctttaaccatgttgattgatgagtacttttgaactatgacaattgatgggtgcttgtagggaatccatgtaatatggctttggggcatctttttgaatgggagaggagaggtaatcatagtcttttcaatgggaatccgagtcatatgggctatgggctatgtgctatgggctcacgttaatttggtctttggatgcccttgggaaagggagggtgtttattcttgattctgtagataaagctggttcgcagtggatgctcattgctgttcaggtttttctttttatctatgctgattggatggttctctatatacttcctgtgtgctatgggttgccagaatggttgggagcatcattagaaatcacaaggttgagctgataggatcttttctatgacaaaaaggtttcctaattgaagcggaattcttagcttactttagggtgtgaacatccactttgataggggttacaaacctaatgatggaagggcactacttggtgatgattttttggcatccacatgatatattcattggatgagtcaaagccttaatgtggtaaggatgcaattctgacttatagttaagtggctttggtaagctaatctagtagttaattatctcaccaagttgggagcctcctccacttttgttgagttggtggggagcttatacctcaaggatggtcttcattttttccctaaatttgacttaattttgtttttggtaagcaaaagagaaatattaaaaacatgctaaaaatggtagggtctaagtgtgcagagagtatacaagttaacacctagaaggaagcaagaggaaaaataaaaactacaattcatgctattgatgaatttttaaaagttctcctatttgccaatgaactcctaagaatgatctcaaaacaaaattctttgtaacttcaaaactaaagcctgtcaccaatcatagattcttttattacactccctttcaattcaccaagccacacaatgaaggagactgtctctaggatcaaaactctgtttattaaaatacatcctttaatttgatctagacatttctatccatctgccatacttgaatgtagatgttgcaagaattccttttgaacatgatcgtacatcttttgtgcatctgatgcttcaccttggctccatttcttttttttttgttttgttttgttttgttttgtttgttggttgggttgttttttttttttttttttggtttttgtttgtttgttttgtttgtttattttgaaatctagaattgttgggttcatttgtcatcaaagccacatccaaatctaatgatcttccacaaaaggaattctaagtacctgagaccattgcccttctaagtctttgtgccaacaccttaatgagtagtttctagatgccattcaccagactgaccaattgatttaaaagcttttaaatcctggactccccctttttaggcattagagcaataaacatagcatatggtttgtctcgcattctcatttctcatattaaacttttaattctattgctgcctcttcaaccgcctcccagttttattgccaaaatgtcagtcaagcaaatctggcctggagcctcatctttggggtagtggttttgtttagtgtaggtttttcactttttatatggctgtacttttctttctttgtaagatgtctaaaacttccctttacttttttctcttttcaataatacttgtatttcctacataagcttgcagaaaaggaatatatccaatcacaaatagaggggattaaacttttatttacttaagttgaattgagtaaattctgaacaaggtcaattttggagaatcatgaattattggataaaacgcactgttttggatgtcagttataccacatggtggtttattattattaagatttatgttggaaaacaataagttaacactcttgaccaaaagggtctgcttgtcttcttggttttgtagaatatttatcattatggcaatgtttattttagtccattccaaccttttgatttttccagcctgttgctgttcttcatttatgcattggctaagcatgctaaaagtggagttcctaaagtaaaatcatatttaattgttacctacacttataaagaggactctgtacatatggtaaaagtggagttaaaagaattatatttaattgtcaccaacaattataaagagtagatacactctccctctctctgtctatctcaccctctcatggtcaaagcagttacaaaaatggaaatattatttaattgttacctacaattataagaggaaaataatttaatgaaatacatataagtatgcctcactgaagcaaaagaaatgaaagatctcatttgagccttcctctctctctctctctctctctctctctctctctctctctcccaccacataaacagtttatctgtcattctatggcttaatcattgttacatcccttttattcagttatcaaattgtcatattctgaatccttttttctaaatgctgagagatattttctgttctttggagaacagaaatatggtacatttgcttagagaaggccattttctgcataaattgtcacaatataatttcaaagtttcttgaatcctaaattttacattttgacattgttatttgtatggggaacacagaaatcaggaggattctttttctcaaagtacctgaa

SEQ ID NO: 13639 - DNA, 2298 bp, Vitis vinifera
  Intron number 4 from transcript GSVIVT01028005001 (locus G SVIVG01028005001) derived from phytozome v7.0 (chr-ID chr7 ; pos 3131610 to 3133907)
gagagttggaattgaagaaagtgtaaagagtagttgaatgggattttaaagcaaggaggtctcttggagctttattttttccttgtcgcctatttgtttttaaactaaatttaatgattgaagtataaccatgctctattcctatagcttggcttcaaaatggcctttcaaccaaataaaaaattctatgtacttatcttttgaaacttttgttcaaaatgatttctttctgttttattatctcttaattttttttataaataatgttagaaatcgaagtttcaaatttttgaaactacgatttctaaatttacactaaaaccatattttaaaatggaaacttctaaataatttaaaaaataaaatatgaagaggattactttgaccaatagtttgcaaataggcctagaatatagattttttatttttagttgagggcctaatttgacataaaattcctattcctaagcatatagaacgttgatacttctacttaattaaagattatgaattatcatatttcttgaattccattatattgattaggtgatgtaagagccatgcacatttacgaatgaagccttgttggctaagaccatttctagtccttgctcacctatttcttaattgtagaattatttcaaaactaattaatttgtataaacatttcccacaatctctctattaaattatttataatttaaaataaaaaatcaacttaaaaaaacaaatgcatgtttcagaatattttccaaaacacttatcttaggatattgtggctcacatgaccatttcaatatctctctataggtttagtgatgttgattagacaagttgtcctattacaagaaggagcacaacgggttattatgtttttcttggagcaaattgtatctcttggtgtgcaaagaaacaatcaactattgcttgctcgagcattgaggtcaagaattgctttttgcccttctccacaattgaattgacttggattacttagtttttatgagatattggtgtgtccctctctaaaccactataattattttgtaacaatattagcgctttttacatgcctgttaattctatgtttcatgcttgttctaaagatattgaacttgattatcattttacacgagaaagtaactataggcactcttgtcactccttatgttttcacacattctcaatttactgttatttttatcaaatctttgttaaaagacgtcttcaccatgttttgggataagttaggtgtctatatacatttttactctagtttgaggaggcatgttaaaggaaatattcaataaggtacattgaatcaaacacataaaggataggaagcacataaagacactctcatcaatattttcataaattcagagaaatcaaagaaatcgaatattaattatattttattttatttgattttaatatattttctaatatgttaaaaatattatttatttatttccttctacaactcatctatatttttatataaatttccaaaggaagtagtagaaaacatagcttttattaccaaagtatcaaactttacaccatcaacctaataatttcaaaacaaaattttaccaattgaactataaaatgattagacaaaatttacgttaagctacattgattacggagatggtaagtatcagccagcttgagaggcttacggtttatacaaatattcaatgcaacaggtaatcatattcctaaattttagagactacaatgagaaataacaagacctctcagtcgagtggggttgtaggaatagaccttcaggagagtgtcttcatcctgaaagagttcaattccgcaacaagcccattcatgtagactagatttctttcatttcttggaaatgggtttacaatgatatgtggtaaagtcagtgaaatacatcaacatttattgctagaggagaaacttaagttatgtttggttacaaagaatttgaagaaaaatgcgggggaaagaaaataaagaaaaaaagtaaaaaaaaataaaaataaagaaaaataaaataaaattttaaaattaataaattaattttttatccttttttttttttcatttatttgattcttttatatgatggttaaatagttttaaaatacatcatttttttttaataattttaattttatttgactttctctcattttttttattatattaaaatcaaatataaaaaaattattattattattattattattttctttcctcgtgcttacaggacccaacatagttagagattttgcccaaataaaaagcttctaa

SEQ ID NO: 13640 - DNA, 5503 bp, Vitis vinifera
  Intron number 2 from transcript GSVIVT01036374001 (locus G SVIVG01036374001) derived from phytozome v7.0 (chr-ID chr1 8_random; pos 4328468 to 4333970 reverse strand)
aaaattttcgtttggtcatgcttacaaaacccccatatccatcgtttagccggttgtggtcattttaattccaagggtagaggattcgccctggctgagcgctataacacttataaccaatggatagaactctcaaaacaacaattaaaggcagccaaataataatatgtctcagctaaaagtcggaaacatacttggacaacaacaaaaacgtcaaactaattccaataatagtcatttatctagagttttgaatttgtattgccttttatcatcttcaaattcatatttggctcatagtcttcaatttattattaagttcggagatttggctccaagtcttcaatttattattaaattcagagattagccattgaagactttgaatgaagagtgaatttgggtaagaatgtgtatctttcaataaaagtctaagaactataatgctttatgatgattatgtgtactcacattcattttcattataatgatttattattaatttttttataattattggtacaaattttatatgtttgtttaccttatcaaattgaaatgatactttcctctctctctctatgagccaacattatacaaccggtaaactttatagtaaatagttaatatagatccaagctttaaggtaatttagtggattggtaaaaatgcccacaagattgatttgcctaatagctatggtgctttaaaaacttctaatgcttttcatctttctccaaaccatggtaaaaaaaaaaaaaaaaaaagatctaggttttgagggaaagtcttctccaataaggggagcttgacataagagtgtcctattatatgatccaacacctagttaaaaaagagttccaactccttacttcaatcatacaagatgcatgggagaatgaaactacttttgtaggggtatattcaagttaaatctagtgctagaatagtgaaaattctcatgcatactatataccacattaaaggtctttgagttaagattcaaatgtattttatgagacttcatttgaaattctagagaggaagttatattcaattttccataaagaagtgtaattgtttagtgctacttgagaatcaaagaagttctacttcttaggtatattatagtgaaatttgtgatttaagttagactttataacttactaatggaatatagtcttggaaattgttcatgtttgaagggttgttccaagttaaagaggtaggaagttgattgatgaaacgcaaaggctttggagaaaaagggtgaatggttgaaggattacttccttgctctatatcccttgtgaactactttgggtggtgattgaatttatatcccttagtatttacttcatgggtggtgagattgtattttcctttctatctatttagttcttttatttttccatctatcttggtgtcagctatagttcactcattttctataaaaattattttctacaggacatgttagaggggtttaagaagaaagggggagctaagttttgatgttatagttaagagacatacaactaaaggacatgggatgttgtgtctttttaagtataagtgtttttaatggttgaagagttttgtaataagattagaagtagaaaatattagtacttgtaatatgtaaagatgaatccaaacactttaattgatgcacaatgtttaatggaatgaataaaaatgcaagtattagtatttttggtattgaggtgttttgattaattttgggtattttcatcaattaaacttataggtttaatttactcatggtgcaacaaaaatcacttaatggtgttaagggttcattaatggagggaaaaaaataattaagtttcaaaatttaaaaaataacataggtaggcttgggtgtgagtgtgccattcaatttgaagatgagtggtgttggaagtgtactatttttaatctaggtatattaagtgtgattctaatttggaaggtacgtagaatattcaaaagctaaggtgcacaatttgagttaattgtgttgtttgaatgaagtgcacggttaagtgtgctatatggtacattgcactagaggtgcactaggtgcattaagtgagtatgcaatatgaagtgtagctatgtgagttcgcaattttagtgcgcttgggaggtgcataatttgggtgtgtaggttagatgtagtgtgttgtggctgtgcaacattttatttgtatgtaaacatttaaataaatgtccttatatctccattttactttgtgatatcttcgtttactttaaatttataatataaacaatgaaatagtcttcatttgaatccaataaaaatacttttagagcataattttttatttcttgttataaattgacaatttttactaaattcttttaaaaaaatgagtttgtctaggtaaattcactagagataaaaatctagaaaaattattttaagtatcaccaacacaaaaacaataaaatccaccactttttgttttaaaaaagactcttaatccattgtatcatattatgtatattaaaattaaaattaaagttattgagtttgaaaataaataattagcttatatttcagatattatattatggtgtttcaacaacctccaatgttttttatttttatttttattttttatctttctccataccatattattttaaactatagtttgatttgcctaatatctatggtgttcaacaacttccaatgtttttatctctttccataccatggtaaaaaaaaatgatctaggtttaagggaaagtcttctcccacaaagagagcttgacacaagagtgttctattatatgatccaacacctagttaaaaaagagttccaactccttacgttgatcatgtgagatgcaggggaggatgaaactacttttgtaggggtatattcgagttaaatctagtattggaatagtgaaaattcctatgcatactatataccacattaaagtctttgagttgagattcaaatgtattttataaaacttcatttgaaattctagagagaaagttatgttcaattttctatatataaaaaaaagtccaattgtttagtgctacttgagaattagagaaattctacttcttaggtatattacagtagaatttgtgatctaagttagactttataacttacctagaaaataaagtcttggaaattgttcatgtttggagggttgttccaagttacggcaattggaagctaaagaggtggggagttgattgatgagaggcaaaggctttggagaaaaggggtgaatggtagattctatgaataaaagattgcttccttgctctatatctcttgtgaactattttgggtggtgattgaatctatattctttagtatttactttgtggctgatgagcttgtatttcccttcctatctatttgttcttttctttttccatctattttggtgttaactatagttcacccattttatataattccaagttatggcaattggaagttaaacaggtaggaagttgattgatgagaggcaaagactttggagaaaaggggtgaatggtagattatgtgaataaaggattgcttccttgctctatatctcttggactactttgaggggtgattgaatctatatcccttagtatttactttttcgatggtaagcttgtattttcctttttatctatttaattatcttctttttccatccgtcttggtgttagctatagttcatctcttttatataaaaattatttttgacacaacaagttagaggacgaaagggggagttaagttttgatgttgctgctaagggacatgagatgttgcatttgtgaagtataagtgtttttaatgttgaaagagttttgtaataagattagaagtaggaaatattagtgtttgtaatgtaatatgtaaagatgtatccaaacacttgaaacaatgtacactctttattggaatgaataaaaatgcaagttttagtatttttggtcatgaagtgtttttattaattttgggtatgttcatcaattaaacttatagatttaatttactcatggtacaataaaaatcatttaatggtgttaagtgttcattaatggagaaaaaaaaattaagtttcaaaatttaaaagcactaaattaaaaacatgagagaaaataatataggtaggcttgggcgtgagtgtgaaattcaatttaaagatgagtggtatcggaagcatactatttttaatctaggtgtattaagtgtgttattttaatttggaacgtacccagagtattgaaaagctaaggtgcacaatttgagttaagtgtgttgtttgaatgaagtgcacagttaaataccccatttgattaagtgtgctatatggtgcactgcactggaattgcactaagtgatgcaatgtgaagtgcaactatgtgaatgctcaatttaagtgcgcttgagatgtgcacaatttgggtgtgtaggttaggtgtagtgtgatgtggctaagcaacactttatttgtatttatattgtaaacatttaaataaatgttcttatatctccatttatatctctatttaactttgtaatactgcattgtgttatttgtatctccgttgctttaagtttataatataaacaatgaaatagtcctcatttgaatccaataaaaatacttttagagcctaattttaagtaaattaaaatctaattttttatttcttgttataaatagacaacttttacttaatttctttcaaaaaaaaaaaaaaaaagttttgcccgtgtaaattcactaaagattaaaatctagaaaaattaatttaagcatcattaacatgaaacaataaaatctaccctttttttattataaattttgaaactttaaaaatgatatgttttctatacttagtgaaaatttctcaaaacttagacagcaaacaaggtatgtcagaaaactcttaatccattgtataccatgttatttgtatatcaaaattaaaattctcgagtgtgaaaataaataattaacttatatttaaatattatattattattatttgattcacattttaaattatagcattatgggttaatcttttgtattatagttaaactatagttttagaatatagggtgtgatgaggaattactcatgttgtacacataatgaatatagatattttactattgcattaaccttttaaaaattgcaagaataaagtagcattgaaggcgtaaagccaggcaagtgtttaggaacggtatttgaaagaaagagaataccatttaggccaacctgatgtaatagaatccaactgagtcaaatatatcgaattggttgtttcataatttcaaattataatggatcaataaataaatcgaattgcatccaaacaactacgtgttgttgatgtagcaagaagaattaacatgtcttttcatccctcagcatgtgatcctccagcccagaattataaaccagagaaaaaaggagcgatagtaag

SEQ ID NO: 13641 - DNA, 10291 bp, Vitis vinifera
  Intron number 6 from transcript GSVIVT01012806001 (locus G SVIVG01012806001) derived from phytozome v7.0 (chr-ID chr1 1; pos 5561854 to 5572144 reverse strand)
accgagaactgttcttttatttcattggagagcatgtcccttttcttcggttgaggggttgataagctaagtctagtgtttgaataaatgaactttggtatgtttgattctgctcttaaaatgtagttgctactaaataattttatgtttcattagagtgccaaggtgtggtttctacttcacaattttatgtttcaaaattctcttccaataacactcccagggatgatcgacttgactaatgttgttattatctaatttatcccattttgaatattaaaatttatgaaatatgaatacttggatttagggaaacaaggggaaatattggaaacaaaggacctaaattcaaataaaaaagtaccggcaaaacgaaaattgatcaaactaaaaaatgtgggaacttaaaaaaaatgataaaacaactactaatgcacatattgaagcaatcttattgaagaaaataatgtgtattaacttataaaatatgtgacatttgataataatttaaggaatttgaaaacacatttaattcttaatttggataagtttaaggatataaagaaaatgataatgatgatatgtataattatttttaaaaatatttataattatatttgaagggggatttgatccccaacttcattgattccctccacaaatgccctaaccctctcgccattaaccttaaagactttactagtcttaggatctagcaatccatagccccataaggaaaatgctaaaaataagaaaataaaaaaaaataaaacaaaacaagaaataaaaaaagattcaaacataataatttagtaaactaaattttaaatcaaaattttagcatgatctcccatatttcatagacatttttcaagtcatcacatgaccaatttgtcattaaaatttgttaatgtgacatgtcacaaaccttcccctctcatgcaaacacaacgtccttgttgtgtcccacaagattgtgggaccaaacagacaaacacccctaaaggggccaaacaaaccctaacaccggagtcagggattgacattgataccatttgtaacaacttgcacccaatcgtgtagatattgttcgctttggacctaaaggagctctcacgactttaaaacgcatctacttaattaagaggagtccatacatgtgtagtgtcaagaactttttcttctatttgatgtgggatgtcacaaaacacccccccatgtatacacaacgtcttcgttctgttttacgggattgtggaattaaacaaacaaacaccccatacggggcaaaacaaacccccacaccagagtcgaggattgactttaatactatttataacaacccacacctaaccatgtagatattgttcgctttgaacccaataagtccctcacgactttaaaatgcgtctgcaaagttaagaaaaacctttacatatataacgttaagaacttttccccctatccagtgtgggatgtcataaacaccccctccctatgaagacataatgtcttcattgtgttccatgtgattatgagaccaaacaaacaaacaccccttacgagatcaaacaaactctcacatcgtggttgaggatcagctctgatatcatttataatgacccgcacccaaccatttagatattgttcgctctagacccaaatgggccctcatagctttaaaacatgtctatagggttaagaggaacctctacatatatagcgttaagaactttcccccctatctgatggggatgtcataaacaccccctcatgcaaacacaacgtctttgctgtgtcctataggattgcggggccaaacaaataaaccttcttacggggccaaacaaatacccacaacggggttaaagatcgactctaatactatttgtaacgacctgcacccaatcatgtcaatattgtctgctttggacccaagggtcctcacggctttaaaacgtgtttacagaattaagatgagcctctacatatatagtgttaggaactttctcccatatctggtatgggatgtcacaaacaccccccatgcagatataacatcctcattgtatcctataggattatggggtcaaacaaacaaacaccccctataggaccaaacaaattcccatgcagacataacatcctcgttgtgtcctataggattatggggtcaaacaaacaaacaccccctacaggacaaaacaattctcacatcaaggtcgaagattgactctgataccatttgtaataaccaacacccaaccatgtagatattgtccgctctagacccaaaaaggccctcatggttttaaaatgtatttacagagttaagaggagtccatacatatatagcaccaaaaaatttctcccctatccaatgtgggatgtcacaaaccatcccccatgtaaacacaacatccttgttgtgttccataagattgtgaagtcaaatagacaaacaccccctacagggccaaacaaacccccacattggagtcgggaattggctctgatacgatttgtaatgacctacactcaaccatgtagatattgtctgctttagacttaaggggatcctcatggctttaaaacacgtccacaaagttaagatgagcctctacatatataacgttaggaactttctcccatatccggtgtgggatgtcacaaacactttcccatgtagacatacgtcctcattgtgtcatatgggattatggggtcaaacaaacaaacaccccctatgggaccaaacaaactcccacatcgggatcgaggatcggctttgataccatttgtaacaaaccacatccaaccatgtagatattgtctactttggactcaaaggagtccttacggctttaaaactcatctacaggattaagaggagcctctacatatatagcgtcaggagctttctcccctatccgatatgtgatgtcacacaaatgaagactaaagttaaagttaaatattaaaaccatattaaaattactaaaatgaacattaaaaataaaattaagattaaactaaatttttcctttttggttttcttcaaacttttgttctccaatttgaattttaatcataaaaaacaatttttcttttcatttccaagattaaaataaaaataaaaattataatattaaaattaaaatgaagattaaaataaaataaaaattaaattcaaaactaaaattgatttcaaaattaaaattaaaattaagactaagatgatgattgaaatttaggtcaaaaataaaattaaaattaaagtcaaaactaagattaacattcaagttaacaactaaaactataattaaaattactaaaattaacattaaaatcaaaattgatgttagcctaaggattctcgtaaatacgttttgatgataagaaaacaaggttaagtgtacaaacttgtttaaatcaagtaaaattttaggttttattgataaattcagaagaaagcttaagatcattcaaaagagatttaaacattataaagaaatggatccttgaagactcaagatatctaggaaccaatgtaaaatgaatctcataggtacacttagtataaaattgattctcatgcactttctaatgcattcattcatacattgatagtttaagaatgatcttaatttcttaaaaatggatgaatacacattttacctcaaaaccttaggctaaattcttttaaaaatttcctataaaggtttttaaatgacatgttcaagttattggaatattaaagctaaaatcagaagctttttgagctaatttttgcctaaccaatcaatggtggcttgaactgataaaatcaattaaggaaccgattcaattgcctaagttttctcagttgatgaggaccaagcaaagttgttaaaaaatattttattttccaatatctagtgtttaatcgatcaaagctaaatctcatcaatggttgcctatagagcattaaatgccctaactactacccaatcgatcgaattgaagctcgactaattgagcactttttgctaaattttgggcgtctaagaggtttttctataaattagagagctcttatgcatttattgactaagagaacacttgcacttatttgttaccattgattttctctcatgcagagctctctactcaagtggattaattctttcacttacaaatcctttagtgcacctgaccctttgatagcatcctaactattttctttagattgattcttacttgtggtaggattaagtttattaaagcctcatatcactgtttaaaattgaatgtttgagacttaaagttggtaaagaactcaaaaagagtgtagtgcccattgtagccataaatccaaatgtacaagattgaaggcttgctttgaaaccttaattactagaactcacttagaatgaagattgaggagagtggacataggtaggattgttaaaccactataaaaatgttcacatgtctctcccctctattattgttttaattgttgtttgtttattgatttattgaatcatttttgagaaatttttaatcctccctcttgggtgttttcttcaattaattagtcttatttcacaactaaaattaagattaaaaaatctaattaaattaaagttggaattaagatcaaatctaagattgaagttaaaattaaaagtaaaattatgaaagaatatacatatatgctttaggaaatccaagcatcatgtttatagattaaaataattatagtataatgaagaaagaaaattagagtttaaaattaaaatgaaaattaagatttaaaatatgaaataaaatcacaatacctaaagtaagaattgaagtatgcacaagagtggatcacattataaattcaatgttactcatgctttacacttgtataaacaacctttaccaaatagaataaaaatcataaagtagtatttttttttttacatcttgttatataacaaaacattgaaattaatttgcatatctttaataataacatcaataacatactatactacaaatattaattatccaataatatgcattttactatttaataacatttataacaaaatatttaaatttgaataaacttatattttggtacttaatcttatgtaattctaattatttttttcattattatgtatataaagtaatattgataaaacaatattatactataaatattaattcctcaaataatacatattatattatttcatattaatgttactattatataaatattaatagcatactaattaataattaaataaatcatctagcaatttattaatgttattaatattataacttaataacactatttagaatcactcaatttataattaggaagtaatacaatcatcaatgaaaatttttcatcaagaatatagataaaaacttgtcattttcagtaaggaaattaatttcatcacacaaaaagttatggttagtgatgcatgtttttgttagtctattttcatcaaaaaagtttttatgcaaaagagaaaaagaatctaaattttcttccacttattttggcaggagaaatttcaatttcaccatgaaaatttgtcaaaaatttggtgttagtgacaatatttggaattttattagaaaaattatttttagtgacaaaaatttattttgttcctaaattttcactaggaaaagcatgttttcttgtagtatgaaattttaatttttccctaaatttaggctacttctcaatttggtctaagcttgcatatatattccactcttgaatatggactattagtatatttggttaggattgagttgtcttctttttggatgtatttgactattccttttagatatcatggattgtgttcaaatactcttttaattatatattggatgatatagttatgcctttacaattctagatatgattaatgatgtttatttgatgatgcttgtgtctcattattggttatatttgtcctcttgcttctcgatgcttattattttttagctacattttctactttaatagttttatgacaaaaaataaaaaatgtcactagtcattttttttacatgcttttcatacactaattttcctaggtttgtttgagtgtgtttaggtcataggtagtgtgctaagaaagattcacaaaaatggaataatttttcgtttttatgaaaataagcgaggagggaagggaatgcatattatgattaagattctattccatgtggcaatagaaaacattattttaagagtttgagagggttcattacaatctatattttgttataaaattatcaaatagatgaactattagtgcttcaaactaggttgacaattttattatatttaagcattgattctagcgctaattactttcttaggtctttatgatcatgatcaagttattcagacattgatttcaattggggtaagtgcatgtttggagtattattacattgcaagggctattaaaactggaaagtaattaaaaccctaagttaaaaaataaaaaataaaaaaacaacaacaaaatgtgggaaatcacatggacatcctttccagcattcaaacatcttctagttttttaacacaaccttaaaaggcatttaaaagtctctccatgagtggtttgagtgcttggcaaacttgtatagaagttaaattttttttaatactttaaatagtccttcttaataatcttgtaccttttatatctactttgaataaatcatttaggatttttctataaataatattccatggtcttaactatgagatgcacatattgaggatataactactgttctacttttaaacactaaactttgaaagttttcaagtatttgtcatgaaagtcctttaagtggaaatacatgtgctatattgattcacaaccttatcacgaaaatgatgtgatccattaagaagtatgagatgttacattagaaatgtgaaaaaagagtataaatattgatttgtaaaagcccttttaagtgtaggtgctgattactactcaaaaagtgctattttgtagcttgtaattaatccttttaaacacttttgagtagtagttattgccttttaactcaattaacatgttaaggacccttgcaatcatttctaatcaaattgtgtaagttttggtgtttttgttagtaatttgatcaccaaaacaatccaagattgaggagagttatttggaatccatggcaaagcaatgaagagctcaaattcatgaaaaaccaagatttggagctccatagccctttgccaaagtcgttcaaagtatgcaaggagagaagcaaggagagagaaaaaacagagtgaagaaaacagaggacagcaattatagtcttttttcgcacttttggagcacttcccgaagtccattttctacatgctatataccatttcaaagctcaggaagtcaagaatccaacgcttcaaaccgtgtatgatttggagttgaaacgaaggagttacagccattgcaagcagatcactccaaagtgttgcgaaatcagccttttgttgcgagaatttcgcagcctttttgtacagtgctatggaattcctcctgaagctacccgatacatgccgcaagctggaacgctgagaacctcaaggtggaagccaatttcacagccctgcgagtttaacttgttgttgcgaaaatatttcgcagccctcttgagtgtctgcgaaatctcgcagacaccattttcacctgcgaaatgtccttagtgcttcctgatatttgtgcaccgactcttttagatcttttcttcagatatttttgtataaatttccattcttctccttgtaatccaccaaccataagatttcttagcttggaaggttggaaaaacgtctctatatatacccttgcatccactataaatgaaaaataatatatcatgtaatccatcgatcaatatatagaatttacagagccttgctctgtttttccttcattttcatttttattttcttgctagccaaacattttctgaggatttttccttagaagatgagaggctaggctttttgtctcttggagtaaggaaagccgggtaagtttccacatgcataatttggaagttttgttgttttagtttttaatgaagagaaagtgtgacccgttaatggtttttatctttttagttaacttaaaacgcctttaaatcacctgggccaacacttggtaaggcaagtgatttccaaccatggaaatgcactagtttaccccttgcgagcctttgggaggtggtttgaaggtaggattttctagaatagccaacacttggtaagcttttggactccaaggagacatccattagttatctcttgcgagcttgagaagggaagtccaaggttaaagatcatcttgaatggcaagtgctaggtgagaggcatgagccattgcaaggtgcatcagtgagagggatttagtgtttgaacccattaatgggaagcatctgtacaacaccggttagagaattaactatatgttaattctctaatgcgaggaaaagaaacaagtgaccggaactccctttttgtatgaggaatctgagtctagtgatctgaactccaagaaacatcttttctttgtagttaaaatcagttactatttttggttagtttaaatctaaacctttttcattcaaacatctttatgttttcttttaaagctaaccttgaaatgaaaagacaccaattcagctttgaattaatatcatttgcaaagtgaaaacccatcccagtgaacgatcctagagccactatactataatagctttgtctttgctaccctagtatatggtgtaataggttataaattttgttgattaatccctcaatcaaggagcaccagctggacacgaatcagctgagacaccaattgggcacgaatcaggtgcatgcaaatcatataagagtatttacattatgctaatatttagtaaattttatcttcgatgattaattgacctatgattttgtatctacaaaatttcttgaaaattcaaatatataggtaattttttcatcatgtatacctcatgtgaattgattattgccatattcccaattattgttaaaatagaaggagaatgggaataaatttaaattttgatattgaagtattgtattatcattcaaccctctagctaattctattgataaagaaggcactttcaaccattcatatgatcaatctcaaatttggaaagctttacatatatctctctactatacccattaagctttccatcttcgtcatcattctttgagacaatattttgcttttaactaaaaatgtgttcaaagacaatttcaaaccacaatttgaatgtaataaatttgaattaaacacaagaagaaatttctctacaagttatgaaaagtacaaaaaaggaattaaattctacaagataattaaccaaaacaaagatactaatattttgagtcttttgttagacccttacaaaactcttacaagcaaacctaatttgaaaagagcccttgtatttaatcttaggctgccttcatgttggccttggtcagccttcctacagtctttctatttttaattaagaatcatgattttcttttgttgtttaccagatggtctgccatttgacaagtcatcaaaaggaggttcccactcatataatttggacagcattactctaaaggtaggtcccgcatatagaatttggacaatagcagcaagactgcgtgatgaacaaaaataaaaaacctacagacatttggttccattctatgctctatgtctatctaaaaccatatctatctctcataccctttcacgaaagtgagtggagcagaagacacagaaaaagtgaagaagccatggcaacatcgagtcccacacggttcgtaatatttccagctattctcttcctcattgttctcatccctttgtacctgtcacccataaatcgaaaccaaagcatcctcctccatttgctccctacgcattcaaacctttcagagacaactcaccaaacccttcaaacctcatcgtccccatctctgtggccgaaaaatgattccgcagatggggttccctcaacttccagtgatggagcgagaacaactaacgagataaggaagcgtttgagagtgcgtgataatctaccacttcagcattgatttctgtttggtttgaagcttaaatggtaatttcgttcattaaccgtttgttttttcatttccctttttttctttttgggtgccactttataggagaaa

SEQ ID NO: 13642 - DNA, 5954 bp, Vitis vinifera
  Intron number 4 from transcript GSVIVT01011505001 (locus G SVIVG01011505001) derived from phytozome v7.0 (chr-ID chr1 4; pos 30108745 to 30114698 reverse strand)
cagttgtaagtgcttgttgtttgaaattgtgtttcttttgagtgttatgttatccatggtttaggcgcaaatcgataattgagaacagtggatagattgttgaagctgtgggcttttgtagtttctgatataaatgtagggaaacaagaggtgttgagctttgaatttaaaattatggctctgtttaactattggcaaaaatctaagaaattagaagaggttagagtgttgaatggcctatttggttgacgataaattgcaggaaaagaaggggaattagaatgtcgtaaataaagaattttcattatttggcttggttgtgagtttcaatttttaaattgctttctctttattcttcctctagatttgagtcctaacttatgtcttagcctactaattgtgtgtttggaagtaattttaggaagtgtttctaacttttctacttcgaatcattgtcaaacgcactctaaggctatgtttggttctcagaaaatttgagggaaaatgcaagggaaagaaaatataaaggaaaaattgaaggaaagaaaaagtgaaggaaaataaagaatggattaaaaattgataagttatttttattttttacttcaaactcattttatttattttaactcattaatataaagattaaataattttaaaatacataggtttttgattagttttaattatattttattttcttttatatttttcataggataaccaaacatgaaaaaatcatttttctttgcattttttttctttccttagtattttccgggaaccaaacataacctaagagtatgtttggaagtgattctaagaagtatttctagtctttctaatgcttaaaagataaaaaattttaagtattagaaaagttagaaacactttctataatcactgtcaaatgcactctaaatataatatgattggtttgaccacagaatagtaatttgttttaattacatttgacttcttttttttttttttttatctttcatggtaaaaccaagcatgagaaaatcattttccttatcatttttttctttccttaatactttctaggaaccaaatataatccacaactcttataatacctctattatcctttaaaatttgtgattttaacttcaccttcagccatcagctaaagccaaaaatagcaagctttcagatacagattgattgaacaattttcttccctttctccgttctttatccgctctaactcaaagggtatgaaaccaaatagagaacatggcccctcatattctcatatcttagtggttcctctatgagtgccaagtcattttcccttcaaaccttctgattatgtgcaataagcacgtatacagaagcaaagacacctgtacaatgccctttgcaagaaccattgaaaccccatcaacgtgtaccacactataaactagtaaacaacactgctcaaatgtagccaagctaggaaaagtggaacagattcatgagggaatgcactctcatttactattttaggccacacaggtgacgtttaaaggcaaataacaagccaaaatattataacaagtagtgccctccccactcaccctttcagatgctttccacatcgcccaccaataaataacctctaacctcccttcctatcacccccacaataactagtactgctcactagttagcatttcagaggagaaggagaaacaaaaatgaaaggtggtgtgatcattgctgtgatgctgatttgtgcttcaccttccttgagccatgttttttgtacgattcaagatgcacttctgtctatatttagtttctctatcatactttcagatattattttcacaatggtaccatgaaatcagaattcatcattcagaacaatgcttcaattttggaagttgttagtacatgttgaagcactagcatattgccatctctatgcaatgttatcttctttacattgctgtcatagaggtgcaagtcaaactgtggttggtggctaaattcaccttgaaatatggatccaagctgggcccaagtctgttctttgtctagcccccctaaactcaaatgtatagcattgtgtcaaggccatggtactcattgactaaactaacataccttttttggcaatgtaacatttaagaaaaacctttttttggttaactcataagaacctcagaaaataaataattaaataaatgcagacattgggattatttaggcctcaaaatctagctaggatcacccaagttttgccaaagtaaatttcagatctattcttagcctgagttaaatcctgccaaaggctgaattgcccatgactccagcattttttgatgtgctctttaatctgattcacttctcattccatctttgtttctacttcattttaccaattttactaatttttatttattttcctttaaggtttaccacaaaagattgttgatgggagatgaaaaattgctgtttttatcatatggtttgcgctgtgagcctattaaatggtttccttgtgttcatggagccactgtagatcccagcacctttagcaaaagatgcattatactacatatattatgtagtcattatactaaatatattatgtaattagtgtcgttgtcctcattatttaattcatatgttgatcttcactataggggcatttctatcagagatggggcaattcatataagtatgctaacaacctaaacccccaaccaaaataaataaatgagagttgttcaactaataatgcagctccaagattaacaaccttctattcctccttgttttattctctgattgtataggagtccaataattttttgtttctctatgaccttttggccaccctttgtatactcctagttttcaaggggtgccatgcccctttttgattggtgcttttcaatatactctttgtttgcctgttaaggaaaaaaatgtgaacattttagtatggatgggagaacattatgtgtatatatgaaggattaaaatcaatcaagcattgcatcaacctcaaacagctgcagaacagtaagataattgaattttattccaattatattgtgtataacattgatttgaaaggcccccttggttgtatcttagtcgtagtgctctctggcaatgaatgagaggttttgagtttgagcctccttgatgtttaagtggtgtagggccaatatcaccctggatttgcttcgctggcaactagaatagatgtcttgttcttggagtggattccttgttaaaaagaatggaaaagggaaaaaatgtaagaacaaagaatttaaaagcaagtgaggaacatttggaacttcatcagctcataataaaaggaataagacaaaagcttgcttaaataagtaacaaagattgtaaaataaaggtgaatgagcatgatctcaagttgatgattaatggagggtttgtgtgatgggaaaaaatctgtgtcattgcaaccatataatagtatgaatcccgtaaagaggactaaacctaaataaggaagaagatggaaagttatatgatctaatagtctccctccaagaaccaacactaaggtggaaatgcaataacaggtggctggggccatcatcattgtccttatactgaaaatgcaaagtgttttgtggatgctcaaattgaaacttgaaataggaatgggacagacatgaatctctgatatatagcatagaccaactcctccatcataggttagatgcttcagaatgtgaactccaatctattacatccctctctaggatgtggcttccccactcacttgtcatgggtgatcagagaaggagtaaaggatgttatcgtttggcagctgtccaagggaggcacctttttagtcaaatctttctactcctccttagcaggttgttcctcgcaaggattccccacaagcattgtgtggaatccctaggtgccaatgagagttagcttctttgcttgggaagcagtttggagcaaaattctaactctagatcagctaaaaaggagggggtggagtcttccaaacaggtgttatatgtgtaaggatgaagaggagtcagcaaaccatattctccttcactatcctaaggcaatcgtgttgtggcaccttgtctttgctatgtttggtgtatagtggttaatgcctctctcaatcaaggattccctctttagttggcggggtgcctttgttgggaagaaaagaaagaagacctggaaagcagctcctctgtgcttattttggactttatggaaggagagaaaccgaagagcctttgaagattcaacactaacagaccatgctattttatgctcctttatgtacatgtttttggagtaggttaggtttatgtttagggtctaggtctttgtccctttttgacttcatagattggttgggctgcaaataaagcgagggtgttgtttttttccttacctcctttttgccttacatacactgtgtgtaccttacgcgctttttttggtgcttttaatacaattgctttacttataaaaaataaataaataaataaaaaaaaatcctaggttaacactaagaaggggtgaaggggtgaaggggggaatagggaggagagtttgaattgggtgttggtctcttttcaaatttttaataaatttgaatggaaatgataagaaataacaaaaagtaaagcaaagaaaagtaaatagagaaaatgatagagaggagcaaataatgattttatattgcttcatcaattgcctacatctagtccctcttgcttcaacccaagtttgaggtacctatcattataccaaggtttcttccaacccaaaaccttcaagtcttatacaattggatttccaaggctccaatatgcctttacaaccactcaagtaatctcttacacttgaaataacctctcaccaactacaagaaaaaatttactcaaagtatatttcatagtttgtaaattgaggctcaaatacaaaggtaaactaggattaagttgcaccaattgaggattagcaagtggatgaatggtgcactcaagaaaatttttcaaaactctttgatgagatgtaacagtgatttcaagaggtgggcaacattataaatgaagagggagagctttaaatagaagtttcagagtgaaactagttgttaggcatagtagttccagctcaatcagttaactgaatggtcaaccaaaaactagttattgagaactttttagtggccgttgtaggccaggaaccttgaccagttgaggtccaacctcaaccgcctctcaaccattaggtgctgcctgaaaaatgtaaaagttaagtctcaaatatttgatcaggcagtcaacaagtccacctcaattttcccaatagctgatttttttgctagttttatgcccaggaaaatttgaaaaccagctttgacatgcttctcatacatcttgaaaacctttttaaccaataattgcattgaatcaacatcagttttcattttaaacatatttcatccaatttttttaaggaatataagacaatttaaggtttcagttggataggtttttaatcagaattgaattgattggtaccctataccctttttatgcaatcctagcttagtgcacctcaacctcacaattttaagatcccaaaaaaactgaagcttgatgggttgtccatgatgcataatcttgcatcctttacttgattgacctttgaatggcttgctaactttaaaatctgtgataaatactcaagcagacaattaaataaccattctttgttttgtgatcatcaaaatccagtatggggaaaaccttgggctaaaaatctggaggtgataaatgaattgactttagttctatttgtaagcttctttgtttgctttttcttgatttttttattgttatttctgtaaataatatcccaattccctgtgcagagcctcgcaatacctccaa

SEQ ID NO: 13643 - DNA, 4492 bp, Vitis vinifera
  Intron number 2 from transcript GSVIVT01029557001 (locus G SVIVG01029557001) derived from phytozome v7.0 (chr-ID chr9 ; pos 21620911 to 21625402 reverse strand)
aaacggcgccgtctccagcgcctgaaagaggactggtgaatgccacttttactccctcacggcgtttccattgttttcgtcttcaccctctgtttggttatcgggagaaacgatgaaagaaaaaaatgattttttcctttattttttcctttcctttccttgaaaaaataaaaataaaattcttgtgttttgtgttgtattcggtttaattgagaagaatttatcgttttctcggatcacgagcggtgtaaatatttgggaagcttgaattttgagttcctttgttttccggtcttatattggcaatggttttgttgcttactgtgcttttctcagtgatcggatcgagttttggtggtttcttgccttttcaatttggagtccttttggttacctggaaaatggagggaatgacacaaaaggatacgattttggtttttgtgttttatgttgtatcgggcttagttcagtggagcttgttttgtatcgggttataagtgcggaaaatatttgattagtgaattttggattctcatattttcctgcattatttctgcaatcaaacggaggttttattattagtgtgttcttgcttttttgctgtagagtctgtttagttaccggcaatttggtggaaatgaagaaaaaaagatacaattttgattcttgcgttttatgttggatccggcatagttaagtcgagtctgtcttgtttcagaaaacgagtgtggagatttttttgattaatgaagtttgggttcctatattttcctgcattttctcggcagtcaaaaggcggtcttgttgtttaatgagtttttcttggtaatggaaatgcggtagtgttttcttcatcgtcattatcttctttttgaatttttatattttattcttggcctgcagtctgttcctttatagacaaaaaggtggaaaatgaaaaaagagatttaattcttaatttttccttttgtgtatttgctgtatcagacttagttgagtgaagtttgttttgtattagattatgagaaggcaaattttttgattagtgagttttaggtttttatattgtgctgcattatcttggcaaccaaatggcggttctattgtttaatgtgtttgtattggtaattgaattgagttttagtggttttttttctttccgatttggtttgggtttagttgaggggagtttcttgttgttttggatcaggggtgctggaaacttttgattcgagaattttggtttaattttttaattcttttcctgcattatcctggcaaccaaaaggagattttattgtttggtgtgttttgtcagtgatcaaattgagttttagtgttggtcttgccttttctttgagagcctatttagagtttggttaccagaaaatggaggaaacaaggaaaaataatacaattttgattttttgtgtttatattgtattgggcttaaatgaatggagtttcttttgtctcacataatgggggtggaaattttttgctgggtcaattttgggttcttttgttttcctacattatctcaccaaccaatggactcagtggtgagatttcattttattgtgtttttatttttaaattttaaattttatttatttatttttatgtttggattagagtctgtttagttatggagaaaatggtggagtttctttttgttccacgttgacgggagaattttgaattgatgaattttggatacttaagttttcatgcattatcttggtaaccaaccagagtttttattgtttaatgtgtttttcttggtgactgacttgaattctagtgttcttttttgttgtttgtttagaatctgttcagttaccaagaaaacagaggtaactaaaaggaagacagaattttgatgcctctgtttttatgttttttcttaagagtagaaattggctccacaaagccagatggctatgtctgggtcaattgagcaaaacaccttttttgattagtattttttttccatgtcctaaaatttaatttactcttaatttcttttcttccctgcattttcttgaaaaaaaactgagggttgaactttcatttatgattatctccagttgtgtttccaaacttgtgtattgtaaagtaaaacaatttttttttgataggcaaataagagattgtattagaaaagcctagaagaggcgaaaagagtacacacgaagtatacaagcaacacccaagaagctaggcaaaagagagaaaaaaacctttctcctatctagacaaaagccactctataaaatcaattaaggacaaagaatgatcctctaaatacaccttaccccaattcacaaaagtgtacaaaaaagaaagttttaaagcttggtcagaacgttcagtgtcattgaatactctttcatttctttccttccataaggttgtaaaataaaactattgtttgaattttctttaattttgtttataaaaagtaatgaaaagtgctccttaacaaagccaaatagtcgtatcaggttggttgagtgtaaattttaaagatgtaagttgacattctatcagcaatcaaacttgagcattagtgtgcttatagattgaaatgtttgtctatgattagtgctttcttttttatgataagcatttgtctttattataggtgatgcaaagccccagtgtgcttttattttatttttatctcaattgctgatgtagcaaaatgtaaggctgtgattaggttttttttccccccataacatggaattcacactgacagtgagacgtttatctcaactgctagtgggtgatatgggccaccatccctcttctctacaccattttaaatacgtcatgctatgattttttttttttccccttgatagtggggaatccatcttgactgctagacatttatctcagctactagtgggtgacataggccgccatcacttttctctacaccacttaaataccctgggttatgaatagtttttttttctccaatggccgggaatccacccaggcagggggaacatttatctcaactgcaagtgggtgatatgggctgccatccttcttctttgtaccacataaatattagggatgctcgaacttgggacctttggttcattgctatttgctaggtggcactactgtgtagctaccctttgacggccgtttgtttatgatattacttgtgcagttatgattttatcacatggttctttatgcaatgcactggaacatcaaagaaaagttggaattttatatgctttgtatgattgagtttgtttccgtttgaatgataaaaatgtaggaaaagaaaagaatttaacattttgaattttaaaattttaattatttggtaaaccagaaaacaaccttgtattaccttagttgtggtgaattttttattctttggtaagatgatgacaagcttttttcatgtgatggtgaacacttaaattgtgcattcatcatccaaatatcacatagttggaaatttcatggtatctttaattttgattactactttttagtatggggaaatctttagatggcttacccattgaaagtatatacctttttaagaatgtgaaacactgtattttagaggttcatattcttccatttcctcgttgttcctcacacctagttataccttattcatgcttgtagcttgaaagtttgtcatattctttttttacttgtcttttgtttttcatggggttgtggcacagattattttaattagcaaagacggattgggtcctcccaaggagcatctttgacatgttatctactaattttaatggttttggatcttctaagagagggattgttttgatggcaagctgcgtgcatcgctttaatttgggtggtgtggcgggaaagaaatgcaaggatttttgaggataaagcaaggaattcagagaacttttgggactctattcatttccttgcttctctttgggctttttgttctaaggtttttaaggggattccccttaatgtgttacaacttgattggttagcggcatgtaatcccaatgggttggtctaactagagagtttgcttgtttttactttgtattttcttatatttgattccttgtagttttgtttttctttggtgggaggattcctcatccttctcttgtacttttttttttcaatatattcctttgtagtttcctatcaaaaaaaaaaaaataaaatttgtcttttgttttcattctttttccttcccctgtctctctatccataccattggatccacaaccaaattgtggactttcttatggaaaagcatgttcatgttaacaatagttgtctgtgttattaactttattattttactgtgctttaaccctttttaaaatttgcttataaatatttttttttattaaagtctattttaggtctcaatctattttttttttctttgctgtctcttaccatctaacaaggaatcttttttcatgttttgagttcaggttttcag

SEQ ID NO: 13644 - DNA, 10506 bp, Vitis vinifera
  Intron number 8 from transcript GSVIVT01031064001 (locus G SVIVG01031064001) derived from phytozome v7.0 (chr-ID chr1 4; pos 21715430 to 21725935 reverse strand)
cacaagcactggtatcctctttaataaatttggagcttcaattttgtttcttatattcttattatgttgagaaagtgatgcatttgatcagcagatgacctatcttgcattgttctagggatgaaagggagatggaggtacaggaaagttgagaagtggcttatcatcagttcataatttccaatatttactattacctattaaaaaaaaaaatatttccaatatttactaattttacccactagtgtggtgtaactctttaggtcaattggaaattcctaacagatgaatttaggaagttgaagagaagttggtagtggaaatggaaaatagcatcaataatttggtggtgttctgatcctaaattttatgtttaatttaggaattttgtattgggggttttcatatagattttttttttgtttgtatttttatttttatttttttgcatggaaagttgttgggtgaaactcttgctgtggatatgttaatgaagaatggatggtccatggtcaatagatgcaacctttattaagataatgaagaatcaactaatcatttcttaattcattgtggtaagacaaaagtgctatgggcttttctcttagtagtttttggcttgagatgggtatttcttgtatcaatgagaaaccttctccttgagtggaaatttaaggggctagataagaagagaagacctatctggcacatggctccaatttgcttattttggtgtatatggaaagagtgtaatcaaagtatttttgatgaagaagtgttctcagattaaagattgaaggagtttttcattaaatcactatttttggaaatgaagagctcctctattttgaatttcttagatgctcttccttgtggataacttggcttgtttttgtagactaacgttgtatatttttttttgtgcttgtattgtgatgttctgtgtataccggctgtatacatagggtgtgccttcctcttgttgacacttctgaatacatgctcttattgtttataaaaaaaaactattgactctatttagtaactgttttcaaaaatagttttttgttttccaaaataaaaaggcagaaaaatatgtttgacaatttaaaagcagaaaattggggtgggcttagttttctgtattgatgttttcaaaccttaccccttgagtgccatttcgtttagttggctctcagtatgtacaccttagggttgggcttacttggtgaggagttgagttgagcttttggagttgtatttttgtatgatctgtttattctttttatataaatctccttgtaaagtgaaggttttcttgtgtgttttgattaggtttgtatttcatggggagaatttctcatccttcttatattttcttatcattaattaatacattttttatttttggtaaaaaaaaaaaaaaaaaattagaaagcagaaaacgattctttgttcttaaaagcataaaacatggtgttttttaaggacatattttagttgttttaaattgtttttatttttttttcgaggattgttttaaaaaataattatataatcatggagaatggttgaaataaacactacagataaaatttatttttaaagaatattttaaaacatagaaaataggttaagaaaatttcgagttttcaaacatacttttgttctacaaaatatcggagaagagttttcacaaactagttttttgaactgtttttgagaacacttccgaaatagagcctatatatcttgcaaatttattatttatttatttattttttgctttagttgggaattaggcattgatatgttgctgcttgatttgcttttctgttttctttatgtactctttatacttctatttttatttttaatatatttcttggtttttgaaagaaagatattatcttttcatagaaattacaagacaaagatattattttgtatcccatgcacctgtcttttatgagaggaaaaaggttatgttcaaaactaatttgctgaataagaagtcaccatggaagttgaaattttaatacaaggattcttgtacacaggttgctggaattttaattaatgttgagaaccttttttatttttctttttataggagagagtacaatttcttgtgttgaaatttggcattcaaagttaggattttaatttaggaaagtattttaggaataaaaaaggagagatcatttaggatatttccttaggattcaatttcctaattttaggagagaatcaagctagattgatattttcttattcagtcatttgtgtatatatatgtgtatggtgtgtaccgaaaaaatcaataaaggaattcagaaattcttcatggtatcagagtcagttttttgaaaccttaatcccttctggctgcctcttattcaggccatcattcattccggccaagtctctctggccatctctcaatccaaccatctctctctctggccatctctcattccggccatcagtccctgttctcagagccaagggagaaaacctaattctttccagtttccccgtgtcatcaattccgggaaacgactttccggtcggtcgaatcgttgtcagaaaacattcaccaccggcgacttttccggcgaactttccggcgacgtctttttcccacaccgcaaggagcgcctggaggagatctccaatttttcccaaagcaccggagccagaaaaccacccacacgccagccacgtgcgtttttccggccggtgactgcatctcacgcgccggcgcgtgagggcgcgtgagccactttccggtgacgcgcttcctcttccagcctcgcctgacgctaactagccacccttcatacctgtttctgccatccgagccctacacgtgcctcttttggggttcttttgcctccgcgggccctccgaacagtttttccggcgtcctccggctattttttctcaaccccaatccttgcaagtgccttgggaagtgttcttctacctttccggtggtgccacggttgtttttcttttccattaggccggtatctctggttttctctctgatgatgggatccaaagagcaacctgccccaacattggatgcctctgcccttgctggtcggtcatttaatagtagtggtggagatcgtcagaaacgggataggccttggtgtgattattgtaagaaactaggccattataaggaggcttgctggaagcttcatggcaaaccggctgcttggaaaccaaagccacggtttgacagagatggcagagcacacgtggctgccaactctgagagcacatctgttcccgagccgagtccattcaacaaagagcagatggagatgctacaaaaactattaagtcaagttggcagtggcagtactaccgggatagccttcactgctaatcgaggaggaatgaagccgtggatagtggacacaggtgcttctgatcacatgataggagatgttgccattcttcaaaattacaagccaagtaatggtcattcatccgtccatattgctgatggttcacagtcaaaaattgtcgggacaggttccataaaacttactaaagacttgtatcttgactctgttctccatgttccaaacttggattgtaatcttttgtctattagcaaattggcccgtgatctccaatgtgttactaaattttatccaaactcgtgtgtttttcaggacttgaaatcggggaagatgattggcagtgctgaactgtgttccgggctctacctcctcccatgtggccaattctcaaaccaagtctctcaagcaagttgcgtacagtctcagagtatgttagagtctttcaattctgtgtcaaattctaaggtcaataaagatagtgagattataatgttacactatcgccttggtcatcctagctttgtttaccttgcaaaattgtttcccaaattatttatcaataaaaatccagcatcttatcactgtgaaatttgtcagtttgcaaagcatactcgaacagtatatcctcaaatcccatacaaaccttcgaatgttttctcttaaaaaaattccctcacacctgtgcagcctcttctgatttaccactcaaagtatttggttgcacaacattcgttcatgtgtatcctcaaaattgtagcaaatttgctccttgagccaataagtgcattttcctagggtattctccaacccaaaaagggtacaaatgctattctccaaccaacaaaagattttacaccaccatggacgtctctttctttgaacatgtcttcttctatcccaaatctcatgttcagggagagagcatgaatgaacatcaagtttgggagtcttttcttgaggctgtacctttttctcactcagagtcaccaaatccttcccaatccgcgcccactgagttgtccacacccatgccgtcatcagtccagccagcccagcccacaaatgttccttctcccgtgaccatccagtctcccatgcctattcaacctatagccccacaacttgctaatgagaacttacaagtttacatcaggaggaggaaaagacaggaattagagcacggatcacagccaacatgtgaccaatatattgactccatttcaagtctacctgaagagaacataggtgaggatagggctggagaggtgttaattcccaacattgatgattctactctgccgattgcattgaggaagggtgttaggagatgtacagatcatccaattgggaattatgttacgtatgaagggctatcaccatcttacagagcatttgctacttttcttgatgatactcaggttcccaacacaatacaagagacattcaaaatttcagaatggaagaaggcagtacaagatgagattgatgcacttgagaagaatgagacatggactatcacagatttgccggttgggaagaggcctgtggggtgcaagtggattttcaccataaaatacaaagcagatggatcagtcgagagattcaaggctcgtttggtagctagagggtttacacaatcctatgggatagactagcaggagacttttgctcctattgaaaaactgaacactatcgggattcttctctcattggctgtcaatcaagattggtgcttgcaacaactggacataaaaaatgcgtttctaaatggtgacctagaagaagaagtctacatggaaataccacttggtttcgaaggaagtatggcaaagaatcaggtttgcaaacttcaaaaatccttgtacggccttaaataatctccccgagcctggtttgatagattcacaaaggcagtcttgaagctgggctacaaacaaggtcaggctgatcatactctatttgtcaagaagtctcatgcgaggaaaatggccatattgatagtctatgtcgatgatattattctatctgggaatgatatggaggaattacagaatttgaagaagtatttgtcagaagagtttgaagttaaagaccttggaaatttgaaatatttccttggtatggaagtggctagatcaaggaagggaattgtagtttctcaaagaaaatacatactcgatcttcttaaggagaccggtatgcttggatgcaaaccaattgatactcttatggatagtcagaagaaacttggtatcgagaaagagagtacaccggtagacaaggggagatatcagcgactcgtcgggcgcttgatttatctctcacacactcggccagatattgactttgtagtgagtactgtaagtcaattcatgcacagccccattgaggaacacatggaagcagtctacaggattcttagatatttaaaaatgacaccagggaaaggtctattcttcagaaagacagagaatcgtgacattgaagtatactcagatgcggattgggcgggaaacatcattgacaggcggtccacttctggatactgttcttttgtctggggaaatcttgttacctggaggagtaagaagcaatcagttgtagccagaagtagtgcaaaagctgagtacagagctctagcacagggaatctgtgaagggatttggataaaaagggttcttagtgaactgggacaaacgagttcatctccgattctgatgatgtgtgataatcaggcagctataagcatagcaaagaaccctgtgcatcatgacaggacctagcacgttgagattgacaaacacttcatcacagagaaggtgactagtgagacggttaaattgaactacgttcctaccaagcaccaaaccgcagtcatcttcaccaaagctttacctaggcctaacttcgaagacttaacttgcaagttgggattatatgatatatattctccagcttgagggggagtgttgaaatttagcattcaaagttaggattttaatttaggaaagtatttgaggaataaaaaaggagagatcatttaggatatttccttaggattcagtttcctaattttaggagagaatcaagctagattgatattttcttattcagtcatttgtgtatatatatgtgtatggtgtgtactgaaaaaatcaataaaggaatttagaaattcttcatcttggtataggtattccatagagtggctaatggaaggtgaaataggaaattcataaagtccttggtgtctgaagaggagataattctaagcaaccttgaacacattttagaggtgatagtgattttttttggaaagttctactctaaaccctcaagtgcttcttagaggattgaaggtttagattgatcccccatttctagagagagtgttgcttggctagactgtaccttctctagaggagctatgcgttgtttcaaattgatcaaagggaaaggcccctaaccctgatggttttactattgcattgtatcaaatgtattgggatgtgatcaaagagggtcttatgagggtgtttttagagttccataggaatgggataataaatcaaagtgccaatgccactttcattgctcttgtaccaaaaaatagtcaaaccatcaaaatctcaaatttcatacctattagcttggtaacaagtttatacaagattatagttaaggtcttattagggcacttacgtagagctttccaagaaacaatctatatatctcaattgaggggagacaaattcagatgttgttttgatagctaatgaaatggttgatgtgaaaaggaggttgggggaggaaggggtagtcttcaaaattgattttattttattttattttttatagataaaaaggaagatatattagaaagggttgccaaaaaagcagcccaaggtatacaaaaagtatacagctactaccagtctccaccacaaaaacaccaagatacaaaataaaaggaatacaaccagcccgccctcaccaatggcccaaccaatctttctaggtctgagaaggagctgagaaaacttgaatgcttaatcaattactgtggagcagaagggaactgcggaggcaatgtttcaggatccaaatgaatattcgaattctatcgtggaatgtgcgaggggcaaatgataaggaaaaaaggaagattattaaagccttgattaagtcccaaagggcggatttagtgtctttaggaaacaaagatgaaggagatgaaggttgggatagtgtgcaacctcggtatgggtagatgtctagaatggggtgcagttaattcaaggggtgtggttgaaaaggtttacgaccatttggttttgaattttttggaccatgtgctacaaaggaaaggtttcaacacaaaatggagatcttggatgagaggttgtttgtcttcaacaagttttgtagtcctagttcatggaaatgccaaaggtaaacaagaagaccctttttcggctttcctttttacctttgtagcggatgtcctaagtgggaggatgatcaaattggaggaaagtggtttattagagggtttcatagtgggtagggataggactagagtgtctcttttacgatattagatgacaccattttcttttctaaagtctctttggaaaatatgcaaaaccttgaggtaatccttttggtttttgggcaaatattaaggttgaaaatcaatatagagaagattattcttttctgtattaatataagctaggagttgatatccatgttggcttcaactcttgattctagagttttagagtgatcgctatcttatttgggtcttcctttgggacagaatccaaagacaataggattttgggatccagtagttgatagaaccttgaggaggttggataggtggaaaaataattttttgtctttgaggggaggataaccttaattcaatcatgtttgccttgcattcctagctgtttcctctcttttcaagatcccaacatcagtagccttaaagattgtgaaaatacaaagggacttcctttggctagggaatggggaaggtaaaaaagatcattttatccgttggaatatagtgtgtaggtcgaaagagtttggaggtctagggattgggaagacttccttgagaaatcgtgcttttttaaggaagtggctttggaggtttcgtaggaaaagttgtggtttatggcatcatgtttttttgagcatttatgggacacatcttttgcttgagacactaacattttggtgtccttggaaggctattgcacaagttctttaggatttttccccatagacttgctttctagtaacgggaagagaatttgattctaggaagatttgtgatggggtggtcaacctttgtgttcacaattttcaggtctttatagggttatcgtagttaaagatctcattatctcaaatccaatcctttccttccaaccaaatttgttttgaaatcaaaagccctttcaaaggtcaagacctttgcttggttagtggtgcacatgaaggtaaacaccaattacatgctacacttgagaagactatacaaatctcttagtcctcattggtgcattttatgtaagggaagtggagaatcgattgatcatcttttctacattgaccattgacattagggctttgacatgagctcttcagtctagctaagatggattgagtcctgtccaagagtattgtaatatgatgattatcttatttagggggctagggacttccatcagcggtaagactctttggaaaattgtttgcctcattgtattttggattgtgtggtaagagagaaatgttaagattttttgaggaaaagtagagaatggaagggatgttgtgagatctacttcacttatattccttcctctgggccttttgtattgtcacttttagaggagttcactcaatgttattcaactcagttggcttttggtttgtaattcaaaacgggtggataaattgagaggaattgatttagtgatattttgtatatgcttgagtgtgtagttctccttgtatagtggaggtgtctagtcttattactgtgatcaggttttgtagtttgtagagaggatgtctcatccttttcttgaatttttattatcatcaatatatcttttatttctgataaaaaaaaggaagaatgagagatttgcctgttgcaagacatggccatgtagatgtgctcatcactttggaggacaatggacctctctagagttttggaatgctctttctcttagagtttgagtgacaaacaaaaaagcttatgcactgatcagaccttaattgtgttcatcttcccacttgaccctcttaggttatgaactgtataaagattttaggctaattctttcctctttactatctctcctcgtccctctctatctggtttgttatgtgatggaaggatccctcatccttgtatataactattctctattgatcaccctgattccatttctaatccaaaaaaagaaaaaaggagaaaaaaacaaagctgtgctatatctttcacaatggattgaacaatccaacctttgattatgttatgaggaaaggaaggccctaaaaaaactctacagaggaagaagctcacctcctagccaatcattctatctcctgattagttgatctaggcttccaaatgaatgagttctcaacattccttgagagatcatcttgagtggaacctacaacatttggtttatcccaaaattttctctatttattttgtagaaattagctatgacatttaaaattgaaggtttatgagttggaatctttcccaaatttgaaaattggtctaaaatcacatgtatcttcaattagaatatccctaacttgttcttctattttgtctcttggcttgctaaagactacaggtttgaaatctttcacaaagaaatttggtttaagttctcatcatgtatctaagattggaatggtgcattttatgtgtagctacctgaacatttttcttttttcttgccactacatggtcaagcaactcacttgtgttccatgctacaaaataaaattattaactaatgtatctcttgattatgaaggcgtgtgttctctatattcttcgagttggtgtgac

SEQ ID NO: 13645 - DNA, 357 bp, Vitis vinifera
  Intron number 2 from transcript GSVIVT01015040001 (locus G SVIVG01015040001) derived from phytozome v7.0 (chr-ID chr1 1; pos 674828 to 675184 reverse strand)
ccgcagtgtgtgagtgtcatatagacattttcttcttttttgattcttttcgtgtgttttggtttcttttgctcttattttatgtttattctttcgtttgtcaacacttttaatattacatccttcttaagtagaaggattggattttagacatgctttcctaattcctatacagagacttgcacagacacacaaccatgcatttcttttattggcatatgctatcctccctttcatttcctatctcagaatatgttctgcagcaaaggcttgtgtgtatgtattcttctcattagtagattccatttctcctttatcaggatttttaagcttttgtttttatctataattgcaggt

SEQ ID NO: 13646 - DNA, 3451 bp, Vitis vinifera
  Intron number 2 from transcript GSVIVT01025615001 (locus G SVIVG01025615001) derived from phytozome v7.0 (chr-ID chr8 ; pos 13557355 to 13560805 reverse strand)
ttgacttgataaaggatttgaaacggtagacagtatgtttacaaacaattttggaaattcaagctagagatttgaatgcgttttgatcattggtgtttttctttaatttttttaattatgtatttaatttgcattcaagaaatgatacttgcatgtggttttatgtcatttttaattttgtagacggaaggattgagctatttaagtggccagtggccatggagaaaactttttacttctttgaacacattgcacagtttgggacaaaactagtgggagatatttggatgaacatttcaaattgggcaaaaaggtttattctgatggtattagtgtgtcatttagttttgagttattattatccaattcctcggaattggaattccataaatactgagagaatcttgtttatgtcatctattttaaaaaagatgtacaactgtttgaatcttggaagaaatggatgaaaaggaaagtcatctttcaacaaatgaaatattcttatttgatttgactcctctttttccattctgtcattcttgcgaaagaaccaaatatccttaaacatagttatcaactggcaaaacatggcatgtatcatttttctgctttttcttattatgaatcattttgtattgtgtatcatcagtttatctttccttcatattggaaaatgaatataaaaaatatttttacttatataaaaacacatttttccagacaaagtgtaagcaacatattataaaatatttttctgaaagtttatgaggttaaatgagataaacacttggattcatgaaaatcatacatgtttaaacactaaacacaatatataatgaaatcaagttttcaaagatttatcatagaatccttcaaaataactttctaatcttttagccataattttaagttctaagctccaactaccccctaataaacattgcaaaaggtctagagttgagccaagtctcccctaaaagataaaactatgaccatataaaggtatataactatatgctgttgacatatagatgtgtttatgtgctatgtagcccatgttcaaatttctaagtatgacatcatccctttagaaggaaataaactcaaaaaggagcaattaataaattaaataaagggctttattcttcattcctcatcaacgtcaacgccaatgatcaagtcatctgaatggcagatgtttactcaaataatacttccatatgttccttaaaatgatgattgctctaaatttcaatcttcaaagcttgattgcagcaaaatgcttacaatatttctacctgtcatcattttctccatccatttttaacctttaacttccttgtaaacaatagtattaattttaagcccaaaggtgaggctttgtttaggtacaattcctgttctttttttttttttttttttaaatagaaacttctatataaaacgtataaacttaccttaataccttaattttttttaataaggttttaaaacccattacattttcattgtaaacctctaagagttcttgaattttatgtagaagctacgaatactttttgttttttttttttaaaaaaaggaaatgtatccatatggacactgaataactcattttttgctaataagtgtcttgtgtgtcatatatgtatcctaagatacgctaaagatgcaacacatatacgaatgatatttatggtttacttgaaaatgtataatatcatatctattgtatcatttaacacccttttatcatcatggtcttaaattattgattctattggaaacaaatggttttaaataatctttcagtgatatgcctaagcatgcctcttttctttccatctagcaccacttataaaaggaccaggtttgagtcttatgcttttcaaatgttaaactttttttttccttcacgctctctaaaataagaacccttctgcacttggtcatatctcctcctcacttgcaaaaacaatctcattgccaacaaaaccctaacagctgattatctcctcatccacgactctgcaagtgagttttaatctcttcctctcatcacgtccttttcagtttagtgtcatggatctgatttaagaaaataatggtttaaatccatcaattggatgaggtttcaaggttttatagccatgaatcttatatggcatttttagattttaaagccatatatctaatttgaccttgcttgtgtttgaagcattgaatctgatatcacatttctactgtttgaagtcatgaatgattgtttaaaatttgattcaagatttttagtgttgaaatccatgaatctgatttttaagccatgctgtctgcaattgatattagacagtagataatgcttattttacttgcaacttgttttctattacatattttcttgatatggcttatttgatataactttggttgctgataattgtcttagcatggatttagctgaattttatagatatatgtggtttttggttgtcaaattttattaggctaccaaacacgtgttttgattctgtttattcatttatcttcacacatgaactttgattgccaaatgtattttttgtttctagaaccctaggggaaaaaagcacattgcctaatttcttctattttcacacatgaactttgattgccaagtatattttttgtttccagaaccattggggaaaaaagaagcacattgcctattttcttccctcctgtaaagcaggtttcattttgctctttagtttgagatttccctttccttgccttgcttttttcttcatttcaatgaatttatcttattaaaaggaattgtaaatttaagtcatcaactgggtgacttttgtagtaattattaggtcttggaattaaacacaagggcactcgcacatgtgatatattgccctgcagaaataaaggatggaccttgatcctcaaagttaccatttgaaaatattttgacaaatatcaagttgtatgttttagcatatacattaatgtgcttttatgcagcatacttcatcaaagaaaaataatctcaaggtcagtcattggtgagcaagtgtaaagttttgaggttattttgttagtctgctacttgtgaaggtgcatgtattccttttattagcaaccgcatttgatggagaaaataggagaactagggagctagtatcagaagtaataaagaaagaaataaaagaatgtatgtaaagcttaaacttgcatttacatcttttgtcaatagtaaaaccgtatagtcatcttgattgaatgagatgaagatgattcagataacttagatggcatgctcaatacagttaagtctatagttaggcttcgaatattttgagctcttattattctattctaagttaactgtgtgctaagagcatctttcctgactctttaagtaatattttggcagtctttccagaacaagggcttttgg

SEQ ID NO: 13647 - DNA, 1942 bp, Vitis vinifera
  Intron number 8 from transcript GSVIVT01018815001 (locus G SVIVG01018815001) derived from phytozome v7.0 (chr-ID chr4 ; pos 19639973 to 19641914)
ttattaaccctgggaactgttatccgtaagctaaggttagattttatttttattctttttttttatatattttttttcattttgtttacaagtaagcatctggttgttccccgagaatcagtccatgtattcatgatatcagatgtggtgtaatgattccttaaacacatctagtttacaaatgcatcgttgcagctttacagacttctgacctcatttctggcagtatctactgcatgtaatttatattatattgaaccactattggagcaggtgctggctgggttccttctttctttatgtttctatgtagacatcgaatccatcgattattgaacagtattaggtattatcttgcttggtagttaatagagctaccaaaaattgttctctataagcccatcagtcttcttgtttcgtatgttacaacttacattgtactatttaggtgttatctttctagttagttaatagagctaagttgtaggtgttgtgctagtagaagctttgatatcataagttgcgtggtaagaataaaacatccatacacacaagggtgcatggggttttaatgtgttttcacaaaccatgcctatatctatagataagtgaaaaccatttactattccatggacaacattacagaggaaagaggaaaaagaaaacagatacaacctccgagctcggaaacatcccatgtctcccaggttttagtaactacacttgaatctgagccttgcttcactgtttattcccactctttctcacatctctacctaccaatttaatctttacaagcccatatcaatctcataatatttctccactctttcccgatattctttaacatctttccttattttatgagaaaacctatctttacaagaaaatatcaatataggaaatactctatgcaatattttttaccaaaaggaacatatataaatagaattctgacagtaggtgtcacagcactaagctaggaaatagggcaaattatcaccatagccttcattttgttattctctaattttatttttgtgggatttgctacttgaaaccaatccataggctttacatggcccctatataggcactgaagagacacctcatccagagatcaacatatcaccttcaaactgggcatgctaaagagaacaaaattgtacatgaggaagacagtatgcaaaatattatctcagggagtaaaaatgattggcacatctttatcttgaaagcatgagtagctaaatgacccaaatttggttgtgaacttaaaaagtagaaatgaatttattggtaacattcgtggttcattcagtaaatcaaggactctcaactcttcttcctgaactcttcctcaataattgttttcaccttgatatagttatagctcaaaacagagtacaagtcttaaacattttgtcattgaatttttgcactttaatttggtcctggacaatgtgtatcaatttggttgctatcattttgaacacactttctgctgttgaaaacaatgatgtatcaagttttgctgaactacaaataatgtggctagaattgccttctgaactcaatgtgtctaaatggttagccatattacttaactgaaaattcctttggacatttattaagtgcaaattgtagttttaattattcagcaattcaggatacagtaaatggtcgcttcacataaaaactttttgctttagcattctcgaattacattctgatggttattatgttattttgaggagttttgagcttaaaattttctttttactctcccctttttttttttttttttgaatttccctttcatttcttagtggttgtatagttgaattctgcagctgaaaggataattatcaaatctgctagttatataattgggtatttggatgcagcaaaggaagaagtggacatattccttatagagatt

SEQ ID NO: 13648 - DNA, 13454 bp, Vitis vinifera
  Intron number 3 from transcript GSVIVT01034451001 (locus G SVIVG01034451001) derived from phytozome v7.0 (chr-ID chr1 0; pos 16014687 to 16028140 reverse strand)
gttaggttctgtgattttgtcgtatataggtgtattaaattagaatattttttaatattataatatgtaggtgtcttttggaatttaatttgattttattgcgttactttgtaatttgtagttttaatttttattattcacttatacattatataatatacttttataaagatttgaatagattttgattttataaatgggtgacggatggataacgtgtagagtatagcaccttagtatgcttttattttttgtttataaaaattaagaatataataatgtttttaaaaattaagaaatataataagagcccccaaatacgtttaacatttgcaaaattcaaaagtatttaatgtctcatgttctcatgatttgttatttaacttttatgaacaatttgataataaaaattaaaaataaagagcattcttaaacgcatgcccatcatctcttcctacatctatctctttttctttttcttttaaaaatattattaaatatgattttattattagcattaattataccaaacatggttaatatttataagaatttaaaatataatttaaaaataatttatttttcttttaaaaatagtaaaataaatattgcaataccacatgaatgaatccgcaaatttttttttaaaattttttctataaatatatatatattataaaaaagagaatggatattatattaaaccacttatcctattttatgtttagttaaagatatgataggataaataattaaatacattctattatttcattgctaaccatataataagataatattatattctatctcgtacgatgtccaactaatagaacatgacctaagactacatttgattagtgggatatgatagaagatatatatatatatatatatatatatatatatatatatattaggatattatatcctattggttaataaatatatatcttaaaatatgatttcaaatgaaatatgatatatttgaatatacatatccaatgaacataatattttaagatagcatatgacgatatgttatattatattatgtttatatataatttgtgaaatgaataagaaataatatgaaatatatattatttttaatgtttaaaataaaaattatatcacattccaatattttctattttttaaaaaaatgaaatttctcttatatttaacaatattcatgattaaaatatttaaattttataaataaattttttttaatttatgttatttaatatataaatagcatatattaatattattttaggatatgtatatgtcatatcatatgattaagatgtcacatgtagaatgaatataaaaaagagaatggataatatattaaaccacttatcatattttatgtttagttgaagatatgatatgataaataatgaaatacactctactatttcattactaatcatataataagataatattatatactatctcatatgatgtccaaccaatcgaacatgacctaagactatatttgattagtgggatatgataggatatgatagaagatatatatatatatatatatatatatatatatatatatatattaggatattatatcctattggttaataaatatatatcttaaaatatgatttcaaattatatatatatatatatatatatatatatatattaggatattatatcctattggttaataaatatatatcttaaaatatgatttcaaattaaatatgatatatttgaatatacatatccaatgaacataatattttaagataacatatcaaatgtgatatgttatattatattatgtttatatataatttgtgaaatgaataagaaataatatgaaatgtatattatttttaatgtttaaaataaaaattatatcactatagacctcgcatttcagctcatgcgtttcccactcgatggcgggctcgattttgattttgaaaaatgattttatgaattaagaaaaatgacttggaatcgccacttatttttgttttattttaaaaggataaacaaaataagaaagaaaaaccataagtgtgactccttattttggaaaaggtgatctacgaaaaaccggatcgggtccgagggtccggttacttgtcgggaaggtacggaaaaaaccgtaatacccctctaagtccctaagtcgggtctctactaataaaattgaagcaatcatggcactggatgagtaaatcaatgaatacccagaataaattgtgcacatgtgagaatccggacatgcataggcaacgactagagggaaaatgggtacatacctgggcaatgagccaccatgcgctatcaatagagagggttagtgcacaatttaagaataatatcatgcatgtcagagagtaggataaatcaatcatgtatgataatcaaatcaaacaatcaatcaatcaatcataaagtcacccatgttggggctccaccgaagcccgtttattttgcatgacttaatgtcacagattccattattttggaattatgaaaaatttattcatgcttattgaaatcaagaggagcagaagatcgtttgaaaaccatagcggaattaaaactatttgagagaaaattggatttctgaaatttgattgaaaaattagaatctcgaagattattggaaaattggagttttagagtttattagaagatcagacttttagagattaaatgtgagaatgagaattttagaaattaaatttgaacgagattggaattttgaaaatgatttgagagttcgggattttaaatgagtggataagtggatgagtgaataagtaaatgaatggaataataacgatggcgaaataataaagattaggtaaataattgcgaaagatggaattttagagattggaaatttgaatttagaaattgaaaacttaaaaatttatttagagatgagatctttagtatatgaataactgaaaaaataaatggataggataacattaataacaagaataatcattaaacaacggtacatgaacgatggagcttttgagattggaaattagatttggaagtcgggttctgaagaatttaacttttaacgattagaataaataaataaatatggaataatagtgctaattaacggaaataatagtttaaacgaatagaaaatgagtagtggaatttttgagattgaaaattaaattaggacgcgggatttttgaaggattggactttaaataaataaatatgggataataattctaatcgatgaaaataacatttaggtgaataatgaaatttttaggattaaaaattaaattaagacatgggatttttgaaggatttggactttaatgaatgcaattcttagaagaggataaataaatatatacgacataataataataattaacaaacataatatttaaatgagtgaaattgaatagtggaaattttgagattgaaaattaatttaagaagtcagatttttgaagaattgaattttaatgatcggaatttttaaaagaattaaatacataaatatggaataataataatagtaacaagaataatatctaaacggataaaagtaaatagtcgaatatttgaaattgaaaattaatttaggaagtcggattttcgataaatggttttaaaagacataagttttgaagataggacttaaaatttggaatgtagaaaattcattgagaccaacataaattaattacataaaaattttcatatatgatgattagacataactaaagcaaagaagatgaaatataaattattttaagttttaaaaacaatattccatcctaataatttatcttttagttgtgtttaagttgagttaacaaaataggtaaatataaaataagataaaaataaaaatgaatgaatagattaattaattacgaagattagagatttgaaaacttatttagaattggggcagcctaatgggctaactcgatggggacatgggccaccttaataaggaggaatggcatgaggcccttcatcaatgcaaatgggcttaggctccaacccaggcccatatccatcgtcatggacaggcccaaactctaaaatccaccacaacccatttatttgagaaaacattgccctccatcaacatgtctgggttgggcttcttctcaagcccactatccatcaccatgggcaagcccaaggcacccatctccattacagacttgggcctgggctccaactcaaaaacccttatccattgccatcatgggcaagcccaaaacccgtctccatctccaactcaagcccaagtccaatgtcatcatgggcaagcccaagcctccaaactccatcacagcctgcctaacctcatccacgttctcttcgttttgaattcaccagaaacggcaaaggagcttcgatgacttggccactggcgcagcagacataggcgtggatggactccttgaaggcaccgtaggcatagtggagcacgacggcgacgttgatggtggacaattatagcggcggtggtggcgttgccgatgagggagacttcatcaacgtggtcagcgttgacagggtccttgatcagggttcttgaacggagaatggccagctagagacggttgaaatagaggtggttgggctggcagagaaaataggggttgccgatggtgttaatgaatcgacaactatggggggtggccatgcatgcatgattcccatgcatgcaggtgggtgctttcggattcgtatggagatgagcaaggcatgggaaatgggtagtaatccaaatgggcaagccatgagcaagattgaaggggaagagagacatggatatgatgggtgtagggaatgatgaaatataggtatgaaaaatgggtatgaaagttggtgtgggggatgggtattgtaatgggtatgaagtgggcgtgaatggcagccatgggcatgttgggtgagaaggcaagtgagggaaaacagttatgtgggatggtgagcatttacatgggaatgaatatgagggttatgaggtgtaggcggtgggcttggaaacatgggatgaattgaacattggtgagcacgctagtgggtatgaagatacgagatgggattagttggatgggtagtggaagagagtggtcgtgcatggggtgattaataatatgagtgagggtttcaatgggtatttgaaagggaaaagacagcgggccctcgtgaggctccatgcaagagagaagattggatgaagaatgaatggagggaatatgagagtggtggaggatgctcgattccagcaagcgtgagtgaagaatgggtatgactggcacgaagggtaaaaagatggtgaaacgaagcgagtttgacgagtctcgggatggatatgataaatgatggaaaaaatgggttagtgggggtgtgagtgagacgcatggggatataatgagtacataggaagaaaaaaatcatggacagtcctccatgcatcacctctttgcctaacagctacctttttaagaaccatgcccaaagctagctcgccctgccaacttttgcaagagttttcttatccaagtcgtggcatctggactaatccagattatgttcgccatacaagcacgggagtcacctctgatgatagtttgcagcagaactgggcaaattttgtgagcgggtctacgtaaaacttgctttaaattatcatcacagttgctttgccaaaagaacagcaagcttggcataacagaaaacaaaatgtacatgtggtcttcaaatgtcaaaggagtcacaagtgactaaaaacaggggaaagcagttcataaacggggaagcaaaacagactaaaaccatacctggaccaagagaatccggttgagcggatcttctgattcttttcagcttgctccccccctcgtctcctgtcctcaccagcaagcctctccccagatatctagctctacttctcgtctggcttcttccttgctaaaaaaaacttctgtttatgtcttcctcagcaaaccattactagctctactatttaccggtcaacaagcatgtcgtcttcaaccaccaccatggttgtccacgccccttgccagatgatttatgaaaggcccctttgtttcaacttataaaaataaaaaaagtaataataaaaatgatatcattaaaccaatacacttggtttaaaaacagggggtattccaatattttttaattaaaaaaaaatgaaatttctcttatatttaacaatattcatgattaaaatatttaaactttataaataaaaatttttaatttatgttatttaatatataaatagaatatattaatattattttataaatatttgtttagcatttcttttttaaccataaatttaatttataataaaaaattatttaaaaaattagtatataaaaaaataaaaaataaatttatgatatatggaatatggatatctcatatcttatcatgaaattaacatttcattcaaaaattgaagttgtctataatactgttatcaacaccatttgaaatagaaagtatgtatcaatttattaagaacgtaagtttgtatagttgtgattccacttattaacaatgaatttaatgcaaaatgatgaccaactagaaggctacgaaaataagatacaatgatcaaagaagcaattgtggtcctaagagaattatcattttcaaatgagatcatattaaacaaatgtaataattttcttttaatcactcaaataaccacagacaaaagtctcaagatattggctttaaggtcaaaaatcccaaattagggaaattcttcgtaatttatataatctactaaaaaacatctagattatgtttgattttgaaaaaattgaaagaaaatagaagagaaacaaaataaaaaggaaaaataaacaaaaagaaaaaatgaagaaaaataacaaaataaatttaaacacaataaatcttttattaatattccaaaaaaaaaaaatagattatgtgagtatttgataaaccaacttaataacttaaagtgacttaataatttaatttaagtcattaaataaattaaatatatttggtaaaatagattaatgatatgaattaaaatcgaaaataatttttaagtaataagtaaaaataattaatttattcttaaatcaatattttcatttacctttttatcctcatttataatattaggattttaaatatatatatatatatatatatatatatatatatatatatatatatatatataatattgaaattacttaaaaaatagagacatgttaaatccatatttttatttacttttttatttttatttgttttaattatttttataatcacttttgaccttcattgatacttcacttcctttgccccaattataatatatgaggataaatatattaattgaaaatttaaaataaattttaagccaattttattaaacaatcttaacgataagttttaatatttcatccaaatcatatttttcttaagctataatgccaagaagtcttaatgtcacgtgttccaaaaagaccgtatagacctgtcgaatcctgataataataatgaactagacatagagcttcaacatgaggcggtatatacaagacgtcaaaatcttaggggcatttaggaaaaaatggagaaattttgggcaaagagaaacgaaaccagcctatatatataaggaaggcctttggcttcgagggcggccactccaacttcagatttctctctcctcaggtctctctttctctacccatcgattgagatcattttctagggtttcttcgtttaattatcaaaatgtatttcttgtctattatcatactatttgttttcagtatttaatttgggtttaattttaccactcattgtgcaattcctttgttttttcttgtatttttcgtttattttctgtttggttggtttgaaactctgatctgattaaaagaaaacgagaactaaacctgcgcgtggcaaatacaaattcttgaaaaggtgaaataatgaagcattcctaggtttgttagtaaattatttagctccggagaggaaaactgaaacttttatggtcaattttctcctgtttcgaggagagaaggcaagttttttaagattgaaataagtgaacttttcaattttctctcaaaagttcttgaattgtggtaggttatttaattttccatcttcttgaaagccccagcccgccgtataaagcctatgatattgagttttggattttcaaaccccagcccaccatgagtttctttatatgaattcatttataaaatatattctttcattttcccatgtcatccattcccacaacataaaaacaaccaaacatgaatatcatttactaacgccaactcgcaaaaacattacataaatgatgaacataataataatgttaacagtgaaatatcaagaaccgttttcacaaattttacatgaaattaataatattttaattactaaatataacaaaaaaaaatgaaatctttgctactatccatatacattttacaagaaggtttaaaatggaaattaaataattttaaataaaactatgcaggttataattcttgaaagaaaaaaaaacatttaaaaaaaattgaaacattcattgttaacaactcaataatatgactaaaattatcaaatttaaaccaatacgaacttggttgccttttctatataaattcatatttgttcataactagtcataattttgtttgattgggcacaaatatggatgggagaaaagaacatatatatcaatatcatttgaaaatttgtataaaataatttaaggtcatattaagttggtcaagagagtagatattatatcacagtccatgtttggttagtgatatgataggataagttatcacatcacttatcttattttatgttcaatcaaacatgtgatatgataagtggtgggatatattatccatcctttttttttttttacccatttcacatgagatatgttaattttatggtatgatatgagatatacatatgccatatatcaaaattttatttttttattaattttttattttttataataataatatacttattttacaaaaataaaatttttttattataaattaaatttatgatttaaaaagaaaaactaaaaaaaatattataaaataatattaatatatagtatataaattatttttatatattaaatgacataatatttaaaaaaattatttgtaaagtttaaatattttaatcatgaatattgttaaatataacaaaattgctatttttttaaatagaaaatatttgaatgtgatataatttttattttaaacattaaaaataatatatatttcatattattgtttatttatttcacaaattaaatataaatataatataatataacatatctcattagatttgctaccttaaaatatcatatttataagatatgtatatttaaggatatcatatctcattgaacatcgtatcataggatatgcatatcctatctaataatatatgatatcttaagatatacatattatatcatatctatcaaccaaacgtagcataagagattaagaaaatatcttgtcatgggattaacatatccatgtaaaagggattaaaaaaaagtggacaatatatctcaccatgtatcatatcttgtgtttggttaaacatagaataagataaatgatgaaataacttatctcaacccatcaccaaccaaacatgagatagaatataatagtccctcttttatcatgtgtcatactgtatcttaccaaccaaacataatctcaaatattaagaaaatatctttagttgtgtttcctatacaaaactcctttttttttaatcaaatttaactagtctgctacttaagcaaatgataattttcttaggaccatattttcttaattaagtgggcttattttattatttttactctattaggtgattgattaaattatgaaatacttttattatcctagttttgttaggatatgaaattacaatttaattagatattaaagaataatttaaaaccatagtaaaatccttataaaataatactcttgaaatcgtgaaaaattattatcttagtaggattattgatttatggataaatgaattcattattaatttatcaacaaattcataatttattaatttatttattatgaatatttattcatttggagagcatcatgtttataacatatatatatatatatatatatatatatatatatatatatataaatgacttaaaatccaaaaacaataaatgtggtcaaaagtaaatagatagaagcctaagactctctaaaacaagagataattattaattgaagaagataaaaggactcccaccatgaagatatgcatgtcaaaacttaatgataaaaaggttttaagtatgctgaataaatagttgaattgaaaaaaataggaattgtaaaaacttgctcaatattgtattttgaatttttgtttgttatttggttatttatttatttatttttgtatggatttcattgtttattaatgtatattttcttaacaccttaaggattttaaaaagaattattattttatccaaaaaaatatatatatagacatcaattttttttaaagagctttcaaaccattatttttttcaacgtaagttttttagaattctatatataaaaatattgctattttaaaattttaaaataaaagataagagatgtatctaaataaatactaaagaatttgtaaaatatttttaaaattttgactaattatatagttgatgtcacattgcatgaaattcaaattattttgagatgaataaagagaatttaatttttaataagtaagattgccttcctcttcccccttttttttttctaactaaaacaccatttttcccattattttgaaattccttgaattttgatgcataccgctaatctcctctcaagatggtgaaaatttattggtatcccatcaccatggatgaaagtttccatttttttctctgaaattttgggttttgatggccggcgatacgaaagaggggggcgaaatgtcgatggaagaaatttggccaaagtggcaaaaaaatcgccgaaaaacggctacaggtgacaaattgacaaaatcttaaaaaaaaatgtcgaccattgcaattttatcagtgaaatttcggtttgtatcgctgggaaatttcccgatatttcctaccaatccagcccgcacacaggatacaaaatctgtccaatttttttttttttttaaaaaaaaacataagatgttatttggtaatctgatcatgatttgtaggcaaaggttgtgttttatttaattccaatggcacaaaagcaaagcgacccctagaacagatccagagaacatagggagcaaaaaaaaaaagcaatttttttggttttccctgggggttttgcatggattttctcggaaatcaaacgatgatgaattttcccggaaatcgaatgggggatggattttcttgggaatcaaacggcgcaaaaaaaaaaaaagtaataaatgattagattagaacctgcgaggattgagagtggaagaagaaagtagggcctttttaggattctctcgtccagagggcagcttcagcaaagggctttttgatgcccaagagagagaagtgggtgacccttttgattttttagatttagtagagataaaaaaaaaaatggaaacaaatcatggctccatatgatggtccaaattgaagctgatccaacaatcaaaattgaaccccaacggctaagtgataatatgtacaaattattgatatttaatgaaatcaagtctttcatgaaacttgataatgagtgtacaattacaaaattcacatgactcacataatctaattacatctaatatcgcaaatcatataatatatatatcaaattcttcaacaaaacaaatttaaattatctattatacttctaattacattgttacgaggtttttcttatatttccatgagttttgattaattaaaatcaagttacacctctaatcggataagaatggtgaaattctcctaaatcagaaatgaattcaaaaccaagggaccctttttcctacttaaacccgtcctcgctatcacaccaattatattatattgtatatcctacataattttataattaaaaaattatatatatttaaaaactaaatgtcaattctaacttttcacattgaaactttttaaaatgaaatccttgttaaaactcaaacattaatgattttgttagacttctttttgcttagatacatttcttgttttttatttttaaaattaagattattcataaaaaaatatttaaaaataaaaatctagtgtaaagttatgtgatgtcttaagaattacttttaaaaattttgaaattttataacaaaaaatgtttttaattcctcaatttttttaattaacttgaaaacaatattaaattttgtatgtaatcttttaaaaattcttgtattttatatagatattagtattattttttgtttttcaaaataaaaatcagaaaatgtatctaaccagacattaatttttctaattatcattagaatatttttaacggataatgtcatattttaatataaccgaaaagacaacttatctaattgttatgagaagtctataaatcaatatttttaaaataaaaaatctatattaatttaaaaaatcaatatttatattttataaataaaaaatgggaatttgtctcttagtgttatgggataggggagctctctccgattatgcctcatttacatccttgcatttgcatactcgtggcaaatcttacgttgaattagcaaattgggatgcttatatctcataaaagcatttctttttatatatattgcaaatatacctttgcaatcttatcaagaagagatttaaaaccttaaagctatatttggttgtgagagaatataaagagaaaaaaaaagtgaaaaaaataaaataaaaattaaaattattacattatttttatataatatttcaaaataatttcatttattttaattttttttataaatattaaataattttaaaataaaatgaattttaattattattattttcatattttaccgtataacctcaaattaaatactatcattatttgattataattaatattaaaccaaaacatttttttgaaatattaaaaattaaatattaattagagtcctaattctaattagagtcctaatctaattagagtcctaattcttatgttataacaattatattttgattttaattaggacaacctatgattctcttcttatatatagacttatgggtagcataacctttacttatagtaccaaagaaaaaattgtccatcatcttcttcaac

SEQ ID NO: 13649 - DNA, 879 bp, Vitis vinifera
  Intron number 6 from transcript GSVIVT01033471001 (locus G SVIVG01033471001) derived from phytozome v7.0 (chr-ID chr8 ; pos 20422978 to 20423856)
caggtatactccctctcaaattaccagttataaattcaacataacatgaatctctcaccatggtgtccatacagtagatagataccatctagttccatctccacaacccccaccacggactcatacctaagagtgcttttctacttccgggattttgatgaagaaaaaggcagaatattgactatgactatgtccataaggtggaagactctagctgagtacttccgctgccatccccctagataccacgaagttccacaacactggcttggtcttcaggacttgccagcatatctttgctcctatgaaccgtgaaagattctggatgaaaaaaaaaaaaaaagaaaaaaaaaaagaaagaaaagaaaacgactagggtttctcaagaggaagtttaatgttggagataaatgttttatttgatgatatctgtagcttattgaaacttttggtgagatttattgtcttgtcagttttgatgaatagcttgggcaggactttgtcaaattatttttaggtacaggaccaaagagaagttttagtaggtttttcgttttgatgaatagtttgtgggtgtccttcaagcctaagtattctttttcccagtgaactttaaagtaataaagggcatacctttccttgtatggtaattttctttccagcaaaatcctgtttaaagtaattttctcacatcttctagagattcattcatttagttgatcagcaatgggtttttgtacagaagcacataagattatgggaatatggtaggctgttgatttgccatgctcatcattgggtgtcccatgccttgtatttatttagcctttgcttctttatgtagtttcactggttggacaatcggcttctcctgaggtc

SEQ ID NO: 13650 - DNA, 10050 bp, Vitis vinifera
  Intron number 4 from transcript GSVIVT01029984001 (locus G SVIVG01029984001) derived from phytozome v7.0 (chr-ID chr8 ; pos 2709625 to 2719674)
atacttttcccagtccggactttatcctgttctaggtccacacccaacctacagttttagctatctttcattaaattatgctccctttagtttccaagaagacaggagaataaacttaaatctggaatcttacaatcaccatccagccataaataattgaaaattttcaaatttcctttgttatgttctcttcttagcaatcaaatggagcaataatttcattttcttaatgttgcattttctcagtgaatttttgttttcttcctatttataaatttatgtagagatgagaatttcatgccattgatggtgtttatggatattccttgatgaataatcttataaagacccaccatagtggggaagccttcacattaagatccttaaaattatcaatatcttttaattttgatatggaccatacacaaaatactattaagaacgatacaaaagaagataccatccaactttgttggtcaattggccacatgcataagtgcattgtcatgcctcatgcatggtaaaggattcttttagttcatgttgggttaggagggtaggaaaagatatacattcatttactggaaaaaggtggatcaaagagttttagtagacaatgataagatgaaggaaaggtgaaagggtcttctatttcatctactaattatctaaaagaaataatgggtagaaggatactataacaattgttagatttggaccaatgaatagatgttttgcagactcatgacttgagctcacttggccagttcccttttgtaaatcaacaaaggtatttctcaattcctgtatctttattagaggaataatacacacatatatatatacaattgagagtcctaaattaggaaggtattatccctaaggaaacaacttaattatggtaagtacgatatatacaactaacactccccctcaagctggagcatagatgttgatcatgcccagcttgttacaaaagtactcaactcgagttccatttagagcttctgtaaaaacatccccaagttgctctccagtcttcgcatagccagtagagactagattttcctcaatcttttcatgaatgaagtgacaatcgacctctatgtgtttggttctttcatgatagattgggttcacagcaatatgaagagcggcttgattgtcacaccaaagcttcgctagcattgtgcactattcccacttcacataagagttgatgtatccatatgatttcacaagtagcctgttccatggccctatactcagattctgcactcgaacgggatataacactctgcttcttacttttccaagccactagattcccaccaaagaacacacaataacctgtagtagatcttctatcaaacttagaacctgcccaatccgcatcagaaaaacactcaatgcgagtgtgtccctgactactgtatagtgtgcctacaccaggagccttctttagatagcacaaaatctgccctaaagctgcccaatgctttactgtagacgcaaatgtgaatgactaacaacacttactgcatatgcaatatctggtcgtgtcacggtgagataattcagcttcccaaccaccctccgttacctctcagggttgtagaagggatctccatcatctggcataagctgtacattaggaaccatcggggtagtacatggctttgcttctatcttaccagtctcttcaagcagatcaaacacgtacttcctctatgataagaacatccctttcttgctccttgatacttttattcctaggaaatacttcaattcacccaagtcctttgtatgaaacttggaatgaatgaatgccttaagatcagagattcctgcatgatcatttcttgtaataactatatcatcgacataaaccacaagaagtatgataccaacagctgatttcttgtagaaaacggaatgatctttcttgctcttgttcatgccaaatgcttgaatctccttactgaattttccaaaccaagcacggggactttgcttcaatccatagagagtttttttcagacaataaaccttcccatactccccttgagcaacaaacccaggaggttgccccagataaacttcttcttctagatcaccatgaagaaaagcattcttgatgtctaactgatgtatcatccactgttgggaagcagcaataaaaataaatagtcgaattgaatttagtttggaaactggagagaaagtatcagaatagtctactccatatgtctaagcatatcctctagctacaagcctggctttcagtcttgccacagagccatcaggattaacttttatcgcaaagacccacttgttgccaacaactttctttccttaaggcaaatcaacaagtttccatgtatgattgtcctccaatgcacggatttcttcaagcattgcattcttccaaccaggatgattcagggcctctgtaacagttttaggtgctgaaatagaatctatagaggctacaaaaacactcaaggaagatgacaggtgatcataagacacaaagttagcaatgaaataggtagatttgctgtgtcgtttaccttttcgaaggctaatgggaaggtcgagatcactggaaggatcagatgacgaaggagctagtgtaggacatgtatctattgtcactgggcgtcgagagtacacctgtacaattggtggtttgactggagcaggaggaacatcaacaacagtacccaaatgagcaagagacgcatcagaatcaaccatacttgattgcccaacagttggtcttgaattaaccacttgatacacaagccattcttcatcctcctcctcacttgcagaacttgtgggtgaagagaaaaaggatgtgtcttttgaaaacacaacatccgttgatattagatacttattgagattagtcgagaaatatctatagcccttttgcagtcttgagtaccccaagaaaacacactttaaccctaaggatcaagtttagtaagagaaggccttgtatctctaacatagcatgtacatccaaaaattcttggttcaattggaaagagtgatttctgtggatgtattactttgtacggaatatcacctttaagcactacaatgagcatacggttgatcaaaaaacaagctgtggaaactacatcaacccaaaattgtttcggaaccttcatctgaaacatgagtgcacgagccgtcttaagtaaatgtctgtttttcctttcagcaaccccattttgagaaagagtatcaacataagatgtttgatgaagaatcccattgtgactcgtgtagttctgaaatgagttagacacatattcttttccattatcgcttcttaatattttcacaaacacatcatattgggttttaatctcagcagagaagcacaaaaatgtgaaaatacttctgaacgattcttcataaaataaatccaagtcattcaagaaaaatcatccacaaaggtaacaaaatatcgaaacccagttttagaagtaataggacaaggaccccaaacatcagaatgtactaacacaaacaaagactcaacccgtttattaatccttgggcctaaagaactacgatgatgcttcgcaaaatgacacgaatcacaatctaatgaaggtaaattatcaaactgaggacataatttcttcaacaacggtagagaaggatgtcctaaccgaaaatgagcttcaacaggagaggcagtactgacacacgcaactggtcgaggtacccactcatcaagaatatagagcccatcaggtacatgtcctttaccaaatgtccgtttcgtcataagatcctgaaacacacaatgatcagggaaaaatgagacactacaattcagatttttggtaagtttactgacagagattaagttaaaggccaaatttggtaagtttaacatagaagataacgtaatagaagatgttggtttcacaatcccaaaccctttaatctcatagggagaaccattagcaacagtaacaggaggagcagaatgtgttctgaaggtagagaaagttttatgattacttgtcatatgatctatggcacctgaatcaattatccatttgtttgaggaggagacaagacatgttttacttgactttgccagagcactaacaggagtagatgctttcagtgcttcctgatactgtgaatatttagcaaactcttttgctatcattgtgatgatcttgtttgaggagtctgaagatgtagcagtatcagatgtagcaacattggcagtttgatttctccgattccgaaatctgcaatttcttgcagttcttcttggtatggccaacctcatggcaataaaaacacttaatggtacttgaatcattgccacgattttcaaatgccctatttccgtccctattagtcaccctccttgcattctctgcatttcctccttttgcagcaagaacattggtgtgctgagaagacgagacattctcagttcgtagaactctattgaaaacttcctgaagggaaccaatgtcagaaccagaaagaatctaagattttgcagtctcaaactcagatgggagaccggataagaaactcataacaaccatctgttcccgttgagcctgttgtactctaacatccggactgaaaggcataagtgcattcaattcctcatataccttcttgaagtccataaagtatgcagtgagggatttagctcccttctcagaacaatggaaggcattccatacatcatacatccgagatacatttccttttccaaagtaaagaaaatctggataatccattagctctttaacaaattcacaatgactcaacagaccaacaatatcactattaatagagtttttaatctgtagaaataaccgtgcatcatcttgcatccaaagttttctagtgttatcattaggaggttcctcaatcaagtggtcatctttagcaagacttctcaaataaattttgatcgtcttgctccattaaatataattagacccatttaatttgtgtttagttatttttgacacaataggcactatatcagcaacagaattcatattctcttccatggcaataaaattcaatctccaaagtaattttacacccagataagagcaacccaaaccagaaattgcaattcaccatagcaagaagaaagaaagagacaagtacctctcttacaagaagtcaaaagcgtcaactcatttataatttttcttcccccatttttgtcttagcaactataaaacccttgactccctttgtgagggaaaatggattggagccatcttcaaatgcaggaatgccctagcttcaacagttactcatccaatagacttgccgacgtggcggccaaggtgggcaaagaggagtgtgcgagtgacgatcggagagttgatgaggataatttcgagttcactttcgttttgacggatgaggtgttgcgtgaaactcagatcggcccggtttctaagaagagcagttcgactggattggcatcgaagcggcggaggttccgagatttactccggtgaagtaacagcgagggtaaggattccttcgtgttcctcactccttccaaaagagaagagaaggcggatgtaactgacaaatctgatcattcaaaggaaacaaggaactctgtcgacgcgtcctaagaacagaatctcataatccaagaacgagatcaccctggccggaaaacgggattgcgacgccaatggaactggtcggaggtcaaaagaagctgccacacgtcggcgcgtgagcttcacgcgttcaacttccggtcgccggacttcgggtagtggctgatcatgacacctcgcttccccttctaaaggcagtgacactaccaggtcacttttattccgtgacccaagtagaacagagaatggcagaatgtcactggaaatcggtgactcagaaataacaaacccaaaatttaagccaaaggctttgataccatgtaaatcaacaaaggtatttctcaattcctgtatctttattagaggaataatacacatatatatacaattgagagtcctaaattaggaaggtattatccctaaggaaacaacttaattatggtaagtacagatatatacaactaacacctttcaagcccatatattttccctttttcacttctctttacagtgtgaatagaaacaataaattctagaatgctttagaacatagatggaaatgaattttcataaaggctatgaaaaacttgagattagtaatttttttagggttatactatgtatatttcaaagaactagcactggctgaatgataaaggacaaatggtcggatttaggctaaagatgttttgaggtcatgatactggccaaaaacatcgttgattaagaatgtgagaaaagatgttatcaacaaaagatgtagccctacataaagcttaatggtaaaaaaggattctattagccaaccctaagaaaaggctcttcaagttgagatctcatattagaaaacattgactcactgtttcaatccctagagagtgatgcgactaccattcaattcatatccaagttaaaggtcatctgcagatcagatgaaagatttctgtaggatgaaagccataggtagttagtctattgtggacatagttgctatagtgcagcctatagttttctatgcttagaactgaattggattgttactcttgtatactatcctgaaggtagttaagatcaaggaggaaaatgttgcgatatttcgacaatatatcgccgaaatatcctaaaggtagttaggatcaaggaggaaaatatcatgtatcgaagagtatcgacacgatatttcttggagaaatattggtccgacgatatttcgggataaatatcgagaaattggcgatatctcgtgatatatcggcgattttccccgatatatcgcatggtcaacgcgggtcaacggagtcaaacgcgctacagtgaaagtcaaatgtgctacagttccctccgctacagtgcacctccctttttgcttgaaattgcttccgaggggatttgaaccccaaaccaaaaggtttggggttcactccacttgccatctgggctaactcgcccttgtaatataaagtgtaccaaacatatatatacttaaagtcattatataaagaaaatgttaaaagaatattttaaagagcaaattaattataattattttataattaaatgcaaaattttcttttaattaattaccaaaaatataaaaattatataattttcgtcataatgtttttaatatcattaataattaattaaatattaaaaaattatatatatcataatttattttatattgtttaatacaattgaattaaatggatcatattttaatattaatatatattttaaaattagacatattataatcaaatatcataatattatatgtaatttaataataaatatacacttgtaaaattcatatttttatcgatgcatacgatattattatcaaatatgataaatcatgttatacatatatcaaaattttcaataaaataactttaaaatgtctattatacttctaattatattattatgaggttttccttacattttcatgagtttttaacaattttaagcttaccgatatttttttccaaaatatccgccgatatatctccgatatatccgtaaaatcgaagtaccgatatatccgtgattaccgatattttcatccttggttaggatatacactgtccttaaagatcttagtatagttttatgctcctaccaattgtttcttatgataacatcatttcattacttttgaacagtaacagcaagcatgtgaaaatgaatagtgaaatggtggttcatcatagccctgaattttaatgtcttttgatgtggaacaatttgcatgttaaagtaatgcctgcacttcatttttattagatggaggacaaagcccaagtcattgatctagtcttggtatagtgggcatgtattctctcaacagagttttatgagggggcatatcttctcaaaagaattttatcatgcttgttccacaactactgtttgggttataggggttgtattctgctcaatagaatcttttttcgtacttgtcccacatgaaaagatctcatcttcaatccatacaaaaattcatcaaatcatgtgtcgagttgtcaaaatcatcctaaaatttgtttagggatattgaatatttgtttgaattatcctcatgattttagaaaagagtccatttagatctccctatttcaccatgatcaattcctgtatttgaattttgatttcaaatgtttgctaattgagtgaattttttctcatgagagttgcaattcctttagaaaagttcatatggccagtatacatgctgcatgaagtataaagatcaactctatatcatccaaatggaggacttactaatgaaaaaatcatctaccatgtctgtgcatgtgtatgtgtttgttgtttgacttttttttattttattagaaacgaagaaaagtatattaatagaggaaaagatacaggagaaagaagagatacaagagaaagagaagaaaccaagagaaggatgagaggtctttcccacaaaacaaaaactaaacaaaagagaaaacacccaactaaagaaaactaaaaacacagaaaaaccccaacactatcaaacttttgaagcgcaaaccgcagtccagttgagttgtaaaacacttagaggaactcctctaaaagctgcagtacaagaggcccaaagagaggaaaagaatagaatcaagtctcataacatctctttcgttctccccttatcctcaaagatcctattgtttctcttttgctataccatccataacaaagtaaggcaagcgatttgtcaaagtgtcttacttcttaatgagttcccaaagcctttaaaagcaatgaccaacatgtcctcaatactccttggaggaacccaagccaaccctgctagattgaacaacttgtgccagagtccaatggtaacagggcaatgaagaaaaaggtggtctatcgattctccatttcctttgcaaagaatgcaccattgaggacagagggatttgtagagtcttctcaattgcaacttgtcattggtgtttaccttcccatgtgctactaaccaagcgagggccttaacctttgagggggcttttgaactccacaagaacttggctggaaggaacaagatagaatttgagacttttgacaaggccaagaaaaaaaatttcactgaaaacaagcttgatgatgacaaagaccacgctcttgaatctgccaaagaatgagagaaaaacactgaacaaagggagaacattaaactctgaaggagatcaatctctgaatcagtaagattgtggcgaaagttaaaattccaaaatagtggaaaggaattgccaaggacatttgagacagtgaggttgttcacaaaaataactctataaagaccagcaaattgagagtacaaagtttggttaccccaccaataatcttcctaaaaacaaattctctccccattcctaccactaagcggacaaaaagggaaaaatcttggaaaacttgagcaatagctttcaagggcatctgtgtgaccatccaaccaccatgttagcgtcccataaatactcgcaaaaaccttatgccaaagaccactcctttctctagggaacctccaaagtcatttccctaagagagcaatgtttctcagagaagtcttcccaaaacccaaacctcccaactcctttggtctactaacaacatcccatctgataagatgatctttcttctcttcctccgccccggaccaaagaaaatccctttgcagcttctcaatctttaattgtataaaaatcacatgttgacttttacaggtcctgattcctttgcataattgtttggtatttttcttttaatttagaatatacatatttcttgctcgtatgtttatttattaattcttctgttaatatgaataggatattaccttacgaaggcatcttctaatcctgga

SEQ ID NO: 13651 - DNA, 13643 bp, Vitis vinifera
  Intron number 3 from transcript GSVIVT01032913001 (locus G SVIVG01032913001) derived from phytozome v7.0 (chr-ID chr1 4; pos 24060205 to 24073847)
ttcccactttaacaagttttcaaggtatgtgtgcatcagttgccataatagaccttgccaatgaatgattctttctaattgaaaattttctttcttctttaatgtcagatgctaaatagatatattgatgagctgttgtgagctttgattttctatcagtaaaccatgccaataaaagtgaatctacctgcagtatgatgacaccatttcattgacaatgaagagctagattactttatagcacttattattgccatgcaccatgccaacatttcattaattatcttgcctaggaattccacaataacattattcccatgcttgagggaattgtcctaaaatgttttggtcagtggatactatagggaggggtattgggtttcttttttctggacttattgatgaatgatgtgtgcaggtctgtgtggatgtggtgggatggtttggttggtttactgtatatgtttcattttttacttagtttttgctttttgtcttttttctcttcatccgttgactggatatacctgtgtatgtaggttatgccccttttaatgtttctcgatatatttcttcatgctgatgacaaaagtttggataatgttcttctttttcactattttgaaagatgacaagaaactgcataacacaaaaacttgagaactccatagaaagaagttgcttcgctgataatatatccaaccattgagtgctgcacaaggaagtccaatctcttttaaagttcataatatgaactctttggattgagttcaacaacgtcatcaacaagccatcttattaacacctccattttttttttgacaacatgaatgccttgccaggctaggctctatggctagggggagtggttgtgccttgagcctaggtacctaaagcacgcctttttaataattgtgggaaagtgaccttagaaggggaactttttgttgacttgttccatgactagatgaagagtttggagagggttttctttgatagaaaatagagagattttatagatagatggaaatggttacttgtgtactttggtgcaccttcttttgaatacactgttaataatactcttatttgcctatcaaaaaatagaaagacaatttataagctcttatgcaaccttacattttaccaagacacccttatgccaaatacttgttctgctggccaatgggaccacacttttgataggggagcagccgggtctccagtccaaagagatcctaaaggaataaccagcagattctttgcctgaaggaagaacaagaaaaggattctggttatcaatacttcgatagagttttgtttctcatagatgattctaggggtcctttcagtctaacagttcactagatggtcaacatgtctggcaacactttggaggccacccactgaatcctagccaaagagaaaatgtgctaccacaattcaaatgcacttggacaataaagaatgatgtcatcaactactcctcgcccttcttacaaagaatgcatctgtcaggtttagttgcattgtagaattctcagtctaaagaaaagaattggtacttttttttaatccattaaccatgtaaaagctttaactttctagggaagtttagaattccaagttagtttctggtggagaacaagtgagcaactctttcttctagaggaaaagagagagaggttttgaggaaaggatgcaagacttctctaaggtccaaggtctcttaatggggagaggaaaaatgatagaatcagagttgtgagtatatagagttttaagactgtatgctgtaagagcacagggctgttagttgccatttcaaattccgttttctttggatttcttcttgcagcctccttgtgtacaaatctggatattgaagattttgaggttgagtttgaagccatccatgggggtaattggatttctatcattgaaaggagtcgtggtgttgttttctctctagcctttgaaagagatgaaattgattggtggttggaacaattgaagaacgcatgggagtagaagaggtctttgggtttcattcggaagttgaagggaaaaacatggacacatttcctagagattagggacacatgttagcactagggagaagataggaaataactgtgcttcatcttctctcttttcaatttcaaattcaaatacaaggccaaacagagtctgaaaagggaggataccccattctgaggggaagagaggcctaacaaagggggatagcccattgtgttctaaagcccatttaactaaggaaaatgttttaagagaaagcaagtctagttctcctttaatggagaaggcccaatctagtgggagcctaaatcgtgtagtagactttagggcaattgtctcaacaagaagcccattttgaaaaggggagcccaaattgtgtagtagactctaggcccattgtctcaacaacaaacccattttgacaaggggagcccaagtgattcaatgggctaaaatcaaatcatgaaccaagctaaaactaatttttgaggagaagaaagcatggatccaaagtaggaaagggcctaagctatgagctatgccaacctttgttgtatttagaggttggtccatctgctttcaatcttccaaaggctcagggcattgacttttcctctctaatgtttcatcccttgatagtcacttgaaggccaatcccaagtatagttttaaaaggtgtgcttaaagcacacctaggcttaatgtgcaactactccctagttatagcgcctagcttgccaaggcatggggcttgttggataggtgcacttcttctactttacttctctgttttaaattcttttgttcatttttttataagtaaaggagtattgaaataaaaagtattcctttgttcatgaaatttctaattttatattgaaatttatataatctcattacttttttgttgaatgcttattttaaaattttgaaatcttacaacttttattgattggattaaattttgaatcatattttataaatttgatattcatcctaggtcatgtttcactttgcttagatacacgccttatgccttaagtgtgcattgcaccttttaaaactatggttccaagcaatcttagcctttgagcgagaagtttgcctccatctttcaatggtcccattgtggacaaaaaatgttttcctagaatccaaagggatttaatagagggagtaaggtccattgggaaggagagagggtatatcaacccattaaaagcaacaaggcctttaaaggatcaaggaatgatctcttttggctgggggtgagtgtggcctctaccaaaaaaaaaaacctgggtgacctttgcccacaagtctaaacacaacttgttagggttgaacttgtgcaaacattggttattgcttttaaatctttttagtgaaataaaagtagaataggcatggtattatctagaataactcaaaaaaaaaaaaaaaaaatttacgatgattggcaaaaagggatatcatataaaataatatatcttgatcatgtcatcaaagattattctcaaaagaactcttaagaaaatatttaactcaaacaattactcttttcatctaatatattgtatttgtcatataatcacttcattatacggtggatggtgttatgtggtggataggggggctttttagcaaaaaatcatcggcggaaatacaaggaagaggatggtgggtggaaatactgcaaagtgagaggtgggtatagggttggcctttggaaagccataaggaaggaatgagacattttgggaagtagagtggctttctctgtgggtaatgaaaggagggtgaaattttggttagacaagtggtgtggagacgaaccgctaaggtcttctttcccttctttatttgctttaactaattccaaagaggcttgggtggcggatgtctggagcccttcttttgataggggttgttgggctccttgcttctttaggaggcttaatgattgggaggtggatttggtcaaaagtttctcctgagattgcaaaggtggagggtgagtagtgatgaagaggatagattggtgtgggcaggggagaagagtgaaaattttctattaaaaagctctgtacaaagttttagagccaggaggtccttcgaatttcctaattgcagtcatttggaattcttgggtgccgcctaaggtaagcttttttgcatgggaggctacttgggataaagtcttaacattggatcatttaaagaggagagggtgatcagtggcaaacaaatattttctgtcataaagaggaagagttggctgatcacattctcatccattgtgacaagactcgggttacttggtatcttcatgttttctttgtttggtgtgtcttgggtgctgcccttttcaatgagagagttgctctcaagttggcatgggtcctttgtgggtaggaaaaggaaaaagttttggtggcttgctctttgtgtcggttttggacgatctagaaaaaaaggaaaaatagggcgttcgataataaagagttgtttgatcaaggaattaaacttgcttttctttgtaatctttggatgtggtccaaattgtttatggttttgggctcttcctttattgtagattttgtggattggttaggggctcgttgaagggtgttgttttttgttactcttttccttttttggtggcgttgtcagtgccctttgtatactccttatgtattttgggatgtttcttttttcaatacacattttctctttacctatcaaaaaaggaaaaaaaaaattaccttcttttataaatatggttaacattgatcctcaaattattttcctgaaatttttttgcagtctttaattgtattcctcattttccatggtatatcatacttttctagcaaacaatctacactaaagttggatttccttcaattgcaatacctctatttcttaaatattttctgggaacatttatcttcctaagccttagagctcaaagaaatataattggataatttgtattggttcaaataggagatgtttgtcttcccttgttataattaatgatgattcttatagttcctgttattaaattttgataggaggaatccttcttcttcttcttttgtgtgcccttttgttaagctcctattatccaattttgataggaggaatccttagcatacacagtgtatgctttagtgtgcccttttgttaggcgttgttaatgtatttgatctctacctatgaaaaaaaattattactacgactattatttgctttgatgagaaacaaccatttcatttcaattaatatggaaaaaaatcaagaaggaccagccatcctttggtaatgtacaatctgatcaagagaaggaaacctccaaaaagagacaaaacaagctgcaggactaagaagataggattaaaatccttcaattaaatctctctatccttccttggcaggaggtaaaaggggcattttctggccagcattgtttggaacccttgggtacctacaaagataggttttttgtttgggaaaccatttgggaaaaaattctgatgactgacctgctcaaaaagaggggatggaacatgccaaatagatgttatatgtgcaaatgggatgaagagcagctgatatagagaatcattctttgttcatgataggttttgttgattggttgtgctcattgtaaggagaggaaggttgttttttgttctctttccttttttgccttttgacacttgttatatacatcatgtgtaccatttgtgcctttttccaaggcctttttaatgcattcctttttattgcctatcaaaaagggcttagaagatcatgaaaattttgagatttttttttctttgtttgaaaaccatttcggtatgcgaaaatttccctgttttctctcaacctatagtctttaagaatggatattgcttttttccaaaatagaaaaaggaagagaagggagtgatggtttgtgtagggaagagggaaagtggggtggttggggaggtggatggttttctcaaatcaattacaacacttacctatgattgcttattgaataaaaaggtatttaaatttgggtctcaccttgcaagtcaaatatattattaatatgaaacctccattacctagaagtttagccattatgaactagaagtcaaagaaactacttaattttaggggtgcacttcaagctccaagtttaactggtcatctcttcatcttaattgtttatgaaggtaagttgcagatatatctgtgaaaatattcttctggttagaactcaatacatcttatgacagaggaacagggatatgtccaaaacattgactaatttacttcctagaagagctttaagtttattgtcttgcattcctttatcagtataaaacatcttttatcataagtttccaacccacattttccatcaggagggaggagacaatttcaaaaatttgcttcgtccaattcccatttatccacccagagaaaggtccttgccaatttctattgacctttagatgccttcaaaaaattaattctctagtcctaagcatattattccaggcctaggaacctcagcattggttttcaattgggagtagctggcagggatgttcctttgttgtgcattcaattattgaaccaataactctcataatttgtgtagtttatcaaaacaaagatgttgaactgttgactaaatggtaaaaaatttacagtgaaaagcatgttctggtgtaacttcaagttttagtacaaccaatattttttgtttcccatattttgggtttccacgaacttcacggcatcagccttacatgcctttcaggcatatggtgtaaagttgtgctaaggattattggacctataactttagaagaagaggtttgtgaccattgtgttctcctctctcagccatccatggctaatactgctacccttgaactttgtggatttggaccaaattttataatttttttttaggcaaaatatctacatcaattatatataggggggttaaacttgaatcagatcagccaacaagaagcggacactttggagcgtcccttcatggaggaggagatccattcggcccttatggacatgagggggaacaaggctccaggcccggatggcttcacggtggccttttggcaattctgctgggagtttgtgaaggaggaggtgttagagatgttcaaggaattccatgagcagaacgcctttctcaagagcctcaataacacgtttctggttcttattccaaaaagaggagggacggaggagctgggggatttcaggcctatcagtctcctaggcgggctgtataaactcttggccaaggtgttggccaataggattaaaaacgtgattggtagagtggtctcctcagatcagaatgcttttgtcatgggaagacagattttggatgcatctctaattgcaaatgaggtgatcgactcatggcaaaaaagaagagagaaaagcctgatctgcaaattagatattgaaaaggcgtatgacagtgttaattgacagttcttgatgagggttatgcaaaaaatggggtttggggctaagtggagggattggatatggagctgcatctcaactgctaaattcttagttttggtcaatggagagccagctgggtttttttctagctcaaaggggctacagcaaggtgacccgatatccccttatctgtttgtcatgggaatggaggtgctgagtgcccttattcgaagggctgtggaagggggctgcatatccgggtgcagaatttggagaggcagggggcaggctgttaacatttctcatctcctctttgcggatgacgcaatagttttctgtgaggctaggaaagataacatgacgtatttgagctggattctatgttggtttgaagccgtctcagggctgagaataaatctggctaaaagcgaaattattccagtaggggaggtggaagggatccttgagatggctgtggagttgggttgcaaggtagggcagctgccatcaacttacctggggctgcccttgggtgtgcctaataaagcctcttgtgtgtgggatggggtggaggaaaggatgaagtggaaattggccctttggaaacggcaatgcatctccaagggcggtagaatcaccctcataaagagcactttggctagcatgccgctttatcagttgtcccttttccgtatgcctaggacagtggtaagaaggctagaaaagttgcaaagagatttcttgtggggagggggaagtacggaaagaaaagcccacctagtcaattgggagagggtgtgtgtgggtaaagaggagggggggcttggtttgaggaagttagcccccttgaacaaagctttgcttggaaaatgggtgtggagatttgcttgggccaaggacgagatgtggaaacgagttcttgtggcaaaatatgggcaagaggaatttgggtggaggactaaaaaggcaaatggggcgtttggtgttggggtttggaaggagatcttgaaagaagctgattggtgctgggataatatgacttttaaggtgggaaaaggcaccggaattaggttttgggaggacccttggtgtggggatgtggagctgtctcggaggttccctcaactcttcactgcagctgcccaaaggaacgccacagtgggggatatgtgggaccagaattctggtcaaggagggtggaatctaaggttcattagaggcttcaatgattaggagctgaacatggtaggtgaattactccaaatcttaaggagtcaaaaaattacattggaggaagactcggcattgtggaagggaggaaaaaaggggaagtttggcgttaaggaagtgtatggtttgccgatcagccctagtgtacccacgtttcctaaaaagggcatttgggtggagaacgttccttctaagctagcgttctttgcgtgggaagctacttgggggagggttcttacccttgataggcttcaaaagagaggatggcagcttcctaattgttgttttttatgtggtagtgatgaggaaaatgtaaatcatcttcttattcattgtacagtggctagagtgttgtggaggattgttctgagtttgtttggtgcccagtgggtctttccagaatttgtaaaggaggtggttcttagctggaagggtttgtttgtgggtaaaaagagggagaaaatatggagatccattccgttatttattttttggacggtttggaaggagaggaatagattagctttcaagggggggaggagttagctattcagaaagttaagaattcttttgtttgtaatgtgtgggggtgggctaaattgtatagcggtgcggaacctcactcccttataggcttcttggagtggttagcctccagttaagggtcggtgggttttttgtttcttttgtcttttgttgagaggccttcgtcaccccgtatactccctgtatgctttgcggcgttttgccttttgctaatatatgtgtttatttatcgaaaaaaaaaatatttatgtttcccattgttctcaagtttgattatcatgataaaagatatgtttacaatagataaactatcatctttttcctacatttttgttataaatggattataaatttggtgaattatgagttgaaaatagtgaaatttgaagatatcttcttttgagagagtatttcatctcttgcttggatcaccagcaatgattgggagactgaaaaagagatcacctcttggctatacataattgcttctttaaaaaaagacaaggggaaaaaaacatgttaaattgtttcctctggcataccaatttgaagtaacttgttggttcccttctaagggccattatcttccatagttccatataaattcttttatatgtgataaattctctatgcagttgcagaaaattagattagaatattaatctatgtggatattgctcaggtttttattctgctggtgtttggttcttttttcccccttttttccttttcctgttcacttttggtggttgtgcagagtcatattgtgattctgttggtttagactgtgaggcatcaccttgtgtaatatatacatgatcccataaaagagttctagctggaaaaatgtctacaagaaccttattttttctgccttctagtcaactgaaactggaagatgctctcttcagatttgtttcataggccctgatttattaacatgtttcaatttctgtatgagaattaatgtcagcttgtgcttatggtttgggagaaatgttacatgaatatggccattggcaccaaaatcaggtcggaaaaggcaccaaaatcaggttttggaaggacccttggtgtggggaggtggagttggctcgtagattccctcaactcttcattgtggctgcccaaaggagtgccactgtgggagagttatgggaccacaattctgacctaggaagttggaacttaaggttttcgaggggcttcaatgattgggagctgaatatggtggttgaattgctacaaatcctaaggagtcaaagaatcaccttggaggaggacttggctctttggaagggggggggggggaatgggaagtttgaagttaaggaagcgtatgagctgctgatcagccgtagtaccctgctttttcctaaaaagggcatttgggtggagaacgttccttcaaagcttgcgttctttgcgtgggaagctacttgggggaggattctcacgcttgataggctacaaaagagagggtggcagcttcctaattgctgctatttatgtggcatggatgaggaaaacgtcaaccatctccttttacattgtacagtggctagagtgttatgggggatcgttcttggcttagttggagcccaatgggtcttcccagaaactgtaaaggaggtgattgtcagctggaagggctcttttgtgggaaaaaagagggagaaaatttggagatccataccgttatttattttttggacggtatggaaggagaggaatagactagcattcagggggggagttagctatacaaagagttaagaattcttttgtttgtaatttgtgggggtgggcaaagttgtatagtggtgcggagtctcgctcccttataggtttcctggagtggatagcctccagctaagggttggttggttttttgttgcttttttggtaagcttgtgaggcccctgtcgcctcgtatactccctgtatactttgcggcgttttgccttttgctaatatatgtgtttttgcttatcaaaaaaaaaaatatggccattggccaggaacctctttcttgtgcaatagacagtttcagcttgacaattaaatatgaagttgcaagttgtgcttattgtcaactctaacataaggttttaaagtggaaaaagtaaagaggaaataaaaaataatttatttatttttatgagaaacaacaatgtgatatattgaattaggaattaagaagtacaatagaaggatgaggaatcctcctactaacaaaagctaaacaaaaggaataccacaaaccataaaccgtaaggtaactcctcactaacccacacccttagaactacacattgctaaccaatcaagttgaaccacattaaggggaagacccttaaaatttatagtgaaagaggcttaaaaagaagtaaggaaatgaacggtatcccaaagaacctctaaagtctttgccttgtcctaaaaaatcataacagttctttcccatcacaaaacctaaattaaagcgatacaagcaatttgccacaatactatgcctctcctggagcttctcaatcctttatatgaaatagtcaccatatcacaaatactccttaggagagctcaatccatcttgatcaatctaaataatctgtaccatagccccaacgttagaggacaatgtaaaaagagatgatttaccaattctccatgctccatacgtaacttatagatattaggattgagggctttgtaaggtcttctcaactgtagtatgtcattagtgtttacctttttatgtgccactaaccaagcaaaggacttaaccttaaaagggacttgagatttccaaacaaaattaatagtgaaaaaaaggaattaaatcagaatggtgggacaagactaaaaagaagactttactgaaaataaacttgaagaagataaagactaagatctcgcatttggaacggacggggataagtgcaaatgagcaagagaggacataagtctttctagatcttttatttcaaaattagaaatgttactatggaagttaaaatttcaagagaaaggataagttgacccaagaattgatgaaataggaagctttttacctgtgactattctaaaaaatcttggaaattgagaacccaaagattgatccccccactacaagtctttcccaaaaatagattctcgcctattcttccaccacaaactgagcatacctagtaaaatcttgaaaaacctgtgcaatagcctttcatgagcaacaatgtgactacttgactatagtgttggcatctcatctatttgtatgtgtcccatgtatgcttagaataacctgatgccacaaagctgaactctccctaagaaacctccacagtcatttccctaataaagcatgattgcttagaggaatcttcccaaaccccgatccccctttcactttaggcttacacactaaatcccacatagtaagatggtctctcttagtctctatagcccctaaccaaagaaaatccatttgcaacttctcaatttttcccacgactgcagcaggaatcttgaataatggtaggagatagctaggaatatgggagagacatgaatggatgagcaataaatgagccctgcatattcagtggatttcagaatttccatttttatttcctggaattgttatgcctttcttcctgatcttattaaaggtggttcattccctaagcttgttatttgcggtactctctttataatctctggtgagagagagattttgatgcattgagtggattccaatatttcaaatttccaaaattcctctgcgattacttgaggttgttttgttgatgcctttttactatgaccaccaccattgctactaccataactacaatgattatgattctgttaagtattaccatcatcttccttggttccccccaaaaaaaacaaaaataaataaagtcttatcctccaggtgggagatgcagtagttttacactttgctttatttttcttttgtttttttcttccttgaataaatctcttttcattccggtcggtttttggattactcaaaggaaggtcctagatgttccttgcttgggtattttgtattataattttggtggttattttattctattttatttttaatttttggcttcatccttgttatactgatcgtaactggattttttttttcttttacaaaacataatattggaaatttttgaatcatgtttttatttttcgtttttattatttaattaatcatctattcatttatttgttttgcaaaatatgggatttggagatttttaggtcattccaaacagttgtgatcttcagtt

SEQ ID NO: 13652 - DNA, 14394 bp, Vitis vinifera
  Intron number 9 from transcript GSVIVT01022507001 (locus G SVIVG01022507001) derived from phytozome v7.0 (chr-ID chr8 ; pos 4140248 to 4154641)
aagacaggatctcgtgctcgaaagagtgctgcggggtgtgttctttcgtctttcatatcttgttgttatcattttctttgtagttatttgtgtctcatttgatttatataattgaatatgcctgaagtcgaatatcatccataatcaattcacaagtaatattcagtggcaaaatttgtaccaagatgatcaatatcctagttatctcatttatacttgtgtttaaccatggcagttggccatatctaaagatgtgctggaactgaagattagccaaccaaacctaatccatgacttgccctggtccagtacaacttcttgtaaagatcaccttttctccaagtacatctcctcatattgctttctggcaatgttagtgcagtaactttataaaaaggtttggtttttttgaaaaattttaagagatttcttgtgggcagggtcagatgaagcttggagtgactaccttcttggatgggattttgtctgtaggcatcccagggtggtttacatttagggggggttgctttaaggagtagagctgttgctgggaaatagttgtggcaattccttaatccttagtgagagtagtgcttatggcacacggtgattaagagtatttattgtttgcacagtagtgagtgggatgccaacatttttgtcaggaactcatattgatgcccttgaaaagctattgcccaaacttaccctaactttttttgctaagtttgctttcttgttggtgttgattcccatcttcttttctgaaaagatctgtgctgtttgttctctttctagggtgaacaaattcttattttcattcaggctttactcctatgtgcatgattccccatcctggaattttaattttctgaaaaatattttagatagagaaattgaagatctgtccgcccttttattatctttgaaatatgtcttctgttctttagatcttcatgaaaggtgttggttcttggggatcagcagttcattctcctttaagtgtcttttatccaagctctttctaaaagtgatcctctttcttcttttcctcaatgcaatttcatttagaaatctaaaactcctataaatatcagggcttttgcttaattagtggctagtagaatataagtactaaagatatgctatagcttaggagacctcataaagctattagcctagggcttgtgttttatgctttaggagtgggaaatccatggacgatcttttcctacattgctcccttaattttcttggataagggtgtgtattgttccttttcgtggaaacctagattagttagtcaagaagccaataggcaggttatgtgaggagcctcctctgtttatctatctgctatgggagagagagagagagagagggcgcgagagagagaggaggcgtgagggagagtgaaagcgcgtgcgacggcgacgacgaggagaccggtgaggcgagtcgaaagcgaagcttcacggttgaatccaagaccttcgagcttgctctggatggaaggaaaggaagacgtcagatcctcatcgtggagaagaagcggggggtctcgacatgggttcgattagggctggaaagcttagggcttttcaaggaggggctaatccattgtatacgagatgatgaagaagggagatgggaaaaggagtggagagaaagaggcaagcggttcactctggttcggggtttcaacagagcgggtggctttttaaggttgggggttgtggatctggaacggaaaagctttagcatcttcttaccaagaggtaggagggacaaaagaggatggacggctatggtggagatgatttgccaaatggaagagttggctggtagaagaatggagctgtaggaagtaagggccggcggaaaaacttctccagcgaagtcatatgcagaagcagttatgagctcaaatcagaaaagcgcaattgtaatcaagatgaaggtctcgagggaggagatggccggaaacttacagaagttgaaacactgtctcgtcgcgagctggaaatccaacaagaaggaagaagaagatttggagaggctgggaagtctttgtgcgagttcttggggtctaaaaggtaaactagggctggccaagctggaacgaggtagggcattgctggagtttgaagatataagagagactcaccatgtggcctcatcggggagcagggtgatgggaggagtccacttagggttggacctgtgaaacccaaagacgggttgttgggtagagaaggaaatggtacaggaagcatgggttaaagtttacggactgccaatttcactatggagcccggtgattttgaagaaaataggggaggaatgtgggggatttgttgaaattgacgaacggacaaggtcgatgggggagattcaatgggctaggatactggttaaaataagaggcgaatttagaccgagcacgctagaaattgaggtagaggaggaggtttacactttggcgctgtggtgggagattaggccggtggtgagacggagcttctctgcggcggaaaccagtaggagaactgagatcaggggtgattcgttctcacgcgcggagaagcgcgtggggaaggaagtgataggagcaggaatcgagggtctgcacttgccagatgatgggaggttgctgcagaaaaatgggtcgggcttagaacccgggaaccagatccatagcccaatgttcggggaccgggtctatgcggatggaaagatggctgggttgtcttcatatggcccaactatgaatcttaaagagcaggagaaggagggtgggctgggtaagatagatgggcctttgggccgaaagttaaaagataaagaggtggctagtgggccagaggcaggcccatcgtctagtaattgggttgctgatctgggctgccagtctttagttgagatggaaggcttggtaagggatggcccaaatgctacccaagagaatgctggtttcttgggccgttttatctccagaaaaagacccattccagaggatccattgaagtgctgggtgctagaggagattaaaagggaacagagggaggatggtttctccatgactgaccgcgcccttgaagatgaagctaagaggtatgtcctgcagtcccatcctaaaggaactcgggttatggggacatttctctcttccttttctatttctgatcgggctccagagggggagtctttcgatcgcccagggggaatagaggaggaattatggggggacaagtcaacttggttaacaatctatgaggggaatggtgagaatgagaatggatcttggaagttgggagaggccaacaagaaccgagacaaggctaggtgcaaggaggggaaggcgggtgcctcaggatctcaagacactggaaatgaaaaagaggaactatgggaggagtgtagcttagcaaaatttagccaatttctgggattctctacggaggggctagaaagggagattttgaattttctgactaaaatcagaaagaggaaggaaaagattcacagtaaagatctcttggagaagtctaaatttgaaagggaactaaagaggctggagtgctctgtcaattatgagggggggaataagcagaaagacctctcacagggcaaagggaatcaattgatagttgcccaatgaagttgaagattataagttggaatgtgaggggagctaatgacagctctaagaggaaaattataaagaactatataaggagtcagagggtggatcttttatgtatttaggaaaccaagattcaggagatgttggagggtattgtgagaagcttgggcacggggagatttatagattggagagccttaaatgcggagggggctgctggtggtattttgatatgctgggataagagggttttggatattttggattgggaggagggtcatttcactttgtcttgcagattcaagactatagaaaatggggctacttgggtttttacgggagtgtatggtccttttactaaagtggaaagggagggtatgtgggaggaatttggggcgataagaggcctttgggatgatctctggtgtcttggtggggatttcaatatcattctgttccaacaagaaaggagcagccaaagaagaatcagttcagccataaggagatttgcagagactgtggatgatctagagttggtggacctgcctcttcaggggggagagttcacttggaatgggaggcttaacaatcaggcgtgggcgagactagacagatttttagtttcccttagttggttagatctgtttagtggagtcactcagatcaggttgtctcggccaatttctgatcatttcccaatcgtgttagaggggggtggaattagaagaggcccaactccatttagattcaaacatatgtggctgaaggttgaggggtttcaagacatggtgagaacatggtggcaggagattgatatcaggggcagtgctagctacagattggcttttaaaatgaaggaaattaaaaagaagctgaaggtttggaacaaagaggtttttgggaggctggaaaccaacaaagctttagccttagaacaagtagacttttgggatcaggtggaaagtgagagaaatttgactatggaggaagctgatttaaaaaaggatgctaaagactcctttaagaaatgggtcttgttggaggaagcccattggaggtagcactcaagggagatttggttaagggagggggatagaaatacggggttcttccacagaatggcaagtgctcacagaagaaacaatgttatgggaagaattaaggttaatggggagtggctggtagaggagcaggaggtgagagaaggagttgtgaattcgttccagcagatgctttctgaagatatggtttggcaggcggatattggtaatattcaggtgggttgtatcagccagcaagaagcagagagtctagaaattccatttgcagagattgagattcatgcggcgttgatggagatgaatggggataaagcccttggcccggacggttttactgtagccttctggcaaaacacttgggatttttccaaagaggagatcatggagatgtttaaagaatttcatgagcataattcctttgttaggagtctcaaaaatacctttttggtgttgatacctaagaaaagcggggcggaggatttgggagactttagacctatcagtctgttggggggtctctataaacttttggctaaagtcttagctaataggctcaaaaaagtgattggtaaggtggtctctattgctcagaatgcctttgtaatgggaagacaaattctggatgcgtccttaattgctaatgaggtgatagattcgtggcagaagagaaaagaaaagggccttatttgcaaattggacatagaaaaagcttatgactgcatcaagtggaatttcttaatgaaggttcttcaaaaaatgggctttgggaccaagtgggtgggatggatgtggagctgtgtgtcttctgctaaattctctattcttgttaatggagtgccagctggttttttccctagtaatagagggcttcgtcaaggggatcctctatccccttatctatttgttatgggaatggagatcctggacgttcttatcaggagagcggtggaggggggatatcttacagggtgcaacattcggggtggtagtagatcctcattgaatatctcccacctattttttgctgatgatacaattgtgttttgtgaggcgaacaaagatcaagtttctcatctaagctggatcctcttttggtttgaagcggcttcgggtcttcgtataaatctagccaaaagcgaaatcattccagttggagaagtggaggagattcttgagatggcagttgagctagggtgcagggtggggtctttgccctcgcaatatttgggtctccctttaggggtccccaatagggcctcttctatgtgggatgggatggaagagaaggtccggaggagacttgcactttggaaaagacagtacatctctaaaggagggaggatcactcttataaaaagtaccttggctagtatgccaatttaccaaatgtctatcttccgtatgcccaagtccgttgccaaaagagtggagaaaacccaaagagatttcctgtgggggggtggaaatttggagggcaaagttcacctagttaattgggatgtggtctgtacagaaaaattcaatggagggctaggattgaggagaatagccactctgaatagagccttgctgggcaagtggatttggaggtttgcttgtgaaaaggataacctttggaaacaagtgatttctatgaaatatgggcaagaggaatatggttggagggcgaagaaggctagtggggcggctggagtaggggtctggaaggagattatgaaagaatctgaatggtgctgggaaaatttggcttttctagttgggaaggggtccaaaattaaattttggaaagatagttggtgcactgacactccgttgtcccaatgtttcaaccacctttttgtccttgccgtgcatagagacgccacgattgaggagatgtgggaccaacattcgggccaaggagtttggaatcttgtttttgtgagggacttcaatgattgggaaatggatatggttggtgatttgctccatactttgaggggtcataggccctccatggaggatgattcagttaaatggaggcaaggaagaaatggtatgttcagggttaaagaagcttacaggctgttggacaagcctaatgccacagtgttccccgcaaggagaatatgggtggatagggtgccaactaaagtctgtttttttgcttgggaggctacttgggggaaggtgctcactctggataggctccagaaaagaggggtgcaactcccaaattgttgttttttgtgtggttgtgaagaagagaatgtaaatcatattcttttacactgtatagtgactagagccctatgagatattatttttgggttgatagatattaagtgggtcctcccagaaactgtaaaggaggctttaatctcctggaggggttcatttgtagggaagaaaaggaaaaagatttggaaatccattccgttgtgtattttttggacggtctggaaggagaggaatatgttagcctttagggggggtgtggtgaatattcagagattaaagagttcttttgtttgtaatttatggaattgggccaaagtgtatttaggtgaggagtctttctcccttataggtttcttggagtggatagcttccacttgaggggaggtagttctttttggcctttttctctttttgaggttgtagccgtcttgtatactccctttatgctttgtggcgtttagccttttctaatgcatttcttgtttgcttataaaaaaaaaaaaaaaaaatgtgaggagcctcctctctagttgattttaataggctctcatcccccctaattttataaaccatcttcttagaggtgggataaaaataaaaaaatttaaaaaaggctccttttgcttagcttggcatgtaggattgggacatgtttgaatattttatattttgatttttttttttgtattttattctttttatcacaacttgaaacttcaatttatggaggaaccttatacattgagaaattgaggatccattagcaaaatgttttctctttcttacccgctagggtagcctagttggtcaggacgaacactggaaagtgtgatcccaataagtggcatatggtactgggttcgaatgttttctctttcttacccgttagggtagcctagttggttaggatgaaaatggaaagtgtggtcccaataagtggcacatggtactgggttcgaatcctgccactgatgataccctgaatttacccggtgctagttgttgcgggccggttagtaccccaaggtttgggtccctatggagagtcctaaggtcttggccatggaaggtttctcctcaattatcaaaaaaaaaaagttctctttctttccatctccaactaaaggtgtttgacttttgagtccagtggtcgcttttccttaaaattccacttttataccctattaaaagtggattctccttcttctatattcatctaggctagctgacatgaaaattatagaactcccccaaaatttctaaacttcactttgttggtgacaaataggatggttaatttaaatgacttgctttagtttaagaggctttataaaatgtattagcgctgtttcctattttatgtgcattggggaatggagatttgtaagccatcttatcctgcaagaccttttgcatcaaagttgtggaagagactgtttttatagtggtgatagcttaggtattgccaaaggtgttttttgaaatgttggtcatcttgttttagggtttggtagcagttccaaggggagggctttgtggggctactgtggctatcttgtgggttatttaaaatgagaaggatgtcaatatttttaggataggaggagatccttggttgatttgtggaagaatatgtgttttcacatgtcagtcactaaagagtttttgagttcccttcaatattatgagctggattgaagattgatttgcctctccaattggagagtgatgaagattcaggttaaataggctctttcacctgcacgtagttcgaaacttgattttgatgtatgctcattggttgggattctgaaggtagctggatttgtgctattatcgatgtagagatttttatattgcaagagtggtagaaaatgataagagagttgggtgactccaatctggaggagggggattcaggaacagttcgttggtggttaatagctgtcacaagatggcaaaaaaatccactctttataatttctgatcagtttgttccattttgtttcttgaaccatcatgtttggggagtgcttcctgtggtgtctcagattactctcccttttcctagctcctaaacctctcactttccaactgatgatcttcataaaaataaaaagcaacccaggatagagtaattcaatcagacctgctaagtataacagtttccgaaaactgaagtgaaaacaggatagtgcaagaataggtgatcccttttctcagagcttctattggaaatgaaactgctaattgggcatatgactttggtgggtttctgggatgaagaatattgataatttgcttcttttgttttctttctttctttctttcttttttttttttccctttgtgtgtgttgttttctttcctttatttatttatttatttttataggaaacacaaattttattgcattgaaatagtaagtgcaaagaaggatgaaaaatccttctaagaagtccaaaatcctctataaaatctaatgaaaaaggtgtgtaattgtataatagttcaaaaaggcaaatctatttgcacatatcaaaatgattagggtaacactagctgcaattcacagagatacacaatttcttataaaagaaaccaaatgtctagttgcacactttgctaatgtattcatcatatgtgttgagagagagagaaaggaaaaaaaacttatttctcattcatgtaatttctacttacaattgagagatatatatatagacctatattaacaaggaaagataatatactataaatacattatatttaacactccccctcaagctggaacatatacgtcatatgcaccaagcttgttacaaatatatttaatcctaggacctctgagagatttagtgaagatgtctgctagttgatcatttgaattgacaaaacttgtagcaacacatcctgatgcgatcttctctctaatgaaatgacagccaacttcaatatgcttggtcctttcatgaaagactggattggatgcaatatgtaatgcggcctggttatcacagatgagtttcatctgttcatcctttccaaatctcaactcttgaagaagatgtctcaaccatatgagttcacatgttgccaaagccatagctcgatactcggcttcagcgctagatctgaccactacatcttgtttcttactcttccaagatattagattacctccaataaaaacacagtaccctgaagtggaacgtttatctgtgggtgagccagcccaatctgcatctgtgtaaccaacaacttgagtatgacctctgttctcgtacaatacaccttggcctggtgtacttttgatatatcgaagaatacggatcacggcatcccaatggctatcacatggtgactgtaggaattgactaacaacactcacaggaaaagaaatgtctggacgagtaatggtgagatagttcaatttacctacgagccgtcgatatctcccggggtctcctaaaggctccccctgtcctagtacaagtttgacattcgggtccataggtgtgtctaccggtttacagtctaacataccggtttcttccaggatgtctaaagcatacttcctttgggaaaggaccacaccagaactggattgagctatctcaattcccaagaaatacttgagtttccccaagtctttggtctgaaagtgggtaaaaagatgttgctttagtttctgaataccatcctgatcactgcctgtaatgacgatgtcgtccacataaacaaccagataaatacattgccccaaggagttatgatgataaaaaactgaatggtctgctgtactgcgaagcatgccaaactcttgaacaacagaactaaaacggctaaaccatgctcgaagagattgtttcaagccatatagagaacggcgtaacctgcacactaaaccagactccccctgagcaacaaaaccaggaggttgctccatataaacttcctcggcaagatcaccatggaggaaggcatttttaatatccaactgataaagaggccaagaacacatagcagccatggagagaagcaagcggacagaagcaatcttggcaacaggggagaatgtgtcaccataatcagaaccataaacttgagtatagcctttagcaactaagcgggccttaaggcgatcaacctgaccatcaggaccaaccttaactgcatagacccaacgacaaccaactgtagatttaccagagggtaaaacaacaagatcccaagtgccattagagtgcagagcagtcatttcatccaccattgcctgtcgccagcctggatgggaaagagcttcatgggtgctctttggaagagaaacagaggatatagcagaaacaaaagcagaatagggtgaagataatcgatgataactcaaaaaattgtaaataggatgaggattacgagtagagcgagtacctttccgaacagtaatgggtaagtcattaggagaaggcagagccgaggcaggtgaagccgaagggataggaagtgagtcagcaggtgcctcaggaatagggagaggagcaacgacacgagggcgacgatgataaacctgaaggggtcgagagggcatagcatcaggtgggaatgcaaactgcaggagatgaatctgaggtgaggtgatagaggccttgagactcacgtcctatgccaatcgtcttccccgtactccggtcctgcaaggtcacaaatttatcagaaaagaccggaatgaaacacggtcaccggaaggtttcccggagttgatgacacgggaaataggaaagaattaggttttcttccttggctctgataccatgttgagagagagaaaggaaaaaaaacttatttctcattcatgtaatttctacttacaattgagagatatatatatacaaggctaggagtcctaactaccatacatgtgacctatattaacaaggaaagataatatactataaatacattatatttaacaatatgattgagtaattgaggagcccaagagaaggaacagtcctactctaaagagatataaataacttggtgcaaccactcatcaaacttgcacaacctccaatagcataatctccttctactaggatattggagaggctcaaagctttcaccaacaataaccctccaaagcagctagaatctctgcctcaatgactgaaccttggcttgcaggcttagagaatgctctcaccactatgccaaagtggtctctaagcaatgcttcaatctctagttggccaaagttgcctagaaaatgcccatcaaaatttagtctaacaaaacccattgaaggtgatagccacacaaatttttttttccttggtccatcttgtgattctacaaactttgtttcagtctaatagaatgaggttcacaggaatgcctgcacaagcttcattagtggaagtccacaaggaagaagagaagtaaaaccagtcccaaactccttctaaggaccatctatcttaaacagttcttgcattcctttctcgctaaatagtccaaattaaagtgaggctagcaatgtgccaaagagtcctacctcaaggatgtccctcaaaacttctcaaggatataatcaacatcttcttcacccttccagatggtattcaatcaatctccacaaatttgaacaaaatacaccataatgccaaggctgaggggcaatgtaaaaaacatgatctataggcgccccacttaccctgtccatgacaacaccatttcgggccaagagctttgtatagtcttcttggttgaagcaagtcattgctggggttttggatttcccaatgaaaatttcaggaataaaaagaaccaaattggtagacgcagagataacattaaagaaggagctgactggaagtggaatgaatttttctgtgttttttccagggtaaaaagataattaattttattcagacttaataaattgattcagaaatgaataattcattattttagatttgagaaaggtaaacatcatttgggataagagtgtagaggtattcactgtcattaatatctattagcaattaagattttaggggagtgagtcttgtgttttttgaacaatatcagctataggagagccttggtgtcttaatcatctcttacttcattgtgtcaagatgcgggtcttgtggaaccttctcttctccctttttggtgtatattggactcttttgtgtacggtgaaggcaacccttcttggatggaatggaaggtttgtggggaaaaggcgcaagagggcttggcaaatggcccctttatgtatattttggtcagtttggaaggagaaaaataggctagcgtttgggaatgaggatctctcgcttcaaaggttgaaaaattcttttgtatataatctttggtcttgggtcaggggttccttagtagagagtcattcttctcttgtaagttttgtagattggataggctcctagttagggaagatggtgtgtatactccctgtatactttgagggcaccgggttttggtgttttctccttttgtttaatcatctagaaattctcaaagacaagtgaagcaagatttgaggtgcttaatttattagcatttcaacatttcacttggaaatcatgcatgcttttaatagctaagtgacatgtcaacactgagctttatcctttaatgtatatgggagagggggtgatgtgattgatggaggcagcaccttgattttgtgtgagtttgaggggagtggcagagataattaaagtatacaggatgtagtctccacccagtgatctttcctatttgttaatacattttcacactgattaataattaaagttattatatttaattaattatttgctgagcaaaattgcttgtggaatggtggtggtccttacaactctcttgcattacacttgtttctttttaggtaatattttactggatttggcttaggttgggaatttctatatgatctcaatacttaaatcattgttagttattccttgtgaaggtcatttgtattattagaaaactatcaataagatctctgatctccacagggagtttaatgagagaaatgcattaagtatgagttggtccaaattgtatttttttgatgttattgttttctcttatggtatttaagtttgttgtctttacctttaatatgtatggctctccttactttgtttttcagttttccagttttccagttttccagtttatctcatattttgcttgcatcaaaatttttatgttttttgaattttttgggttactaagattttctatgtttggcaatgagctaataaaggctagccatggtagacatgttcaaggcatgaatattcactcgaatagaatttgctgtgatgtgctgttttacacatgttttgttaaatggtatataaatggggaactagttgttttaaccagattacacttttgaccttattaaataacatgcatatctcaggt

SEQ ID NO: 13653 - DNA, 2590 bp, Vitis vinifera
  Intron number 3 from transcript GSVIVT01011717001 (locus G SVIVG01011717001) derived from phytozome v7.0 (chr-ID chr1 ; pos 4828705 to 4831294)
tgtcggctctgtcatcgagtggagctacgttatcggtaagccaactcccactccacaccacctctatccactcaacattgtgtatatttttgcaaaaatgctctacatcatgaaataatatgctctttttataatatgtttttatttggacaagtgattcataaacgcatattcactgcatataatccgtatttttgtagcacagattccacatcctacatactttcatatatccttgtataaggtaaaatggtaacaatttatttaataataattttagaaagtgtttataaccttttaacatctaaaattttttttcattcaaatatttaaaagattataaatattttctaaaattactatcaaactcactctaattatttcatttgtatatcttataattactaagagaatcaataacaagacacaaaatagaaataataaaatatattatatttattactcataatttataaaaatattaattaaaatgaatttttattaccataccttgaattttatgcctttcatttattatatctgttttgtgtcttactatttatcctttcatttattatatctaattaaatgatatccattttgtgtcttactatttatcatttcatttattatatctaattcgtgtcttactatttttttttggtcattccatattctatcatcatttccctttgtagataccactttcattatacaataatttaagtttgaatataacatatttctctttgtattttactatatactcatttaatattaaaaataaataaattataactattttttaaaaaaaaaatttcttattgcatgattaaatctaaaataaacttggtatatattattagcctttacataattggctaaattaattgatagtttaacatgaattaaagatttacttaaaaagtattatatatagtcatagatgatttcaagttaatatttagttttaatagatatgggttgtagtcttgtagattgagaatttttttttcaccatttttgaacataattgaagtatcattcaaaacatattttttgaaaaataatttcatcattagctaaatatttttgcacactcaaaattaaggataaaagaaaggttttttttaaacatttaattgggtcggagatgattgcttccactgtaacacataatctcttaaattatgagtataaatgaaaataatttataaatattattttttaaactaaaagtaatagatagggtttgtttggtgattattttcgaaaataaatctgaaaaacagttatgaaaaaaatatatttaaaaattattatataatgttatgtaaaacaaaaatctctaaaatatttttaaatatattttaaaaatagtttttacatctaatgttttatttttaattattctacatgtttatataattatttttaaaataattcttagaaaacaaagaaaaataatagaaaatgattcaaagatattttcataaaatagaaaatagttttttttattatcaaatgtgttttcctattatttttgttttgaagaacaaaaaaactattattaaaaacaattatcaaataggcacctaattttttttaatggtttttaattcttaaataattatttaaaaatatataaaaataagaatgaagatgcaatttgaattatcaaaaatcgtaatgaaaatttggattgttagatgttgatataaataaacttaaaatataaaaatgggttcaactataaaataatgagatagaatacaaaacatgaattctaaagtttaaatgtaattattattttcattaatatgtttcttgatagatgtcaattgtttttaactttttacttttttgataagtctcaatttagaattgaaggctcgatttggcagcggaccggaatcttaattagactgcacccataagccaaaacaaaaatctctagtgacattattagacttggatttggcaagattttcctcaagatttgtccattaaaatttttgtcctttttttttctactacctttcaatatgatttgatggaaagctaactgattcgactggtattcaattataatatgtgacataagtcattaccaactacccattcagatggtctcttaatttaaatttcatgaatattaatgtaatagtttttcattcaaaggtcgcatccttcttttttacattcagttgtctttttaccaggaaagtcaatatgatatttcaaaagtagttagcagtagaaccacatgggcctgacacgtgtacacatgtacaccatgagtaactattcttcatattcaattgtccttaatcaaaaaataattttgcccacaatcataaagtattcataaataggttttaatcattaaatttggttgtttgggggtgggagtaatataatcaacgttgaattttataatttgatagtatctttaaaaattgacctacttgcgtaggactagcacttttcataatcacactaatttcaattgagtacaattcttctaattatattatttttatatgaaactaaagatagaaaaaatcatattgctaaggacattgtgaaa

SEQ ID NO: 13654 - DNA, 4691 bp, Vitis vinifera
  Intron number 1 from transcript GSVIVT01001961001 (locus G SVIVG01001961001) derived from phytozome v7.0 (chr-ID chr1 9; pos 16296434 to 16301124)
cctacccaaataatcgcagggtaatcttccttttccccttttgttgttaatttatttaaatagatagatgacttttggttttcgtatgctcgacaattactgtggactgtatgggcttaaataaagaggaattttgggatatgctgttttactgaatttgtattccatctggggctttaatctgtatattaatccactattgtgtgtttcattaagttgctgaattatgagttagtgttttgcatgaatgggattatttgaattgcatattcttcaattttcatttggcaattattttttattttgatttataatttagttcctgaactaacacttcatagattaattagtgtttgcctctctgtttgtggtttttaaccccatttgggtgcaatttattagttaatgtgatcttacttgattccctttttaataaatatctatgcttcacttttggaggcccatatacatgctattaggtgttgataacttatatgattatccttgcatccacaattgtgggggaagttaaagatggattagagtgtgaatagtgcgaagcacctgcattctaattgagagtgcaggaattggtatatgttactgttgtagacaacagggctttcccaattaattaatgtgattggaattgggtgcaataatcggcatgtgttcatgtgttcatgttgtagattaataatgttttcatatttcctttttcatttctatattttaatatttatggtgttctaatttttttttgttaataattaataagcaattggtgtggtatttatccatttttaatctaattattaattttgtcttgagtttatgaaatcatgccgatgaggttagcttgttttttcctcttatttcttcttaatgaaatttcttgcctggaaatagttgctaaagaagctatttatggttagatttgacataatatttattgtttgagttccatgaacatcgtgtacttttttgtggcatgggcacatgttctcatggatgagtttatttttcacatagttgttaactcgtaaaacgtatcttgtattgtgtttcataagttttttatatagtaaaaaataaatagaaaaaatatgtttatgtgtatatatctattgaaagtatgaaatatagagtaatatatagccaattttatgaaagagagtgggatctaaagagttaaactatatcatatcatataaaaacattgaatattagagttttgataagttgaaattaaaaaaatatgactttaataaatggatttgtcgcataatccacaaaataaactttttcaatttttagctatgatttttagtcccaaattatatttaggcatatgcactcattcaaagttccaactttatcatgttcttcatcattccttccccattgaaaaagaaataaaaaaatctaatatatttagtaaatttttattcactaattaccataatttttaatgtgaacaattttttttttttgataggcaaacacacagaaagaaatatattagaaaaggacaccttgaggctgacccaaaagcatacagaggcgccaaaaggcacaaacaaaaaagagtggatacaaaaaatcaccatccctcaactagcacctaaccaatcaaaaaaactaagtaaaggaagaggaccttcatttacaaccgacttagtccacaaacaaagattacatacgaaagaatttttcaacctatgaatcaaaagtttctcattatcaaaagcaatcctatttctttccttccaaaccgcccaaaaaagacacaaaggggccgccttccacacctttctacgcttcttgcccaagttaaagccacaccatccaagaagggtatctctaaccacaaaaaggaaggacccaagtaacgccaaaaagagcaaacaataactcccataaaactcttaccctggtgcaatgaataagaatatgatcaatagactcttcttcctcacagcaaaggaagcatctattagctagaatccggcccttttttttaagttgatccaaagttagcaccttacctcaagaggcttcccaagcaaaaaaacccactttggtaggaacacaaagactccaaataatgctattagggaactgatcaactcttcttgaatctacagcactataaagagatttaactgaaaaaatcccatctttagtctcattccacagcattctatcttccaaaagaggattaagcctccttccctgaattgacaaaaataatctctccacctcctccacctcccagtcattgaagggcctagagaacctaggggtccaaaccccttcctctcccaaaggatccctcaactccactaaccaagcctctttataagatgcaaatgtatacaaagaggaaaaagaattacagagagcgaagttcccataccaattatctttccaaaatttcacatttctaccattccccacagaaaaaacaactttgttttgcaaaagagagccttccttcactattcccttccaaaatcctactccgaatccctccctaacttctctagtatacaaacccccttcttcctccccaaacttcctactaatgacatgcctccaaaaagtctccctttcattcgcaaagcgccaattccacttacataaaagggccctattgagagtagaaagacgtttaactcccaaaccacccttccttttgtccaaacaaacggtatcccactttactagatgaggcttcctctccaaagctttccctccccacaaaaaatccctttaaattttttccaatcttaaactaaccactcttggcattcgtagtaaagacatcaagtatatgggtatacttgacaaagtgctacgaattagagtgattctccctcctttggagataaattgccttttccacatggcaagccttttccgaaatctctcttccaccccatcccaaacggccatggacttgtgatttgcccccaaagggagccccgagtaagaagttggcagccttcccactttacatccaacctcaagagccaaaacctccagattctctaaccgacaaaatttcactcttatccaaattgattctcaaacctgatatggcttcaaaccacatcaacaaccatcttaagtaagccatctgatcttgagaggcttcacaaaaaactaaagtatcgccagcaaacaacaaatgagagaccaaaggcccattcaaaccattcaaatgaaaattcatcaatattaattgtaaaaataaacttacttgacttctaatttaacatttgacaacaagaattaagtttttcatattagattattttacctatttctcctttttatgttcaatttttaatcctttataccttttagacaattaatataatagatagattcttttgaaaaaaaaaaaagatttttcttaataattatagaaaatagttgaagatgtatgtatcattgttatcatatatcatatcgtatatcgtaagatacactttaagataagatacaatgcgtttctgtagtggggaatgggcaaagggtaaagttttggaaagatatttggtgtgggatgaacctctttgtatttcttttccctccttatttgctttggctgttttcaaggatgcttgggttaaagatgtgtggaggtgcaatgagggtgggggaagttggaccctgcttttttctatactgtttaatgattgggaggtggacgaggtttgcagattttttgtggccttaaatgggaagagagttcagcaagcagtggatgatagggtgatttggagagagactaaatgtgggaagttttcaattaagtctctatacaaatcattagtatcaggtcctccagcctctttcccttcgttggctatttggaaagtctctgtgtagcctagagtgattttttttgggtgggaagcaacatgggggaaaacccttaccttgcatcaacttcaaaagagaggatgggctctagcgaacagatgttacctttgtcaaaggcacgaagaatcaatagatcacattctcctccactgtgaaaaggcaaggactctttgggcgttgctttactctatgttcagggtgcagtgggtactgccaaccactattaaggagacgcttttgaggtggaatgggtcttttgtgggaaaaaagaggaagggtgtttggagagcaagtcctttgtgtctcttttggacggtttggaaagcaaggaacaaagttgcttttgaggaagaagagctgtcaattcaaaggcttaagttttcttttgtatattttctttggttggagacgaaattgtctataaaagatggtccctcgaccttagttgattttattgattgggtgggaacttaagggtgtgggtagggctgcacctctagccttggctttcagctagggtgtgaggggtgtttttctttcttggactcttcaagccactgttttggtggttttttaatacaatccctttacttatcaaaaaaaaaaaaaaaaagataagatacaatgcatttcaatttctataaaaaaatataccatattgttgtatcatatcatgtatcatgagtttttaacaagcatgatttttcatactttattttgattttttactattttctgaaatttcatcttgtgttttggcagagaagaaataattataaccaaggaaggaggaggtt

SEQ ID NO: 13655 - DNA, 9547 bp, Vitis vinifera
  Intron number 1 from transcript GSVIVT01022684001 (locus G SVIVG01022684001) derived from phytozome v7.0 (chr-ID chr2 ; pos 14941110 to 14950656)
gacctgaaggtggagcataactactttttctttaggttcctttgatttgatttgcaatggttttacttagcgtgcaatttgcaaagagtgttccattattatccctttgtctgtgtagaaaccagataaaactaaaagaaaataagttcatgtttgaagctattttctgaaacagctttaagaaatgaattcacagaaaaacaaaataatattctgaaacaggctgtttttttctgttccatttttcttgtacagaaaccaaaaaaccatttttcttgatattaaccgaaaatacatccttacaatcaaaatttcttatacaattaaggaaaaaaaatgcccccaaacaattccttctgttttttaaactcttgttttttcttctttttctctttcttttctattctagacttctatattatagaactgttctgtggacatatagatcaatacatcctatcctttggaatcttatgccttccactattatggcttctaaataactcaatggagtttttgttctctcaggtctatgctaatgaaaatttaagatttaaaaaatcagagtttctttctttcctacctttataacaaccaaatgtgcatcattgttttgttttctttttcaggcgcacacacatagtatgttgtataatttagttttggctcactttattgtctttttacatctgtcataattaggaaacttacttgaaataataagagtgagataaattgtttgagcgtagttcatctaaatctcccttttcttataggtgtgaaaatgagtaaaaatttggactgtgtttagcttttaagaagaaaatattgctactatggtggttgtagtcttcaagaagatcaataccaacaacttgcttcgatcgaggccttataaatcacctagcccggaccaatgtgtttggtgtttggagagtagtgaatcaactgatcatctctttctttattgtctcattgcactaacactttgacataggttattccatattgtcatgattgattaggcacctcctagagttatggtagagatgttggcaatctcttttgagacttttgtagtcagtcagaggtaaagttcttgatgagttgctatcttacctttgatatggttttcatggcgaaccttggattgctatctaaatgatccaaataaatggcactaggcagagtgtttccagttagagaggaatgttaggatatttgaggatagatagagatccatggatgttatttgagattttggctcctttaggccttgctcaaagagatcacaaaggctttattggttaccctcttcaagaggctccattaatgggtgttctctttttgggcagtcatggaaaatgaagtataggaagtgtgattagaaatcatttagtaccagtagtaagcgaccttactctaaacttgttggagtgaatttagttattgaggcagagatactagcattactaaagggcttgctgccggctaaaagctttgtgcctattcaatctaatgataggatgttttgctattgtaatatcttgggtgtctaataggaagagagactagtggaagttcaacaaatggaaccacaaaattctaaatgttgctactgaggtggaatgctccttttctcaggttcctcatccagctaataaacttgcagtcttacagaccagttatctaatcaaggagctaagcacttagtcccctttttaggagacctttttgcctagagtgtattaagtttccaaggtgtgtgtacattgcctttttttcccttttgtctgggctgatgattttagttttttttggaacagtatacatgcttactttctgatcaacagttgtacatttggaaagattgcttgtccttcttgtctttatcattcaatgaatgaatatgtttgtttccgattaagaaaaggttgtagtcctcaaaatacatttaccctaatgttgttcaatgttcctttggcaatgctgaaggagacaaaacatcaaggacagacaatcttgcatctactggagatgatgcttcaccaaaatggtgacattaacaaagtcaaagaaacttctaaagtctagaagattcttctgaacaatgcccttggaggagcctggactcataggtaacagcatgacaaatttcgaatgagaaacgccaacatcttgtcttccatcttctgactgattgttccattgttttcttctcttgtaaaccctctcacaaattgagtgcattgtggaccaagtgaaatgagagaaaatgccaaaaaagtggctgttcattctttcttagagccaaaggggtcattgaattggctaatgtattgttaaatgttgtcatctccaccactagctattcaccaaggaccaagaaaaaggggcaagggaaagagggagccaccacttgaaagacaacatctcctccctttttgttttcatgtgggaagtccaacaggtgctatgcttaataattattgacgttgttcatcactatatcattacattagagcctcaattaattaattctatagttagagtcatttgataaagcaataggattcataatattttttatgctacttcactattctttgctgctatgcttttctaatatgtcattttatcttttgttttctattgaccaatttctagtattttaaaatattaaagttctgagtattgatgtcctgaagtttgcagaataaaagattcaagggtcaaggcttgaaattgaagtgagtaataatcttgtgacccagtcttaattgggttttattgtgtcattcttactactactgaacatttttcatttttctttttcttctctaatttcgtttcttttactgtgcatgctcattgctgtagtgctgatgataatgaagaagaaatagttactaatgttgaatgccattatactcaagctaaacttgatgggacaatattcaatcttggagattgtgcgcacataaaggtaaatccctagtcctctatgactacttgttaacattactttttgttcctctctctctacagtgtcattttatacatatcaagtatcaacctttttcaagtgttaagtagtttgaaatgctatgttttattaagactggttttgagccatttggcacttcttattaaacttcgtacattttaagtagtttcttaattatctattctactcttttacatatacttgcagtttatggagctacatgaaatgaatctatatttagtcatagtcagattcctcaccagaagacttggtagcgtaccccatgacatgattgctaaatcccaaggtgcctttgtgagggttaggtaggttttggagactatccttgtgagttgtggtcattaagtgtataataaacattgtggacctgttgaatgacatgtcataggagctgttgacatggagctgagtagattgaagtggaagtagtcaaataagttagtcatatggaagatttacctattccttaggaagtttgttggttgtttctattctttaggaattatctataggtagcaagtttgttgctatttttatatttttctgttttaagctagctgtataaataagtgctttgaagcttaataaaattataacttcagattcctcaacgttctattgcttccaaagagtttccacactctgtttctatcaaaacctacactctgtttctatcaaaaacctacaaatctggtatcagagcaaggttcttgagtaacttgtgaggtgagtgagcctaaaaaaacctacaaacaatatccaaaatgacctcagaagcttcactgaatgcactagcccctccagtgtttgatggaataaattatcaagtgtgggttgtccgtatggaagcctaccttgatgctagtgatctgtgggaagctgttagtgaggaatatgaagttcctcctctgtccgacaatccaactatggctcagataaaattacacaatgagaggaggcaaaggaaatcaaaggtaaaagctagtttatttgcagctgtctcatccacaattttcaccagaatcatgacactgaagacagcaaatgaaatatggaacttcttgaagaaggaatatgaaggaaatgaacgagtcaaaggtatgcaagtgctgaacttgattagagaatttgagatgcaaaggatgaaagaatcagaaacaatcaaggattactcagacagactttttagtattgttaacaaagtaagacttcttggtactgacttttctgattctagaatagttcagaaaatttttataacaattcctgaaaagtttgagactacaatatcatctctagaaaactcaaaagatgtgtcaagtatcaccttggcagagttgttgaatgcattacaggctcaagaacaaaggaggcttatgagacaagaaggatctatggagggtgcatttcaagccatatctcagtacaaaaaagagatgcaaagcaacaataacagcagcaataacactcaaaagtttccaccatgtccttactgtaaaaaatccaatcatccacaaaaaaggtgttggtggaggccggatgtaagatgtcacaagtgtggtcagctagggcatgtggaaaggatttgcaaatctcaacagcagcaaggagaagtcaaggctgctgtggaagaacttccagatgagcaactatttgtggtatcatgctttgccactagcagctccccagaaacttggcttatagacagtggttgtacaaaccatatgacttatgatcaagggctctttaaggaacttgacaaaactgttacttccaaagttagaattggaaatggagcatatcttgcagtaaaaggcaaaggaacagtggcaattgaaggccacacaggtttgaaattaatttctaatgtcttatatgtacctgagattaatcaaaatctattgagtgttggtcagctgctggaaaaaggctataaggtgctgtttgaggacaatcagtgcatgattgctgatgcacaaggcagaaaggtatttatagttcaaatgaaaggcaaaggctttgccttggatttgatgcaagaagagcaggctgcaattcacaaagaagaaagcaatacaatgctttggcataggcgtttgggccactttcatcatagtgcccttctctttatgaagaagaacgatcttggagaaggcttgcctgaattagaggtgaagcctcctacctgtgtagcatgtcagtacgggaaacaaacaagacttcctttcccacaaaacaaggcctggagagctactcagaagttgcagttagtacacactgatgtgggaggacctcagagaacaccatcactgaatggtagtaagttctatattgctttcattgatgatcacacaagaatgtgctggatttatttcatgaaatttaaatctgaggttgctgacatcttttggaagtttaaagcttgggctgaaaatcaaagtaaatgtaaaatgcaagtgatcaggtctgataatggaattgaatacacctcggagaaatttaacaaattttgtgaggatgcaggcattgagcaccagcttacaacaccttatacccctcaacagaatggagtcgttgagaggaaaaatagaacacttatggaaatgacaaggtgtttgctgcatgagaaagggctgccaaagaaattctgggctgaggctgcacatacatcagtctttctgctaaatagactgccaacaaaagctttgcaacaaaagactccatttgaagcatggtatggctataaaccaaggctgcaaaatttaaaaacatttggttgtctttgtttctcttatattccacatgttaagagagacaaattggataagaaagcagaagctgggatctttataggctatagctcaatatcaaaggcctatagaatctatcttccagaaaacaacaaagtcatagttagcagagatgtcaaattcttcgaatcagaaagttggagttgggagaatgataagaagcttgagtttcaggaggagaatgccaatattgatgatgaacctgtcaggggaaccagatcactctctgatatctatcagaggtgcaatattgctataatagagcctgcaaggtatgaagaagctgcagctgataaaaaatggatggatgcaatgaaggaggagcttaaaatgattgaaaaaaaccaaacttgggagctagtggacaaaccaagacacaaaagagcaattggagtcaagtgggtttatagaaccaaactcaattctgatggttctataaacaaacacaaggcaagactggttgtcaaaggatatgctcagatgtttggggtggatttctctgagacttttgccccagttgctagattggacactataagaatgttgctggctcttgctgctcaaaagggctggaatatacatcagatggatgtcaaatcagccttcttgaatggatacttggaggaagaaatttttgtggagcagcctgaaggttttattgttaaaggaatggaggagaaagtatatttgctgaaaaaggccttgtatggtttaaaacaggcaccaagggcatggtacagtaggattgattcacatttgttaggcttaggctttacaaaaagcctaagtgaatttactctatactttaggaaggtttgtgatgaaacacttgtggtatctttatacgttgatgatctacttgtgacaggaagcagtatgaagcaaattgataatttcaaaaaggaaatgaaggatgtttttgagatgactgatcttgggaggatgacattctttcttggcatggaggtacaacaaaagcaaaatgagatcttcatatgtcaacagaaatatgccaaggaaatcctgaaaaagttcaagatggaagagtgcaatccaagtgcaactccaatgaatcaaaatgagaagttttgcaaaaaagatggagctgcaaaagctgatgaaaggctttacaggaccattattgggtgcttgatgtacctaacggcaactagaccagatattatgaatgctgtaagtttgctctcaaggtacatgcattgtgctagtgaaattcactttcaagcagcaaaaagaattgttagatatgtcaagggtacaattgactatggtttgaggttttgtcaagttaaaaactttactctccatggttattcagatagtgattgggcaggttgtgttgatgacatgagaagtacttcaggttattgtttcagctttggttctgctattttttcatggtgttccaaaaagcaagaagtcatagctcaatctacagcagaagcagaatatgtagctgctgccactgctgtgaatcaggctctctggattaggaaattaatggctgacttgtttatggagcaaaaggaaagcacacaaatactcgtagacaaccaagctgcaatttcaattgcaaataatccggtgttccatggaaaaacaaaacatttcaagctgaaactctatttcctaagagaggtacagaaggagggagacattcagttggtctactgcaaaacagaaagttagaatgctgatatcttaaccaaaccacttcccaaagctagatatgagttcttaaggcaaaggcttggagtttgcagctccaaagacaaggaggagtgttgaatgacatgtcataggagtggttgacatggagctgagtagattgaagtggaagtagtcaaataagttagtcatgtggaagatttacctattccttaggaagtttgttggttgtttctattctttaggaattatctataggtagcaagtttgttgctatttttatatttttctgttttaagctagctgtataaataagtgctttgaagcttaataaaattataacttcagattcctcaacgttctattgcttccaaagagtttccacactctgtttctatcaaaacctacactctgtttctatcaaaaacctacaggacccaaatcctacaatcttttatgaaaattggttgttaacattgtattagagcctcatttgtaaggaggtcatgtgttcaaaccccactaccatatatatttatatccccattttattaagttagcctaaaaggaagctgattgtggttgtttgccaatgggcttgtgtgttttttcgcgtgtgggaatgaggctacaagtgagggagggtgttagagtgcattatatacattgtgggcccaaatcctacaagtttaagcttttaggaaaattggttgttcaacaagatgtttaagagtagaggaggaataatggagatggactgtgcttataggagattctgaaaattgaaagaaaaattggatctgggtggagaaattggatcgtgcttagcagcatagcagttgttggaaaggtactcaatatgcagttttgaggatgaaaatatttttgtgctattccaagctaatggagaatgaagtcaaagcaatgagtgagaacttccatctgttgtctaaagttagtcaacatggttacaatctgcgtcttgttagcagccatgttctcatctgtggcctgctagatatgatgtggttgattcctcctaaacattgcaagtttttaacatgatggaccatggaaatatgatatacattgtggaacccagtcctaatagcttaagctttatggaaaattggtaacttcttcccttgtctatttttgtctcttattatcttctatcacaaatttatgatttgtttgtgtgttgctactgtggtctatgtcttgcattaatggacatggggctgcatgagtcctaataagcttttaggaaaattgataactcagtagtggatcaatgtctataattgaacaacacaatggtctgataacaactgaagcaaactaaaatgggatcaaactaaaaggagcaataccaatgaatccctgggatgcaaagttatttgaagagacttcaacacaaatagaagcgaataaccactcaagaagtctctgctaattatttataaataatagctagtaatgaaaattccctcttaatataacttgagttccacttacattctcctactatagaaccttaatcacataatcgaaatataactgtactaaaaataattcaattagacttctaaaagctagtagaactccagagcaataagcataatctagaatagatagtcaaagatgacttgtcaatggacttgctgatgtggcacttggacctgctcttcaatagcctctacatcatgttccctaactaaaaaatggttgcatcgtctgttatctagtttaggctagatagaattcctatcacatagcttgattgagatggatgatttttcttatgctttaacgatgtgcttgtgtttaaaagattcagtgtgctacttgttcatctgctgttatttttgtcctcaataatgtggtttcaggcttgctcctaattttgggactgctggtgtttcctgtttcttttcaaagccttttcttgagttgatgctcaggcttctgtatcccagatgaaaaatgttttgagtttataaagaggaaggaaaacccaaaa

SEQ ID NO: 13656 - DNA, 6075 bp, Vitis vinifera
  Intron number 5 from transcript GSVIVT01016163001 (locus G SVIVG01016163001) derived from phytozome v7.0 (chr-ID chr1 3; pos 7273487 to 7279561)
gcgcaggtttgtgaagctttctattgaactttatttgaacaaaatctagtaggaaacctgctaaaaattctgttctgtagcttgtgcatacttattttctatccgggttctgtcattatcttttaaaaatttggattcatgtgcgagtcccacattgccttatgataagataattattctggagtattaaagaataaatgatttttttaggggaaccttcctttttagatggggatatctgcaaaattttaaatatttacttttgatattttgcctagtaatataagaataatggtaaactataggagcttcaattcatatcgaattgactattcttctctgtttctgtttttcccctttctcctctggccttgttcttcccctaaggttccttgctttcatctgatactgttcggttggagtagtctggttaaagttgaaggaactcagtgactagtgcaaatccaaaaagtatttgggccaatgatgcaagaataaagatgaaaggcctttgatttagagatgatatggtctaggatatgcaacctgaccactaacagtttgaataaggctgtatcgtgcattttaatctggattattcagtaagcaacccattatactaagaccaagaattagctcatctgcagtactgaatcattgtgctgataaagtttgttttgagtccattaggatattgttagtaaatctgtttgcatctagtgcagcatattatggaagactttttggatgggtatgatgaacactaaatgaagaagatcaaataccttgttcgttaaagtctttctgctttaagtaaagccttgcttggctagtggttttggagatgcaactgagacagataacttatggaggttggtcatttggggtaagttcagggagttggatgagggtgcagcacaaagaaagcaagggagggcagggaggattttgggtgaagaaccttggttttggttaggaataggcttagaaccgagttttgggtggatagatgggtggggagggttctttgaaagaggcttttccttctctttataaccttgttgacgcctaaaatgcaagaggggcaaatttatgggcagtgaggggaaggctaaggtcatttggatccttgttttatgaggttctttcaagattgtgaattagatggtttgggtaatttatgaggtgtgttcaatccatgaagctccgagaagagggggcaggtatattagtttcgaggggcataaaggagggtttgtttctaggttccttgactagagggcaagctctattgcctctcatgcaaaggaggtttggggatgaactgcacctcaaagagccttttttttaattgtttttcgtgtttttgtgtgtgtgtatactgtctttctttcaaaggagatttggggattgattgctcctataagagcttggtttattttgttctatttttttttttgcgtgtgtcaattgtcttcgcgaaagaggtttggggatcaattgcttctctaagagcttaggtttttgtttttgtctgtcaatggtccttacagaggaggcttggagatcaattgctcctttcagagcttgtatatctatctatctatatatatatatatatatatatatatattgcttgtgtgtgtttgtttttgggctttagtagattcatcttggggcagccaaattgtatttgtgagttggcatgagagtttcaatgagtggcagaggaggttgtggaggttgatgactttttgcttgttttgttgcttatggaaagagtggaatgacaaaggttttaatcaagagctgtactattagagatcaaaggagatgtttttgaattcacttatggaatgggctagagccctcttagggttggactgtagctctcttgtagattttgctgatagcttcggttggggtctgtcatccctgtattatgcaaggatgaaaatatcggtaatcatgaatatatcggtactttgattttacggatatattagaaatatcagagaaatatcggtggagcgaaaattattcaaaatttataggaatgattggaaaaactccaaaaaatgataaaataagtaggaatacacattttaaagttattttgtaagtgtaattgacatagatatgatcaagaagaaaaacatcggtagacagagatatatctataaattcgatacttggattttaagaataataaatatgaattttggaagtgtataaagttagaattgagttaagaaatatttgattttattgaataaaaacaatttatacataaatataatacatatgacattgcaatagtccttagtaccaaaatgaagatcaatgtggttccatcatattgttagatgaagggagcccatcttgttgaagacaatatttattttaaaatatttattacattttaaatgaaaaattaaattattatttgagatttaatttctaaaattttattaaaaatatgtggtaacaactttttctattaacattaatttattgaaataattaaaattattaataatttatcttatcaaattaattttaatttataaaatattagaactttctttaattttttatattatagcaatttttttgggtaaaattatatttttgatatattaaaataaaaacatttaaaattaaataaaattgaaaggataaatataaaaaaaatttaagagtgaagtgataataatttttaaaaataggattaatgagataaatatgaaaagtgttagaaataaaaggataatataaaataaaatgataatataaaaacatgggtgaaatctaggccattggatcgtcaaaaattcaaatttgaccgtcggatgaattttcaaatttaaaaaaaaaagcccgaaaaattgctgatatatcgccgattttttccatttctccccactgctgcgtgcgtcactttacggccgatttaatcaccaatttatctgttccaaaccgatatattgtcgatatttcgatgctattttcttgaaattcctcccgttcaataattggtactcaaaatcggggccatctgatatccgatatatcaacgaaatatcgccgataaaatccgaaatttcaatccttggtattatgtgtgtatatatatatatattcttttcttgttttctcttgttgcttgtgtatacctctttatacatcagttgcatcctcgtttttgctagatgctttttgatatatttctttcttgcatattaaaaaaaaagaaaaagaaacagattggttgtgcagccaatgggaagttctaacaactaagaacaagagtgaaggatacacaatccatattcaaaagactggcatgcctgaagtaaaaatggccagaattatggttaggagaacagttactcagtggctggtgtggtattggatggttcatgttcaaattgaaattctaaacagcctagaatattattacttttttctgttgtgagtgtggcattattcctcactagtggatggatggtcattgggctgcagagttcacttgtttaatttgagaatgggaaggcatgtggcaacactaatatttactttcttctatggattcttttgttggctttgtttggggttttgtctttattcccacactctgataaaggatcttctgttgggttggaataggagggggattggctagagataaaggaaagtgtggttgatggcaaccctatgcttattttagtgcatttggagagagcagagtggagttctcaacaaggaggagcttctagaattcccttgggcttgctaattgttcttgaatttcatggctgggcttgggctcagcctctatggttccttgtactttctggttctgtgtgtatatttccggtgtacatgaggtttgctacctttttaggccccttttagtctcttccatccgcgaatagaaaaatattgactctctgataaatgaagcagaagttattatgggaaagagggtagggtcaagggaggatttgcaacccttcttgagatgccttgaattaatcctaaaagaggggaggggcatatatgcttaaacactcatccaaaatattatatactttttgataggtaaagaaaaattatactatagagtgcctaacaaaagtcagggtgtcatccatggacacgaaaaatatagagtgccataggcaacaaagctactaccacttcttaatccctacctaaaaaaccaataaaatcaataagcataaacaaagtttgactttaccatctcctccaactcaaaatatcttctgttaaatgctttctaaatggaccacatgaggtaaagaggcacgatcctttgcaacctttttctgtaacccttcaaagaacatccacgccaactgaacaaaagctgccccttaattgagtgaggaaagacccataacaaccaaacagagagggatgcgtgttaacaaaatgctcaagtaaaatactagcaatatgtattctgcagattaatataatcctgaatttgaagtaatctattctggaatgaccatgcatcatgcgtttggtaatgtggtatattaatataactcatttatgagattacatgctgaaacaaagggacagacacaggactcatttttcaactgttcttacatcttaaaacagaaaaatgtatacccatctatagtgagtcaagaggcatctagttattgtgggactaaaaccttaacctacttctatttttagcatatgaataatagatgttcttatagatgctgcatatgaatattaaagtttttggatccaagtaggatatggtacttgacaggttcagtgcaattcacttgttggtagtattagctttccgaagttgactgagctgccaagcatcaagtagagttaaatttctgacttgctttccttatttgctaccccagatttctatattgttgaccaacattgggataagctttgctaccccagatttctattttgttaacagaaattggggatgagctttctttgaaattggaaatggttatgccagtgctacaagcattaaagcaacacaagttttgttgcaaatttgagattgacaaataaaattctcttgtcaaatgcttatgagacttcagtgcatggagagtcataggaaatgactactgaagctttaagtgtaaatagtttgaaagaaagcacctgatagatttatggggatttgtctcgatcacgatgctgggtattggcaccaggctttagtgtttattcttggtagttatattgattggttgaggatcataaggcatttggaatttattctattgacatttctttttctctctctactgagttattgatggttaagcttgcttccaccatttgatggagcatgcccttgaggaaccaagagatgagtacccaataaatatttcaaggaagtggcaactttgaacttgatggttgaagttttcctcaactcaaacagcagtggttttgcttagtggttctcaagtttttttcctcctaacacaccacatgaattttaaggttgcagatttttaatactggccatgctgttcccacttctctaatcaacccacgatatgtcttgaatttggtagtttcatgtttacttgtttacagtatctataagtagattaagaaaggctttaaaagtttgtttcgattaggaatttgattaaggtattggtatgcaagtttccagaatttctagaacagaaagtttccgttgctctttggccttcttattaataattgtttttcctttagcggggttgctttctctcgtgattttgtgagctcctctccctctcacatcacatccacatatacacagcctcctagttgctttttggaattgggcgatctctttcaatcgattcttttatcatattgtgatattaaacatcactgaatggacccattcaagaacaattagatgatgacaaaattatcaaagatcgaaattccttatttctatttacaatacatgaatagttccttgatattcactttcatggttgtgcagctggtaaaggactatcaatcttgggcttcagggga

SEQ ID NO: 13657 - DNA, 505 bp, Vitis vinifera
  Intron number 8 from transcript GSVIVT01027142001 (locus G SVIVG01027142001) derived from phytozome v7.0 (chr-ID chr1 5; pos 17486657 to 17487161)
cttttcttgctccaagcgtttacggccaaccacaagtaagtatatatatatatggttatttgattaaatgggtcattgaaaactcaaatatgaaaatatgacctttgtggtttgaaagtatgaaccataatcgagaaattatatttgtattcatcaattttttctttacatttatcatatttacacattcactttaaaatactaacagtattaatacatcacctacaaatttccaatatcctaaaaacacccttcccattcttctcttttatacctatcttttttttttctcttaactttttttcttctcaataataaattttaagagaaactatcttttagggcttattcttcatgtaaattttgattaaaaaaatgttttgtaaaaatagttgaaaaaaatagaaatcattttataaataattagaagtgagaaatcatgaaaaaatgcaaacgaaatgatattataactgactttttattctgtgttttgtcgtagggattg

SEQ ID NO: 13658 - DNA, 1791 bp, Vitis vinifera
  Intron number 1 from transcript GSVIVT01032640001 (locus G SVIVG01032640001) derived from phytozome v7.0 (chr-ID chr1 3; pos 1934331 to 1936121)
tggtcgtgttgccgccgtcccgcttctcatcggcagtatgtctggttttaagtgtcgtaatttgttttttttttttttttttttgttttggtgttttttttttctctctcatttttttggggtatttggcgtgtttgttttttgtgaaaacgatggtaaatggaaagggatttggaattttcttttctttttgacgtaaattaacccaaacggttatctggctgcaatgcgatgagtgtctggtggattatttcatatttcatttttatctcctaattttttttttattatgtttgaatttcagtgatttatttatttttctttgtgtgaatttgatgaatacgaatctgaaatttatggtttcacagcaagcttttttagtgacttttgatatgttagttttgttggatattagttagacatgatgtgatttccatgtgcacaagcttagataaagttggatattggttaggcatgatgtgatttccatctgtacaagtttagctttctcttatgttgtttctgaacttcgggattatgttttttgtgcgtggctgttgttgatttggagttttgatggatgtttggctgggcagctaattgaataatatattgcctttttattctgtgtatttgtgtattcagatttttgtttgttaattttgtgcatttgaggtttagatgagtctcttgtttaataatgagttgaattattagctgatgcttaaaaaatgattttttcaaggcttctttcctgtaaaaatttctcagatttctgaccaaatgtttaagatgtggaattgtgttcttacttatgtgaaattatgcaactatgccttagtgagtgggaaacattgatactgttggctgcatggaaaatgtagtatttttagattaattcccaatttttcagtgcttgatactagcattcattaatgttatattgtccaagcatgattgttatggcaaaaaggccaaacccaaaaagggacatattgctgttctttgcatgtatgaatacaatgttctttttgtgggagctattatgacaaggcaagggtgttgtgggagctattattctctctctttagagttttttgggtgatgcagtccacagttagaaagactctgctaggctaacatgggtcttttgttggaagaaagcgaaaaaaggtttggagggcagctcctttatacctcttctggactatttggaaagagagaaatagaagatcgtttgagaatgtggaattctcaatccaaaggctgaaatacttgtttttgtgtaacttgttaacttggacgaaactgtttgtaggtgaaagattgatgttcatagtagatttcattgattggttgaggttggtttgagggagggagtatctttttgttttctcttccttttttttggcgctttttgattgccactatatacatcgtgtgtactttggtgcaccctttttggcctttttaatgcaaatcaaatttactgataaaaagaaaaatgaataaaatgttctttttgtataattccttggtcaatggctctggtaattttatcgtagaaaaaaggtcaaattttatatgtcctcttttagtatctgttgatagcctcttgtttacaaatcactttaagttatatgtctgcaaggatagatttctgtacaagtcacagcagagagggagtgcattgggtcattaaatacctgtttgtacagttagtcatacattataatggctattgtatgaagactgtgaaactaatttattcatttttctatctagcctttt

SEQ ID NO: 13659 - DNA, 15833 bp, Vitis vinifera
  Intron number 1 from transcript GSVIVT01028344001 (locus G SVIVG01028344001) derived from phytozome v7.0 (chr-ID chr7 ; pos 6363516 to 6379348 reverse strand)
aaattaaaagttattttaaatcaattatttatatattaaagaataatatcccttttttctatttttttaatgaacattttaatgtaaaatacaatcacgtcaaggtctcatcatttgacaagagtacaggtattttcccttaagggatcaatttaaaataaggctttaaaattggccaacctttggaaatatgcccaaaaataaagtagctttaccttaaataaacttgatacaaactatgagttctcacatttatctagataaaagcctctcttctgccagatattaaacaggcacagtgttatttaggcaatgtacagcgagtaataaatatatcgaaccattgtgtcaagaataattatgagtataaacgtcttactacaagcttaaaagtcattattcacaagatcaattattggcatttaaagtattaaagaagtgcatgaaacattacaatttcttcagaataaaatgccaccagacatcaaattcaagtatgaaaagctccttaaaaaaattattatctgtctcttccaaaaattaacttaaacttcggaggggtatatccaaaaaaaccatccggacacaccctgttgcagatacactcatcatttacttgcaggacactagccaaaaaaatatgttattagtcatgtaccagcacaaactatctcataattactattaaacattttgtaaagaactatatattggaagaataatagctataaggaacattttgttagctttatgtataatggactagttagacatttaccattaacacatgttttgaattttgcaattctagcaagtagaattagtaattttagattttattaaatgtgttccaaaaagaaaataactaaatcacttaacataggcaagtcaaccatgtcatattgtacacatttcatgttctaaaagatttatgacattccctctcctcttcatcactcatggtgaagaacactttcaacacgttatgtttagttgctaatatgttagtgtctttaggaaagttggattcttttgagatcgtcaatttttatcaatttttcttaaatcaccctcaagtcaagcttgtagtttagctacctcttgatcatttaagagcacgttaatcaatccatcaattttaggcaccattaatgttacagtagttgtcaaacttctaatattttagttcattgcttccatgtttttatcttttattttatgaccatgatttagaacatttggttgttgggtgaacgattcaatgaagtcttgcatcccatgtcttggctttctatgttcatttcctcatccatgcttgcatccttctttcttatctcatcatcaagagcattaccaacattgacaccaatgacacaaatcttttccacttgtttcactctatgcatagtagtatggaaatagtttgttatataaactactcgagtcttcatgcatctacaagttcatggagataaaacatatgaaaaactaaaaagttaagtctacaaaacataaaataatagaaaatgttatcataaaatgaccttcactcattcttcaaatacagtttttcacacatgtacatcatttggtcttcatcccaaccaaatccaatttgagatcatgtcttagcataatatttagctttcaatgttttcatccttgattctatatgtgaggaccacatatgggcattttttatttcatcataacctttatttagataggtatccatttttaaatttagtgttggcatgccacctagagtttcgatataactcttataatgattcaactaaggcaacatcctccttggatgtccaataatgtttgtttatctaatttcttatcaacactacgtctttaagcacttgatcatcgtgagttgagccctcacatcaaggtaacacagatgaatattatgtcatgagagtaaacaccttattcatggataacaatttcatttttccttatttggtatttgggtttatccaaacacatgaacattaaatacatgttctatataaagcacctaattaaataattctatataataaagttggaaaacattaatatataaatttaatcattgaattattcataaaataattatatctattaaattttacataccttgactagtttctatcttgattccattgagttttcaagaattagtcaagtttttatcaaaatcttgttggcatcgaaccactattttcaaaagcttatgaaaatatttagtgataattcgtctaaacctcttaaaattgaagtttgtaacacaattctaaatattgtatgctaaaatatgtatgaacattgcaactacctcctctatggagatattatgtgtccctcgtattttttagtaatgagaatgtgacacaatttttaaaatgtaaatccatccattcttaattgtgtcactcacattatattattctcataaaccaaactatataggtattcaaattgttgaaaaaatcacatactaatgatccattttttttctacaaatgcatgcatatgaaaagcatataccatataaaagtgagtattgtttgatggatgatcaataacaatttcaataccacaactattttgttttcttttttgtcaaacccctcattttgaaatccaaaaggcatattcaagttcccaatttgttattataaaaattatttgatgaggagaaaaataaatacatattataaattgggaaaagtgtttctttgttctattcatcaaatcctatatatattataaatataatttgatggggagaaatatcaatatcataaagatcaatattaaattcataataaaatatttaaaattaatttgaaaatttgaaacaataatagcctttttcagtaaagaaactatgttctgtttttgttatatttaaattttattaaatattttatttcaaattgtatgcataaattaaaataacataaattttctaaattttatttaaatctttcgggtttttgagatgtattttataaaatatttaggacaaatgttaaataggaaacgttattatttttaaaatttataaaattgaaaataattttattcgaataataattttataatttgaatagaatttaaagctaaattttatagtttattatttacattttaaatcatggattgtcaatatctagtatgcaattttaggggtcacagagactaccaacacaaagaaaagaaatattaagttcagaaaaaataaaccacagaaggtagaaataaacaaaagaaagtcttcttttggttgtagaaaatgatagaatgaaagaataaacaataaaaaaggaaaaacaaaaatgaggaagattctctttcttactttcaaagctaacttaatagaagaaaaggttgtagaatttttagaaaagagattttcacatgttgaattttatttttgaatgtcaaaaactttttaaagggagaaaatgactagataagaggctagacacgatcggaaaaggaagaacacaatctaaaagagaattttaattttttgctataaatgtaaattttcatttgtttataactaacaaaacttgagacattaaatgaaaagaggttagaagcacaatcatgaatagaatgttacgaagtttgttgccctaaacctttcaataaaagggttcaaattcgttaattccaagtattggctattcaaaggccaattgtcaccattcacaaaattaggtcaaagttcactccaaaatggggtgattcatatcttgtacaataactctacgctaatggagcatactaaattattgtagaagatggttctagaatttgggcaatcaatgaaaattttttgaagcattgttatgcttgaagattcatttttactcctttttgcattacactaaactacaaattggtcctaacccgtatgatcttaaactatgtacgtgtggaccccgcatttcggctcatgcgcttcccactcgatggcgagctcgatttttattttgagaaatagattttatttgattaaggaaaatgacttggagtcgccacttatttttgttttatttttaaaagggtaaacaaaataagaaagaaaaaccctaagcgtgactccttgttttggaaaaggtggtctgtgaaaaaccggatcgggttcgggggtcaggttacttatcgagaaggtacggtagagaccgtagcatccctttaagtccctaaagtcgggtctctactaataaagtgaaactgacgtggcaatcgaataagaaagtcaatggatactcacatcaatcatgcatatatgagaatcagaatatgtatagtgaatgatcagaatgagtgaacgcgtacctgggcagcaaacagcaacgcgctatcaagaaacgggattagtgcacaattaatgaatacaaaatatggctcatgcatatcggagtgcaaaacgaagctcaaacaaaataccttaagcacgataattgccagtcaaaaggagtcaaacatagggcccccaacaaagcccgatttattgttcatgagctaatctcacaaatcccctgttttagaattgtgaagaaattattattgcttatgtaaactcaagaagatcagaagattattaaggaactgaaatgtgattaaaaactattcgagtgaaaactggattattggagcttatttgaaaattggagcattcggaattaaattttgaagattagagctccggtaattgaaatttgttaaagaaaatgtgaaacggactttaggaatttgaactgcgggaccatagactttttgaaagttgaatttataatgatgatagtaataaggtcttgagagtttgaattaataataataataataataacaagattttaaaagtttgaattaatgataataataataataataataataataataatctgaaagtgtgaattaataataataataataataagattttgagaatcgaattaataataataataataataataataataatagtaataataataataagattttaaaagttgaattaatgataataatgataataatattttgagagttgggttaataataataataataataagaataaatagattttgaaagttgagttaatgataataatgataataatattttgagagttgggttaataataataataataataagaataaatagattttgaaagttgagttaatgataataataataataataatgataataataataataataataataatgataagaataatgatagtgacaataataaataataataataagtagtgggataaatacgggaattggagcatgagaaactgaaaattaggttcggagataggacacttggaattttagatagctaaatttagaaatcagaatttttgaagaattagactttaatgattgagatttttgagagaaataaatgggtaaatacggaataacgttattaattaatcaaaacgatatttggacggatgaatagtgaatagtgagatttgtgagattgaaaattaaattggaaaatcggattttgacgaaagtgatatctgaacggatgaaagtgaatagtgggattttgaaaattaagtttgaaagtcggatcttcgaataattgaactccagttattgaaatttttggaaggaaggaatacgtaaacgtggaatttataataatgataacaaagatgatatttaaatgaataaaagtgaatggtggaatttctgagtctaaatgttaaatttggagatccggttttaaagagttaaattttaattattgaaataaataaataaacaaataaacacggaataatgatactaattaacaaaaataatgtttaaacgaataaaaaggagaatagtggaatttttctaattgggaattcgaattagggcgttggattttttaaaggatatgactttgaataaataggtaggtatgagattataatactaattaacaatagtagtatttaggcgaataaagatggatagtagaatctttgggattgaagtttcaattaaggcatggggttttcggaagattggactttgaatagacatggaataatgattctaattgacgaggataaaatttaaacggactgtaggatttttaggatttgaaaatttgagttaagacgagatttttggaagaactaggttttaaataaatagacggatatgaaataataatcctaattgataaaaataagatttaaacgaattactgagaaactaaattaagacggaggattttttaaggattagattttcaataactaaataaacatgggataataattcgatttatgaaaatgtgatttaagcaagtatttgaagaattaaattaaaaatatgggattcttgaaagattaggctagataaatgaatgtatgggatgataatttccaattgatgaacataagatttaacgagcatttgaagaattaaattatgacatgagattttcttaatggattagaatttgaacaactaataatacgggatgatgattcgatttatgaaaataagatttaaacaagtatttgaagaattaaattaaagcatgagatttttgaaggattggtatgaataaaataggtgaatgtatagggtaataattcccattgatgaacataaggtttaaacgagcatttgaatgattaaagtataacatgggattttcttaatggatttagaattcgaacaactaataatacgggatgatgatttgatttatgaaaatgagatttaaacaagtatttgaagaattaaattaaagcatgagatttttgaaggtttggtataaataaaataggagagtataagataataattctagttaatgaatatgaggtttaaaagagcatttgaagaattaaattaaaacatgtgattttgattttcttttatagattggactttgaataaataataaatacgggaataataattcgaattatgaaaatatgatttaagtaagaatttgaagaattaaattaaaaacatgtggtgatttttggtagattggaccttgaataaataataaatacggggtaatgattcgatttataaaaatatggtttaaacaagtattttaaagcattaaattaggcttaggattccttttgaaggatgggcatggagcctttcatccacatgaactgggcctgggcttcaacccaagcccaagtctaatgctttcatgggcaagcccaaagcaatcatccatcctgaatttgggcttagtgcctcgactcgaatccaagcccgaggtcctcatgggcaggcccaacatgaacgcccccccagcacctactcctctgccggggcaacactccccagagctgatcactgccgccgacgggacgagatatgacgcggaggcgacgggaagctaggggggctcgaggggtcccggacatgaacgctgcagatggagacgacggggacgacggagcgacgaacctctcgtcatatgagagggcgacgtcaatggctgagctcctggcgcggcggggtgagtcgtggtcggtgcaggtggccgaggcgcgagctggcacgaggcccaggactgcgtcacgcctgacgccatgccgccacgccgtgaacgagtctggcgaggccaagctaggcctgagtgctgggtgaccacggcgtcagaggtggcattgctgacgaaggagaaggtgctgctagttcaagaagcaggaaggatgacgacgccacgtgtgcatgggaacttgaggagccgccgctgctgcaaatattgccgacgtcggagttgggaggcggcagagcaccggagatggggatggagtcgaagtcgtggaccgcggagagggagaggtgagttggagagatggatgataggcggggtggagcaagagatgactgacgaggtgcgccactaacaggatgcggagagaggtggaccggttgaagggattcaagatgataggtatgtgagatggagatgttaacatgtggtggtaatggaaaaatgggtatcaacatggatacgtgaatggagataatgggatgaagttgaaagtgatggatatggtagatggggacatctgtgatgggcgagcatggcgatagggttgagggtggaaagttatgatcatttttattctattatgaatccacccagttgcccaaagctctcacattccggggcacgggctcacatgaaaaccaataaccatgccgaccaaaaaccttattttcagaccaaataaattcgaatgaccatcatcttccagattgggagcggccaaggttttctcaaaggacgatgcacagtccagggcattatcacagtcaacacatgcgagcataaaagtataaggggatgaaagagctaaaacagagtaacgatgagagttagaaaccattaggcactattctattttatgagtgatgaatgaaatgccagttggtggaacgagcagcaagctcttagatatttgatcaaacatcaaatttaaaggaagcaaaccatatctcagtcatttgagaaagaatacagagaaaacagagaaaatacaaagcaaagcaaatatattaacaacacccatcaaaccatgcctaaggtcgacaatactaagcgaggaaaaagtcgaaaaaaaatacagagtgaagagtactcataatggccatacctgagtctccaagcgaagatccttcaacttgccttcttctcctctgtctctccaaaagcccctctcgacagctgcctcccgaaagaaaaaaaaaccgaacccccatttcaacctcctttcttgctttttaaacctcctcaccttgtcttcctcagcaagccatcctcggctccactgctacacatcccatctgccgcccaaaagctctgcatcccctgcagcttcaaagcccccaaacacagctctcccatcatgtcgagccccgggaaataaaaatcaaaaataaaaataaaaaaaaagtctctacttccgggggtctacagtacggtattaaaaaaaaatgtccactaagttgaaaacttggaagaaagacttaggtaaaaattgggaaatattcacaagatttaaaaaataaataaaaagaaaaaaaaaagtcttggcaaaaacacacacttacaccttcgtgaattatataatggctttatccttttgtaagtatattggcaactaggaattcattctaagtccaatcacaatatatatatatatatatgaaatgtgtttcataaatggataccatggcttggagaaggctcgaacaatgttcttattgaggtcataagagaaaagagtagccaaaactatgttataaagataggcctttatgtgaagtatcttgttaaaccaaacacgtcttctaaccattctcaataatattaacttgtttaaactaataagagatgagtgctaagtaatctcatttttattcattcaataaaccaataaaaaagaacaattaagagaagctttattaatatgaagtgaacattgcaataatattggagatctcggaatattgtctaatttagggtaaaataattattgattagatcttgagctccactaatgtaagtgagatgatcatcaagggtaccatgatgaacgacaagtggaccaatcaaaggcttatatactaacaaacaagaccctcccgttaaatcgtcactcttgtctcccaagaattcaaagttgcatcattatggaagaaaacatagttggtagcattcaactatgaaaagactattaaataattagtacaaagtcatgaatgatttatatatatatatatatatatatagttggtagcattcatactgaaacgggttccaaaaaataagatgcatcacgatgtcatcaatcatcataatgctattgacaaaagggcaaaaaaaaaattaaaaatttactataaaaatggatataaaattttattttattgggatatgcatttttttaatagaaaataaagtcaaaataattttttcaaaagattaattcgtctataaaatatctcctaaaaatgaaaaaagaaaagaaaagaaaagaaaaagaaaacttttagcaatttaaatcaatgacccattacaaaaatcaatttctttcaaataaaaggaaattgtttttaaatttaaatcccaattgttttccaaggaaaatttaaattttagactaaaaaaaaaaattcataggtttttggaagctttgacaaatttcttttatttgttatttgtctaattcaaataatatatggtaatttaaaaaaaaatcaaatatatttaaaattggtccaatttttcactttcaattttcaaatatgtgtagtagcacctcgagggatatttgtagaatggtaaaaaaaggtattgaccatttattgactgtcacttgtaattgggaaacaaatcacaacatggcatgtattcactaatggtctaatttaaaaatcatcaacaatatccgaaaatttggatttttaataagagtacgataattttaaaaaataattcctaaactgttgtaatagaaaaaataattctaatagtttttactaaaaacaaaaagtaaaaatcgtctcttcaaaaggctatttatttcctttttaaaaaaaaatatagacaaaaatcatattttcaagagacaattttcaaaatgttattaatttggggttgaagagacaatttctattaataaaaaaaatcgttaactaataatatatttatacagtaatataattattataaatatataaataataaaattaattaattttatttattaaattcaatatatatataaaaaaattataattattgggatatttatcaacaataatatttataaaaaaataaattatgtttaacattgatattaaaaaatattattttatattaagttaaatgttgatttaaaattttttttggtatatatctttaattttatctttaaattaattcaattaattataactataaatagaatttaatttagttttatattgctttttatttataagataaatattatttatctattacttttttgtttatttcactttcgaattaaaaaaaaaaccaattatcaattttatatgaaaattgagtttataaaaaacatatttattattaatttatttatttttgtaatttattaaataattatttacaaaataataattttgttttgttttaatttttaaattaattttattagataagctttaaaattaaaaatgttattttttaatttaaaatttcacaaaaaaaatataaaatcacatcgttttaggagaatcttgttccactatagggctttccactacatacatcacttatccctactacttcacacattagttcaacaatgcagtacattgttgcacaccatcacttcacacactattgcactacaataccattacaacactaaaccaattttacattttcacacaatttgatcgtttcaaatattgtcactttttcttgaaacatttaaacactctaacatttcacgcgatttgaccggttcaagtattgtcactttttcttaaacatttaaacactctaccatttcacagaatttgaccgtttcaagtattgtaacttattttgaaacatttaaagatttttatttttttaaacacacccccaatcctataaattacacccatcctacattaaaaaccccttattagtcatcttcacttacaaaataaaatttgctttaatcttcatcctcatttttttctccgtccccatttgaattcatcgtttttttccatatccctcatttcctatctggaacctctttatatatattctctctttatttattcggacaattcgccagtatcttgacaggtaatatttttactatttgtactttatttttatttcatgttattttgcaatatatgatttttattattatataagtttttaatttaattggattatgtaataatatttgttagaaattgtcattttaaataaattaaatcattcaaaaaaataaaatttatattattttattcctagttaatattttgatctattttgtttcatttttatttttgtaatgcatgatagatatttattgttatatatattttttttaatttattggatttatgttaatttttttagaatactatttattgtaaattatcattttatagaaatgaacggattaaattattcaaaaaataaaagtgatattaatttatttaaataatatgaaataatagtagtatcgtttatctttgtcaattaaataatatttttttataaaatattaaaatttaaaatttaaaataaaataaaatatattagtaaaatgatagtggaaaataataataataataataataatatatctatatatttacataaaatatgatttaaaaaaatattaaaatctaaaaaaaaaaagaaatataacattatccgaaataatagaataatttatcctatatatttttaaaaattaatattagacttaaattattgaaaaaaaaatcttgtaaagtattgagatctaaaaataaaaaataaaaaaaaaactaaaatgttatttgatttatttaaatggatatttatatttatataatgtaacaaaaaaatactaacagtgtagaaataataaattaatttttaaatttaaaatttatctaataaaattaatttaaaaattaaaaaaaattatttatttattaaataattattttaaaaattaaataataaattaataataaatttgttttttgtaaaatcaattttctcataaaatggataataatttttttttaaaatctaaaagtgaaagaaacaaaaagtaatagagaaatattattcatcttataaaaaaaatataaaactaaattagtttctatttatagtcataattaattgaattaatttaaagataaaattgaagataaaggccaaaatattttttaaatcaatatctaacttaatataaaatatcattttaaatattggatattaaacataatttatatttttataaatattattgttgataaatatctaaataattataattatttttacatattaaatttactaaataaattaattaattttataacacataatttataataatcatattattgtataaatatattattagttaaactcttatttttaaaaatgagaaaatgaatttttgaaaatcatttcttttttttctcccttaaatcatctctttttaaaaaataataataatttttttaaaagaattttagaaatcgtctcaagattatttttttcttataatttttttaaaagagaataaatcatcttttaaagtgacgattttcaaaagaattaatgatttttatttttctcttttttacttggcaaaatttatagatttggaattttttttttgtagtttaggaagatttaaagatcaagctcaaactcgactattctaagaccaaatttggaaatcaagtttgaagatttaaagatcaagtttaaggagttttcggatgccttagatgaatgtgacctaagccaaagtgcaagcttagattcaagacaagccaaagcacaagtcacattaaggtccaaattaaatggatatttggtaaaccaatttaataacttataataacttgatttaagtcattaaataaattaagtatgtttggtaaaataacttaataatatgccttaaaataaaaaacaattttacattataaataaaaataattaacttattcttaagtccacatctttattttactttttttttacccttatttgtctcatttttgctaccccgtgacctccattattattcaatttcttttatctaaattataatttatgataataaatatgtcaatttaataatttaaaataaattttaagttaattttgtcaaacaaccttaatatttaaagtaataattaagtaataagttttaaattaacaatttaagtataatttaacttaaatcaatttaagttattaaataataagtattcaattttactaaacaccccataagctaacacccaagtcaaattactttttcggaatgagcaaaatacatattctatctcgtttctattaatcaaatttcaatttgaccactaacttttcattaaaataaattcacgtatacactaatgttcattattccataatttaaaagaaccaatttttatattaaaaaatttaaaatatcaataatgcctatgagcactccttcattatagtgtagctcaaatcatacactaaattgtttttatttgatttaaaaattcattttaatgattttatgacacatgtatatttacattttgaattttattcaaatttgaatctcactaccctaacaaattttagtgttaggtaacattaacaataacaataacaatgccttcaatgtggtataaatccaagccttaatccaactacttttgttgcacatgaaaattcattattatgattttgtgtcacatatgcacttttttcttttctatttcattcagatttgagactcaattatatgattcaaaagaattgatttaagtgttaggcaatactgacttcttgattttaaaggaacaattttagtattagtctaatttggacaaagaccatggggtacttgatgtagtgtatctttaatcatgatgactatgtgacatattatatagttctcctttccattttattccaacctaggcccactacctcatgattcaaaagagtcaatttcagtcttacacaataatcatatttcataaatacctctttgttgttgtagtgcagctccaattctaggtaaaataatatagatttataatgtttgaaatattttcctatttttagtactaattgaaagtttagtccaaagacccttgtaattgaaggaagaatattagaattataaatattttatttaggggtggcaaagtttgacatgatttgcaaatacgatacgaacccaacatgcttttcacgagtttgggttgagtataaatggattaggatcaaattcgtgttaacctgcataattcgataatgttttatttaacccgaattgatctatctaacaatttcactattaatttcattatatctttaaactacttaagtcgtatttaactcattttaaatttgtttttaaataaaaaaaatcaattaagttataaacatatttgattgagacattaatcatataaacatgtatgatacttcactcaacctgattattaaataggaaaatttaattattaaatgagttaaatgggttagatgacgggttatctgttaattttgctaaacataaaataattttaaaaatagttttttggcaatctttttaattttagaataccaaaggcagacttttcaaactcaaaatctcgattattaaatatgtataatgaaatttgagtcattggatgcaagtataaacaaatgaaatatgatataaatatctacgacaaaagtagaaaagattgaaactaaggtgctatgagacgaatttaagtataatgtaatgagactaaaatgcatatgtggcataatatcatggagtagtgggaattatttttctttcttaaactacctcctcactatctttgtgaattttaccaaattctttgatttagggtttgaaatttgtaaagagagacaaaagtagttgtgagaggtgtcttgcacacaatttataaatggaaataaaagtgatggaaagtcggaggtgaagaccaaagactcaaaccagaattgacggggccgcagaacaagc

SEQ ID NO: 13660 - DNA, 15107 bp, Vitis vinifera
  Intron number 4 from transcript GSVIVT01037328001 (locus G SVIVG01037328001) derived from phytozome v7.0 (chr-ID chr6 ; pos 15604681 to 15619787)
ttcaagaggatccgaaagccaccatatttcaacaggcaagtttaatctcctttgatgagtgtttgtttggatttccttaggaaatgggattattccattgtgctttatatcacatttcaaaagtcaagttgatggtttgaaattgaaccattacataatcggtaagatgcttatgagctagaagtgatttcatttctccttgtcctaatttttccttaatcaaaggttaccaaaaaatgactacccttttgtggaggaaaacaaatgtggctcattttgaatagtatggaaatgtaatgattaaatcttcattgtacttaagaaaatgtgttggtcgtaagaatattaatgtgggattgttttcttctagaatgttttgttggagacaagaaaaatcaaagatatgcatattattctagcacttgttactcttgctccttactggggaagtactcatgtttcacatgacatttaaatacaaaatagtaattaatttatatgattctataatgttaggctatattaactctccctaaaagtttaagttgttagggtttaggcccacaatgtatactaggctaacaaccccacacatatgtggccccacctgtattggagagacaaattagcaacaatagttgtagataaatagatggaaataatagtgatggagaagaacctttaggtgtgacgttcccccctttattctcaagcatgattttaaattcttgggttttggtgagggtgggctttatcatgtgggaagctacctgggggaggatattaatgttggaccagcttaaaaggagagagtggcgaattctgaatagatgctatttataagaagaagaagaaatagttgatcatatcctactgaattgcacaaaagcagttatgttgtggtagcttgtctatgcttttttgggattgaatgggtgattcacttcacaataagaaaggcccttttgggcatatatcttttgttgggaggaagggtatgaaagcctggaaagctcctttctgtttattttagaccatttggaaagaaagaaatatgagagcttttaaaaatattgaaataggggaccaagctatcaagcaatcctgcatgcatattttttaggagtgggttagagtgtacataggtgatagctcttttgaattggtgtcaggcttgaaaatagctctttgtccattttgaacttcattgatagctctaagtgatgtcctttgtatacaatgtgtatacttttgtgcactattttgttaggcacttttaatataattttctttacttgtcaaaaaggaaaaaaaaaggggaaactaacgataagagagacttgaagttgagacctctagctctgatataatgccaaagaagaaaaaaagaagagagaaaataaaaaaagaatgagaaaaagtaaagtcataaaaaaccatgagtggtatcacaaatttatagttacaggttttaatgcaaaatgactatagtatctttcataagtatgctaagatgcataatgaacaaaacactaataatactctccctcaaattgaggcacatataaatattggacctagctgggaacacaagagtaaaacttctttttcctaaagctttagtacaagtaaaggtatctctaacctgatcttttgatttgacataaggaattataagcttcttgttcaccataacttttctgatgaagtgacaatcaacttcaatatatttgtcctctcatggaacataggattattagcaatatgtaattatgtatagtagcttgattgtcacaatgcatcatcacctttggtttgtcaataagaaatcccaattcttgtaacaagttcttaaatgacttaagttcacaattactgtgagccatagctctatatttaccacaaacataagtacaataatcagtaatagatcctctttcagtggaaaagcccacccaatctgcatcagaatatctctctgacacaaatttgtgtcgaaggattttttctatagataatccccatatcaactatgcattttaaatattgggggttctacaaacaacttcctaatgaacattctttggagttcccatgaattgattcatgacattaatagcaaccgtaatatcttgtctagtgacaggcaagcatattagcttctcaaataggctactgtatttctttctaccactaaattcaaatctttcatctgcatcaaatctgatattttgctctatagagcaagcttagttcccagcattttagtttcagtaagtttaacacattcccattgtgataacattactccttagtccttcctcaccataagcttcttctattatgaggaaggtagcatagtaatccaagatctttgggttgaaagcttcctcaccataagcttcttctcttatgaggaaggtagcatagtaatccaagatctttgggttgaaagttcattcttaggtggttctttatttatttatttattttaatcagaaacaacatacgtattatgtatggataaatatatacctaagaagaatgaggaacctccctaaaattgcaagtaataaaaaatgtgtgattgaaacctccgatataccaaggaggcctatgcatcagaatagtaccatatgggagtaatatacaaaaagagcatcacatcactccaagatgacataaccttctccttccaaaagaaacctaatcaatgttcttctctttgctaaccaaacctttttgatctacacaccaaatatcagttgatttggacaacattgagatgaatgcccttcaatactgtggtacatgaggcccaaaaggaggactagaaatgaacgagatcccatagagtctctaaatgcctcatcttaacaaattctagcatttcttttgtgccaaacaacctaaattaatgtgaaacatgcagtttgccaaaggactttgcctttaatggtgctccctatgagatggttatcatgtcacatattcatgatgtactgttggtcaatttgaatagtttgtgccatagtcttaaagtcaatgaacaatgtaagaaaagatgatcaattgtttttgtactctccatacacaagatgtaataattagcactaagggctttgtaggatctttgcaattgtagcatgtgattggtgtttaccttcttgtgtgccactagtcaataagggcttcgaccttagatgagaatttagatttctacgaaaaattagttggatagaaggaattggatttgatggattgtaaataatcttaaagaaaataatgaccaagctcccatatctaggatggatggaggacatgagtctttcaaaaaaggggtcatctaaccaagtagcactctctgttgatatagatggctaatccaatccttttaacctccaagaatctcccgagggtctcgaatatgacttttcaaaaaagtgcaatatctcctttgaaatactttcaacattctccaaaattggcccttcttcattcatcatggtcttgatgaacttcctattgcacctaccatcaaccaaccctatggaaaaaatagagtttcaatccctttctttttactcatctcatgctcaccttctgtctccaatgcatctcttcccttaacaacaaatcctttagctccccctttctcaaggttaaaatcttaggagatagattcccttcttgctcaatagcaccaatgctagcaatatctattaaggatattgtccttcctcttctttaccctctgaaagacaccttattttattctttcagttttgatttaacaaattgtagctttttcatgaacccatgaccttcccaccttacactctagaactttctccacccaaagctcaatctttcgttgaaatgtgggtggagtaacttcatgttttcaaacctaaaaggagttggtgcccacttaaatggattagtgtctaaaataattgggcaataatcaatggtcaacctagaaaaaacttcctagaggctttgatttgaccttaaattaatcatgattgaaaaaagaaataccacttgtgcacaactagtttgaatcacatatcatcaatacccttcccatttccctataagttagaagagaagcccattccttattcctaactatcaatttaactatccacacattgacaataaaccttttatcatatctctctctctttgtttcttgaagcatcacaatgtttggggattcatgatgtagaaaatccttagcaaaccacccccctccttttttttttttctttttaaatttcctagatcccaatcctcaagtagtccctctaatgatcttcataacaacacttactacccatcaaccttttttttttttgataagttacccatcaacctttaaaccagctcctgcagaacacgaaaacctgtgcgtgaagttctgtactttctcctgaggtactatccatagattttgccttgttactccccatgggtatgacattcttgcaatactcgactagattgagtttgatggtggtgaaaaccaattgaactatccattttactaagggtgggacccttttatatgaaaaccttctatgaggaggaatctcgttcaatagggtgatctatgattgaggtatgagtttccttagggacgctaggtagtgagggagttatggagaggaacaccattagatacttggctgggacaagttgaaggggactcaacacatacgtaattaggactgccaacattatacacaagcattgtaccaaaattatttttagtggaattcatgacagggatagttggtggaccagaattggacaaagatggttgcattgagttgggaaataacattatcatatgtttttaaaggatgagttaatatatttgctttgtttacctttaaaaaaaaaatgttattaaaggatgagatattaagataaggggagggggctaactgggattaagggttgaaagatagtagtcatggttacctttctcaacacatcgacaaatcataagtcctatccaagttttggcccttggcactagttctagatttgaaggtgtagcttgaactataggaccatagtaagaatggcctctaactttgtcaacctctctaatgtctataatagtcacttctcggttatattctatttcgccccacattgggatcgtagcgggacccttcgtggaagtcaaattctaaggggattgtgcaccctctctccttcctattgagcctcttatcctcctttgtgagagatttcctctaattgggggttatatccaatctccttgatgccatttgctgatacaaatccttcccctcttaaatcccttaggatcccattgaaaaattcttgaactcccttaggatcctatcaaaagattcttagattggaatcaaacccttggttgatggaggtaagctttttcttcttatctagtgaatattgtgagatttaggagtgatggagcttgacctttgctcacacaactcctgtatgtaaatttgggatggatctcctatgggtatgattggggatactaggccttcaaataataataactactagctcataccatagtttgggcctttccttgtcaaggacaccacttcattctggtttgcttcttgatcttagcccactacaagacttgggatcctttcagaaagataggcttgcttctctaatcttctctccttcctttttgcctgacttgcttctgttgaaaaggaattcttggagtctcgaaaagaataggcttggccctcttgaagatttgttgaaactcggatttttttccttaggaaaagattaggccttgcaaacaattgatcttcttataagtaaagaaggcaccgcatgctcgattaatagatctttagagtcttggaaatgggctaacgctacactattgctctgcctttgctgagaggcccccctccatttgaaaccagagatagtggatcatagttgtccttcactaagactcttctcttgccatgtgtcccattatgagactctctcctagccctttgaagagcattagaatgttgatatttgccacgtgtcccacattgagacccattcctagccacgtgatatgccccactgtgctgattcatgccacatgtccttgataataactcctttctcccttgagttggctcaacctttccaaaccacctttcatcttcatctttgatcactacaatagagattgtaaacatccatgccccatccttcacctccatcaacccgggcaagacagtgtgttccttcatctctaccctcaccctaacttttgatagatcatacaacttcagagtgcaccaatcaatctctaccatgatcccctgaacctccacaatcatcttcaaatgttctttagaccacaaatgaaatgacaatccatgtaatttaatccaccctttttatgaacttacctaaaaccattaaaagttttccctaggcgaccatcttctcactaaagttttgtacttgcccttaaccatgacatgccccaaatcatgtataaaggaagcttcctcgattgtcttcgcaaagagtaacccctttgttgttgtgaaagggataatagacaccatgccctttgaacctagagcttgactcacctcaactcagttaacattaaacatagggtatttgcgcatcactactctcacccacctctcgattggaatataatgtcctctcctcaatccttcctattgaacaattcttgcataggaatgattgaattgtgctttctttcaacataaatagggcattgcatctttgtctggttaattccgttaacgaatgagatctcagcctgctaactagctatgtgaaggtgagcctccacagccagcttcttagagggattatggccgcttaggccaaggaagtttgaggcaataacaagtttgtgatgcccttagatgttctggaccgcatgcgcactacactgatgtattcaatgagtctatagccttggccgacaggctcaggtaatctttgaaatttcatcgtgatggggatagatcattgcaattgttggtcttcaacgatgaattcctagtaagtgcgagtcatcagcttgcgttgactacatccctgccctttgtacgcaccgccctgttgctcctaccgattgaatggtctggtgaagtgttcggatcgcagtgatgtgggtggtccgctgcccgcgacatcatgagaagtccattgaaccttatcatttagaggaaggagaagtagtaacaaggttttcgtaggtgaacctgcagaaggatcattgtcaaaccttcgaacgaaccgcgaacacgttttaacactctgaggggggggggcgggcccaccactccgccaccataaactaccatgttaggtggagactccatccttgaagaaatcacatgttttgatttcttcgatccattgcctttctcaccctctaatattactaaaaaggtagactttcagttagatggcagcttagatcacttgataaacttgtcatttgtgttgaattgcacttccattagatgaacccttgtctttccttagtattttctgttgaaatccatgaagccctccacctcaactgcttccccaatcgctctagtaaccatcgaacttctttcttttcaaaacccatagagaaaatagaacctaggctttgctctaacaccaatatccatatccctctaaccttgccttcaaatcttacctcgaaggttttcctttccacactgcacaaccttctcgtactcttccctatatggtataaaatgttattttttaggtggttctttacttttttaattcctacagaattgcttcctcaaatgacagtgtcatccatatgtagcatgggtatcactattttagacttccttttaggaacaaacattgagtgatctgaccgacattgataaaagccatttgttgttactacaacattgaacttatcaagatatgcaggagaagattgctttaaccctcagattctcctctttaaacatcatgcttgtaatccgtactccccttaagcaatgaacccaagtggttactccatgatagatttttccaattgaagttggtgactaagggaataaagatatggattaaatcaagacaggaagttagagaaaatgtctcaaaatagtctacccataagcgtaagtatggcctttaacaagaagttcaactttgagccctgctcaattgtgtcctctagttgatattttatgggatatacccatttacacactactagtgttcctggtaggtaaagtagtgagttcccatgtgccgctatttaccagggcattcatctcctctataactttcttccattctggatgactcaaggtggcttgataatttttaggggtagagaaaacagacaaagcagttgataaagcacaatattgagagagatcatgagtggtaaaataactatcaaggggatattgaagacaaggatgtccatctttacaaagagccatgtataatttggaaggatcggtcacaataaccgatggtagagtagataggattgagcatgaaagagactaattaggagcagttgaaccatgggtccattgatatgccaacaacaatttagaaggggctgaggtaatagtttctgaaatttgtgaaggatgaggaggtgaagaacaaagttttgagtgtagcgaggatcttgtagaagaaaaaaggaagtagactcaagaaaagtcacatttgcattgacaaagctcctatgacagatatgatcataacatttatgcctttctaagtttgagaatattgaaagaaacacatttgatggtacaagatgataagttatcttgatttggaggacaatgtttaacaaaacaaccaaagatacaaggtggaagagcaaatgaaggctgatcgagacacaacaacaaatatggagaatacccttttaatacaaatgggggtaaccgattaatctaatagtaagtaattaagatggcatcctcccaaaactgtttaggaacgtgcatgtggaacatgagacattggccaacataaaaaaaatagtggttttttctttcagcaaccttgttttgttatggtctgtacacaagaagtttgatgaataataccacaacttgtgcaaaaagaagtcaatgcatggtttttatattcaaggacattatctgaatgaagaaaacaactaaaataaccaaactaagttttcatttcattaaaaatataatgaaatacatgaggaacttcaaaaagttctttatgcaagtagaattatataacatgtgaataatcattgacaaaactgataaaatagcaaaagccttgaatatggggaacttgacatgggcccaaagcatcataaggagccactttaaaacaagaggactcttttttaagtcgcacgggaaaggaagaacaatgatgtttcccatacacataagattgacattttaactgataaaatgaaatggagacacagaggaggacaatgcaacaacatgaaagtaaccatcattgtgaagctgctaccaatcttcttctttatgatcaaatccttaaaaacacaataaaaaagaagaatcgtactataataattttgttgttttgttaattgactaatagaagcaagattaattgatactttaggcatatatagcacgggtcaagatgaagaggtaaagaaaaagtaggatgagaaacacctagaccactatccacagaagaaaaaccatgagccaatcatatggaaaaattgttgaagatggattaagtatggaaaattttgaagatgtcccagacatatggaaggcagtgtcagagccaataatctgagggttagggttatgagatgaaagaagtgcagtacctgtatgggccattgtagccatgggagtgttggttttagtagcagaaggggccttagatgatgttagcaccacttgaatagtagatggcatagattctgatgcatcccagtcctgtttcccagatttgccctagcatttgtcgaaataatgactagtcttaccatggtgaatatagtattgacccgttaaaagtgcaagaacgtgaggacactttatgttggaaagaagataggagaggattgttcagcgtcaagattcatcttgtaaaatggctagttgtttgcttggataaaagtaaagagggtttgggggtaaaatgcctctctactcttaatagatctcttttgggtaaattgagtttacactttatggtagaaaatgaggctttttggtatcaagttattagtaggaagtatgaagtggaagaaggggggcagtatacttgggaaggtagagagggttttgcagtggggttgtggaaggagattagaaaggaaggttgatggggaaaagtcttttaaagtttattcaaggaagatagggaagacctaagtaaactttaagtaagattaatattaattagaattgaattgggattggtatttgttagagtctaattaggattagctagttgagttataatataattagaatttgagtcatgataggttattagaatcctagtagactttggatgttattattagaattataatcataataggttattagagtcctagtggactttggatttcttagagaagcttataaatagactaatcaatgtaaatcaaaggaatgatttgatatgaataatattatattttctttcattgtaaggttgcaaccctcaatggtaagattccatttattttcttctaggtgagactcctagaaagccttaatgagactctaaggttttccattttttcttcattgtttcttttttctctctatttcttatcttataattttctctaccataaaatttattttttgttcctctccttgcaccctaaaaaataaaaccctagcccacctacccttgagtgtaggcaaccatcctagggttgtcctacgtcaaaggttctcggttgagcaactacattgggttttctgtgggtaatggaagtagaatcagattttggttggatccttggtgtggtgttgaggctttgtgcaactctttcccctctttgtttgctttggtggtttctaaagaagactgggtggcggaggtgtgggactcttcggttgagggggggagttggagtcctcattttttgagggccttcaatgattgggaggtagtcttggtggagcggttgctctggacaatacaaggaattagagttagtgcaaatttggaggatagggtgatttagaaaaagataaaaaatgggtttttcatagttacgtctctttatagtgctgaagaaccaggaaatacagtccggtttccaagaaaaataatttgcagcccttttgttcctccaagaatgggtttttttttgcttgggaagcctcttaggggaaagttttaactttggatcaactctaaaggaggggttagtcccttgccaatagatgtttcttttgtctagtcgaagtggagtctactaatcacatcttaattcattgcacgaagactagagtttagtgggagttattattcgctctctttggggtgacttgggttctcccttgtttggtaagggagactctccttggttggtttgggtcatttgtgggcaagaagcgcaaaaaagcttggaagctggctcctttatgccttttttgggtggtgtggaaagaaagaaatgtgatagcgtttgacaaagaagagttttcagttcatagattgaagcattgttttgtatgtagtttatggtcttggacaaagttgtatatagatgtttgccctttatctttaatcgacttttttgattggttgggctttaggtgagagcgggtgaggtttttgtttttcctcctgttttgctcttttttgccttttggcacctattgtgtactttctgtatgccttgggttgctttccggtcttcctttttctaattaatctactctctactgtgtttatccatccaaaaaaaaatattattgttctctaagtggggagaataattttgcttttctgggaaaagaggtttagggatcctgtgctcctcttagaactttcttttttgcttgggaagctgtttggaggaaaatcctaattgtagacaccttaatgaagaggggatgacaaatggtcaataaatataatctttgtaaagagagtgaagaatcaaccaatcacattctgattcattgtgccaagacaagagaactttggatctttttattagtcctctttggagtgacttgggtatttccagtttcattaagaaatctcctccttcaatggaaagttaaggggtttcaaaagaagaatagagcaatttggtgcttggctcccatttgcttattttggtgtgtttggaaagaatgtaatcgaagaaccttcaaagatgaagaactctccgaccagggtttaaaagatctcttctttcagactctttttgagtggactagggattctttggagctggatttcccctctatgttgattttcctagatactctttgttgtggttaactttgctttgttttgtttgtgtggtctttctttgtttgaggtgtgtttggcttgtttttgtgtatataacctatatacgtagggcgcaccccctcctttttaggcgcttatttttacatgttcttgttgtctataaaaaaaaaacagtattggtcatccctaacaaggcctcccactgcataatgagcttgatcacaaggactattaacacctcttcctctagtgctagaggaaacattaatcattgaaggggagaatagatgttgctgattgaaggtaaggtttcacttgagactaagtcttcactttatagtagataggttgaagaccaaataaaaatttagcaagtacaaaccctttttgctagcttttgcaattttccatattactatgattgatatttagtgcttcactcataattttaagagtcctatcatattcaccaagaggtttatcatcctatttgaggccaaaaatattttcatgtctgataaatgtttttatcttttccgacaagtaaggaaacgatacattaaaaagtgccaaaagaatggtgcccaaagtacacaagatgtatacaagagcactaaagggctaaaaataagatgacgggaaaccaaaaacattccctccccttgcttacaatctcaccaatctacaaagtcttgcaaagaaaggatttaagctcttgatcaataagctctacattatcaaaagccttcctatttctcttttaccaaatagtccagagcaagcacaaaggagcggctttcatgcttgtttccattgcttcctgacaaagcaactgttccaacttaaaagagttgattcaccaaaaaaatcaacacccatgcaatactaagtagggagaagactaactgccctagaattctttccttggaacagtggcggaggatgtgctcaatagattcttcctcacctttgcacataaaacacctattcaccaaaatccaacctatcctcattatcttgtccttggttaaaatacctttccaaactaatagatgtttccatcttgaggataagtttcttgcctcacagacaatgtcccgagtttctttagcaatacccaaaaacatcatattagcactaacataaggagacatgctattcaataatcacaacatgatcataaaatgatcctattgccacttttcaaaattagggacttcaaatctggaggatcaaaaggagatagcatcccttatgcaccaatatgtacttttaactgccttagacacataggtcaattcaattcattttattgagataatttgtaaattcataggatcaggagatagagatccactctgtgccttatcggggaaacagtaggaagaggcaagcagcaaccatgaggtagaagacaacagcagctatgaggtagtagacagcagaacatagtcacttgacagaattatcatttcctatagtagcagaaaataaaggtatataggccacagaccaaaaaggagatttctagatcagcatatggttcacagtataggactcccatggtaggtagtagtaagtcatagaccaaaagcaaggcaaattgcatgtttctaatccataaatacagcagacttctatcatcaataaccaatagaaacagctaggggcaaacaaaaagttgcagaaaatagaactgaatatgagaattggagaggaaacagaaaataggaacaaatctacataggcaaccagatctgattttctggaaaaaaaataaaaaattgcaagattcaaagtgatttgaatctttcagtagattagagtggttgctacatggtgtgtagggcttagggtgaattgctgcaggatagttagggtttaaacagagttgcagcatggttgctgttaggtagttaacaccttttatgccttttcttatccccaaacaggattttgtaactacctgataagctggaaaaagggtctgctgcctaataaagccctagaaagtaatagacgctagctctgtcattctcttgaactgcttgtaacaactaataaaacaaattgcaacttaaaatgacaatcatattcgcatcttacatgtgtattactttctctctgtctctctctctcttattttcctttttccacttgtggtatatgaaaacatgtcagaaaattattatccaaaacgacattctatgccatttgacacattttaatgctccaccttgttcacatttaagaatggtccttgataggaaaatgctagttttaatgtctcttttaccatcttttcatttttaccagactttacagttgatgtgccatcaccacaacaggttgttatttgcctgaatgtgctgaagtgttaatattttgcacttatgtaatgttgtcacattcatggtcatctcagatggtaaacgaggtcattaaactagtgctagtacatctcccttcttaatgcatgcatatcatacaccaaaagaaaaacttgtgatggactattctctttatttcatcctttttcaggtggattaacttgaaggttccattcc

SEQ ID NO: 13661 - DNA, 8973 bp, Vitis vinifera
  Intron number 2 from transcript GSVIVT01011936001 (locus G SVIVG01011936001) derived from phytozome v7.0 (chr-ID chr1 ; pos 2888441 to 2897413)
gtgactcctggccgtgaatctgagtttgatctaaggtaaatccactggattttatgctcttttggtttatgcgttccatgtggtattaaacaatttctttacttaagatgagtacattgccataaatttactgatactgctctatggtctcaagattggcattaaagttcaatttataggggacacaagatttctatgcatgccattgaatggtcaaaattggactggattagtgtatcaataaattttagttggccaaactatgaaccaaaacaagttgcattcttactggtacaattcaaatctgcaaataaatctcatttaaatctagaaattgttgctagtcattcccactggtgtcttgtgggactgtggtcaactcacacccattaaatcaaatgaaaaatttataggggatgtgacttggacagaataataataataataataataataataataataataattgttataggcaaaagagcaatagatatattaaagagccaaaaaaggctacaccaagcacacaggaagtatacatgtgcacattggacaagttgacagttaatccaagttcaacccatgtatgaaactcattttcccaagctcaacccaacctgaggttcaacccaagcccaacccaagtttatttttccaaacttgggttcaaattaggttgggagtcggtctggttaataaagattacataagcttagcatccattttggtaaatattttaccaataaacttatatttaaatcaactattagtaacatgtatttaattgtaattctagaacctttgcaaatcaatgtcaacatataaatttacaacattcatttacttaatcaatgcaatagctacaactccatactacaatcaatgaaataaatcaaaagctctaaaataaaaacacaaataatttttttaaagccatttccaagtggacaatcaaattaaaagttatatttcctacatgttcaagatgaaatttcaacacttttttttttttttttttttttgataagtaaaagagaagaaattgtattgaaaagagacactaaaatagcaactcaaaaagatacagcataggagcaccccccctccttggctgggacaaaaaacagccttaaaaagcggaggggcaaaaaaaaaaaaaaaccaccttcaacaagaacctatccaatcaaggaaaccaactaaagtcaaaggaccatcttttatgaacaatttcgtctccgaccaaagaagataaataaaagaactcttaaatctttgaatggacagcataacatcttcaaacgcgctttagttccttgccttccaaaccgtccaaaaaatacataaagggtctgctctccaaactttctttctcttttttcccacaaaagacccattccaacccaagaatgtcattttaacaaaggctggcggcacccactgcaccccgaagagagtgaaaaacaacgcccaaagagtccttgtcttggcacagtggaaaaggatatgatttatcgattccccatgcatttggaaaatgtagcatctatttgctagaggtcatcctcttttctgaagctggtccaaagtaagagtcttcccctaagttgcttcccacccaaaaaaactcactttgggctgcacacatgaattccaaatgacaatcgatgggaaagaggctgatggactagattctaaggctttgtagagagacttaacagagaacttcccacatttagtctctatccaaagcaccctatcttccacatcccgttgaacacccttcccattgagacccaataaaaaattgttcgcctcatccatttcctaatcattgaagggtctagagaaatgtgtgtccccactcccttagtgaaactccacacatcttttacccagacatccttggtcgtagctatagcaaacaaagtaggaaaagcaacccaaaaagctgaatctccacaccatcgatccttccaaaatctcgccctctgaccattgcccaccataaaggagagtctactgcttacaacatgccactccctcctaattgcttttcacaaccccatgccatacccacccctttgcttctcctcatactttcccctaatcacttgattccacaaggcccctctctcatttgcaaacctccaattccatttgcataaaaacaccttattaagagaagaaagacacttcacccccaaacccctttttcttttgtctaagcaaacaagcgcccatcttacaagttgtggttttagctcaagagccccatttccccgcaaaaaatctctctgaatctgctcttacctcaatctgattgtcctaggcaaaataagcccaaacatgaactaaattggcaagctagccaaagtactccaaatcaaaatgagcctccgacctttagagatgtattgtctcttccacattaccagtctctttcgaaacctcttttccactccatcccatgtagccatgaacttaaaaggagctcccaaaggcaatcccaaataagaggaggggagcctcccgaccttacaaccaagttctacagccaaagccttcacattttccacacatcctactgggattaactcgcttttatccaaattaattctcagccttgaaatagcctcaaaccacattagaatccaacttaaatacttcatctaatcctgagaagtccaacaaaaaccaaaatatcatcgacgaacaataagtgggacacatgagcccctttaccgcctctacccctcaccttacaagtcgacaaaaaacccccacttacaagtctccttagaatgcagctaagtgcctccataacaattacaaataagtacggtgagagtgggcccccctaccttaaaactctagaactttggaagaatcctgaggaagtcccattaaccaaaatggaaaaactcattgtagagatgcatcactgcatccaccggagtcatttctccccaaaacccatcatacccataactaaaagcaagaaggactagtccacatgatcatacgccttttctatatcaagcttgcacaataccaccccctcattactcttcaaaaatcgaatccatgacttcattagcaacaagggctaatgaagttatctagaatttgtctaccctccacaaagacattttgggccttggagaccaccttacctactaccagaatttgtcaactcataaacaatcatttttacaacccatcacaattagaagaaagggtaatttttctattatatttttcttatagtaacttaaagttcatgaccaatctttcacagaatagcaaaaatacactaaaattaaaaaaaagaaagataaattaattgttcatgacaccaaaataaccaaaatcctcaacactatatcattttctaacatttaaaacaataaatgtgtcttaatataaatgaaattactattaaataatatgcatttacacacacacagacacacatgtatagatatattgttggaaaaccgaaactgatatggaaagaaataactttgtaaaactgtaaattatttattagttgtcaatctttgtatttttaggaaagtaattgttaggagttattctttccttttaatcagtgatttagttacctaatttgaaggatttgtatatgctgtaaactctataaaagaataatctcaatgaaagaatattattcccgtgaaaccctattcttcaacttggtatcagagctagcaatttgcttgccaaaatcctccttcttcctttctttcaatccttgttctctgaaaccatgtcggatatttcaaacgagtccactactgttcctcaaccttctctgaacaatcccatcatcactgattcttcaaaaatcagtcttaccacctcggaatctcactctatccaaatcaccacgattcgcttgaatggtgacaactttctgagatggtctcaatcagttcagatgtacatcagaggacgtggaaagatgggctacctgacgggtgaaaagaaggctcctgcagtggatgatccgaactatgctatatgggatgttgagaattccatggtgatgacatgacttgtgaattctatggaagaagacattagctctaattacatgtgctatccaacagcacaagagctttgggagaatgtaaatcagatgtattctgatttaggaaatcaatcacagatctttgaattaaccctcaaacttggtgagatacgacaagaggagcatcttcttgcactgctgaaatccaacttgacatccggtacttctagtgtttctttggcacacacaggtaatgaattatatgctctatcttgtcgttttaaatctactccatggataatcaattctggagcatccgaccacatgaccaattcctcaaacatgtttgaatcctattcaccgtgtcctgcaaataaaaaggttcggatagctgatggtaatttctcacctattgtaggaaaaggtctaataaaaatctctaagggaataaatcttaaatctgttctccatgttcctaaacttacttgtaatctcttgtctgttagcaaattatctagagattctaattgttgtgttatcttctataaatcccattgtatttataggaccagagctcggggaagacgattggtagtgctaggatgatcaatggtctctattatttcgaggataatttacctagtaataaaattgctcaaggactaagtagtattagttctctttctgtttgtgatcaaataatggtttggcattgcagattaggccatcctagtttctcttatttaaaacatttatttccagtgttatttcaaaaggttgatcctttatcatttcaatgtgaaagttgtttattggcaaagagccaacgaaaaacttacattccaaaaccctactatgcatcaaaaccattttatctttttcacagtgatgtttggggaccttcaaaagtaaccacaatttcaggaaaaaaatggtttgtgacatttatagacgaccatacacgtctttgttgggtatatttaatgagggaaaaatctgaagtcgaaaggatttttaaagaattttacaaaatgattgaaaaccaatttcaaacaaaaatcagtattttgagatctgataatgggaccgagtactttaataaagttttggaaaccttttcaaatgagaaaggaattttacatcaatcctcgtgttctgatacccctgaacagaaaggaatagctgaacgtaaaaataaacacttgttagaagtagcacgggttatgatgttttacatgaatattccaaaatacttatggggggatgtcatattaactgcttcatatctaatcaacaggatgcctacaaaaattttgcagtataccactcctttggagtgtttgaaaaaggtatttccagaatctcgaattaattctgaattacccttgaaaatatttggttgcactgcatatgtacacattccaaaaaggtcaagatctaagttagactcaagagcagaaaaatgtgtttttgtaagatatactcctaataaaaagggttacaaatgttttaatccccttacaaaacgtttttacacaattatggatgtttcctttatggaaaatgtctcatattttaccaaaaatttacttcaagggagaaattagtggaaccaaatttttgggaaattgttgaacctttgcctagtgtaattcttgatatctctcttgaaaaagaaaataaggaaactaagcctactgaatccgaatctgaaattggtttgtcagaagaagaaatactacgaataaaaaaaaatagaaacaatcttgagcctgtggtttattcaaggaaaaaagtccctagaagaagtaaagaccagccgatcaacctagcacatggtcaaccgaaagccctgggcaatggctctctaaatatctcaggtaaccctccttctattcctactcatatacatgcttcttcctctattactgatctaagtttaccatcacactttggtccaagtccaaaaatatctgcactcgaacccgatttaggattaaccccaattgttcctacacaggaccttgaccttgatctccctattgctcttaaaaagggaacccaagcctgcactaaacatcccattgccaaatatatctcctatagtaacctttcagacaactatagagcattcactacaaatatttcaaaacttgtggtacctagaaatattcaagaagcattagatgaaccgagttggaaattggcagtgtttgaggaaatgaatgccttaaaaaagaatggcacttgggaggttgtagatttaccaagggaaaaaaaagttgtagggtgcaaatgggtgtttacaataaagagtgaaacagatggaagtgttgagagatacaaagtcatacttgtggcaaagggttttactcaaacctatgggatagactaccaagagactttcgccccagtagctaaaataaactcgattagagttttgttgtcccttgcagtaaattccaattggcccttacaccaattggatgttaaaaatgtctttcttaatggagacctagaggaggaagtgttcatgagtcctccaccaggttttgaagaaagttttggagttgggaaagtgtgcaaattgaagaagtctttatacggacttaagcagtcgcctagagcttggtttgagtgctttggcaaagtaataaagcattatggatatactcaaagtcaagctaatcacacgatgttctacaaacatgcaaatgaaggtaaagtagtcatcttaattgtgtatgttgacgatattgtgttaactagggatgattgcaatgaactagagaagctgaaagagaaacttgctgaggaatttgagattaaggacctgaaggcattaaaatactttcttgggatggagtttgctaggtccaaagaaggtatctttgtaaatcaacggaagtacgttcttgatcttcttgatgagacaggtatgttaggatgtaagcctgttgaaacacctatagagctgaatgtaaaactgcaacctacaaaagccaagaatgtgaaggatcgggatcgttatcagagacttgttgggagattgatttacctatcccatacacgccctaacatagtattctcaatgagtatggttagtcagtttatgcatgcgcttggaccagagcattttgaagttgtttacaggattctaaggtatcaaaggggacaccaggtagaggtcttctgttcaagtcacgaggacacctacaaattgaaacctacaccgatgcaaactgggctggaagcatagtggatcgaaggtccacctctgggtactgttcacttgtaggtggcaacttggttatgtggcgaagtaaaaaatagaacgtggttgttagaagtagtgctaaggctgagtttagagctgtagctcatggtatttgtgagattatgtggaagaagattactggaagagttaaagatgacaggttcatctcctatgaagttgtattatgacaacaaggcaacaatttcagtagctcacaatcaggttctccatgaccgcaccaaacatgtggaagtggacaagcatttcagtaaagaaaagatagacaacaaattggtctgtatgacctatatccctaccaaggaacaagtggttgatgtcttcaccaaaggactacacaagaggcaattcgattttctagttggcaagctggctatggaagatatctttaagccagcttgagggggagtgttggaaaaccgaaattgatatggaaagaaataactttgtaaagctgtaaattatttattagttatcaatctttgtatttttaggaaagtaattgttaggagttattctttccttttaatcagtgatttagtttcctaatttgaaggatttgtatatgttgtaaactctgtaaaagaataatctcaatgaaagaatattattcccgtgaaaccctattcttcaacttatataataagttttgcgctagggtcaagttgcccaagccaacccttaattcaggttgacacttcttttgtccaagctcaacccaatttacaaattaagttgctccagcccgtaaaagatcaggttggatttaagttgggttagattgaacctgcccaagttgcaatcctaaaaatttatgagacaggtaaggatcccctaaatactcatcgtgaggaaacattcccataaaagaaatcagtgtagtggtgatcagaaaaataaacagtgtagttgaaataaggatgttgagatagatgagtgaaatgaaaagagtaaagtcagaagttagttcacctctgagatgctaaaaccaattgactagatgatgaggaaagttagctaacatgagttttctcaagtacaacaaagaacagtgatcattaaaaatcagtacagagtggtgtggaagattgaagatgttagaaaacaagggaagatcaaaaggaaggtagatccaggttaggaaaaaaatgatagcaaagacttgatgttagatatagttctagctagtgcagaataacggaaaaaaatgttcgccaattccaagtagtttagatgagtttccattaatttgtcttataatttcaatgaaaatgttgatgtgttctcatttaaatatttccttacacttaacctaatgatataattctttaggggtaattgactctagagatatggaacaatgatctgtaccttcttgtctgtcaagttaaatgataactatcagtaattaatatatccctgttcattccatggttcacctggttgaatttgaatttgcctcaaatttcctgctgaaatggactgctggctcaactcattctgaggtattaagttctgtttctgaaatataattgaatgtgatggtttgcaaaacttgtaatgatagtgtcacacaaattctgcaggaaatcaagaaaaatagctccaccctatcgtgtaa

SEQ ID NO: 13662 - DNA, 5056 bp, Vitis vinifera
  Intron number 2 from transcript GSVIVT01023796001 (locus G SVIVG01023796001) derived from phytozome v7.0 (chr-ID chr3 ; pos 3412165 to 3417220 reverse strand)
tcaaagtaaaactcacgcaatctctcctcttctccttctcatttccctctctgctatgcaaatccaagtactatgatatatatctatatatatatatatatatataacttagagatgataaagagtgtttaaaagtgtatgaaagaccacagatgatcaacaattttgtgttgctagatctatgttaattcagcgaggttggattgaattgagtttcttttccaaggaaaaagtaccataatctactcaatctcagtcatcagatgtttgaaatttgcttttaattcttgatgtagcccgattacaagagatctactcttcttggccgataatggggcctattgtactgttttcattaccatcaaattttgattatcacaaacaaagatttggtttcggaaatgatatatcttttttatcaattggaagcataaagagacggttgaaagcggtaaaagataatttcatcagcatacaataaaaaacactatgattaaataataaggatgaaaattaaagttgaagtggtttgatacagaatgaagcttagtagatttttctgcctttctcttcttctcctccttgtcagaaaagggttgcgaaaggggactgcagttttgtttgtggcctaggggcagaggttgttgatgcgtatgcgattcctcctctaaatgtggttttggttgacgggagttctacaatgacctcttctggggaggaaagggctctggtagtggtaggtgaggcgagcctcaaggaaagggacaattcaatggggtggcttaagtgtggagcggagtcagctgaggaatggaaatcatgttgtcttgcccaatttagtgactttctgggcatgtcgactattggttttgaggaggacattctagttttgctcaagaactggaaattgaggaaagaataaaaggatcagtggtctgggtctaaaaaggtaaaggttgaatcctcaaggtttgaaagggaacttagaagattggagtgttccattaattttaaaagtttgggatatggaagagctctctcccgagagagtgggggtatagtttctatgggtaaatgaagttaaaaatcctctctttgaatgtgaaaggagcaaatgatggtgataaaagaaagatcatcaaatttgtaatcaagacttagaaagcgaatttgatttttctccaggaaaccaaattccaaagtttgtcgtgtagtttggtttggtctttaggggtgggcaggttcttggagtggggcgcttttaattcttagggtatgataagaaaaggggtgttagacttggagtggagcttgttggaatggaaattggagatttttcggtttcctatcggtttaagaatgtggaggatggcttctgcaaggtttttacatgtatgtatggccttctgttgggaggcttagggaagagttccaggaggagttgggaactatcaagggtttgtggcaagatctgtggtgcataggaggagattttaatgttgttagattcttgagaaagaggaatagagtttcaagactgtcttcaacaatgagaaggttctcaaaagtcattgaggatttggaattgcggaatctcccattgcaggtgggttctttcatgtagagggacagtttgtataatcaattaaagtcaaggttggatagatttgtagtttatgaggattgggagtgctatttcattggggtagttcaatgtgttcttcctagacctgtttctgaccactacccaatcttgttggacggcggataagcgaggaaaggtcatttcccttttagatttgagaatatgtggttgaaggaagacaattttattttttttggatttggtaaggagttggtggatgggtttccaattcagagggtcttttagtttcactctatctgaaaaacttaaagcgcttaaagctaccttgaagacttggaacagagaagtgtttggaaatacctctgctagaaaggaatcaaccttgaagtagatggtattttgggattctgtaaaagaagataggatgttgtccacagaagagcaaagtctcagaaagtaggctttggggtagtacaagaaatgggtgataatggaagaaacctattggaggcaaaagtctagagagttatggttgagggagggagacagaaatactggctttttccacaaaatggctattgttgataagagaggtaactctatggtgaagatcaaaataaatgagacttgggtaacggaagagtgagacatcaaagatagagtggtttaggttttcccttattttttattgaaacagaggagtggaggcccagatgcaatgagccacaggttaggatccttggagaggaggatgcagtaatgttaaaggctcgtttctctgaggaagaagtttttggagctctcttggacctcaatggagtaaagctcctggttttgatggtttttcaatggcgttttggtagttcagcaggagttttctgaaagaggaagttatagggttctttaaggattttcataattaggacaagtttgtgaagaacattaatgtctcttttctgattttaattcctaagaaaggggaagctagagatctcaaggactttaggttgatctataagcttgatgggtagcctttacaagttgttaccaaaggtgttaactaataagcttaaatttggaaatacccccgggacacctccgactgctactcctgatgattgcgctcccactctgtcactgagtctcatgaccgacgcacctcctgctgcaaccccaactcaaactccgggggccccaccaccaacagccactgaaccacctccagggacaccttctcccactggtaatcctgatgattgtgctccgacaccatcacccagccccatgactggttcaccagctcctgcaatccatctctagatgcttctccatcatctgccgtctttgcaagtgcccttgcctccttggtgtccgtggccatgagtttctttctctagatagaggagtagactcatatttgacactgtttgaggtctgtggtacaatatttcatttgaggttggagtcttgtactagactactacgtgttgtttgaacatatgacattcaataaaacctgaccttgtttgatctatatatatatatgcaccaagtgcatacctgatcaattatgaatatttttcataacaaaatatattttgtcagaaattttatttatggaccctcatcatatatatatatatatatatatacacacacgcgtacgtatgtatttaatttttcaaattttacttttactatccttctttacaatatatctatttgtactaagtaacaatttttgtatcataaaataaataaataaataaataattataatttttttagcccatttagatttctctaaacgaaatagatataagttgatctttaattccatagttttcttcgaccatatcataaaaggtaccgtagaaagtttaatattaatgaaagtgttgttaaagataaatttttgaggtttggagtttcaaggatttagtcaccaacaaaagtcatacgccaaggctttaatcaagcgtaacttaaggaaagtcagagacccattgagtaggttgtaggacaattcttggaagaaaacatggaatagtgcttactagtgaactttccccttaagttctaacccaactggggcaggtcctaatgaatatagagagaggaccagcactaccgcttaccgtggtataatcaatctaccatgagttctttagaggtagttcattcaagtaaaaaatgactcattttgtcctaaagaaaaagtacttctatagaagtacctcatctcaatgttattgttacattgagacatctaataaattatacacgaccaaatataatattacatgttaacttacatgatataattctgcaccaattcgaaaacattaaaatgaggtcaaacatatactatggtacttttatggaacaatcaacatagatttattttatttgaaatgatcaaaatttaagttgcttaatatgtgaatgttagttatatttcatgtccttgcaaagttttattatcttaaatagagtatgtattttcttgtgattaaatataacaacgtatagagatcaattaagtaaatgatagtaatcacttctttaaatcatttcgagatactcacatcaattcataaaataagttataaatggacacagttaagatcaatgatctaacatattggtgatgcaaaaataaggtacccttggaaggggatatctagtcatagtaagtcctcaaaaagggaagatgttagtctggcaggaggtatcctccagactcattacctccagatcaaaccaagctagcccatgacctggccactagtggtgtcaccctaacaaaccgtgttgccactttgccacttagcaaaaagcctacaaatagcctacaaaagcctacaaaaaagtcaatcacctccattcatcgccaaccgttgtcttcctcaatgtcttttactcttcaatggagaagcctgaaatttacagagccctccataaacaataaaaatgggagttgactctcattcttattgtctctggttgatgagaattgagaaaagaggtgattcaggaatttctctccaaactctatttggcaaataatttccagcgtgtgttattttgtttctccaagggctgtttggatggcttgttttgaacatagagtatgtgatctaaaacagttattaaacaagttcttaatcttttcaattaattttggcttctatttcacccatcatttcaataggattatactgcaatttgtggtggcactttaatcatcttaattcattttagccttcaaactctatttcatcaacgattttaacagggttttgtagaatttgtaattgcgaagaacttcaaatcactctgttccctaaccctagatcatatagggtgtatgatatctacctaggcatctctaaatctaatgcaacagaatatataacatcaaaaaaccattataataattagatatag

SEQ ID NO: 13663 - DNA, 5393 bp, Vitis vinifera
  Intron number 4 from transcript GSVIVT01001463001 (locus G SVIVG01001463001) derived from phytozome v7.0 (chr-ID chr1 3; pos 21201327 to 21206719)
attcaggtatgtatctttgagttagaaaagtagtgactgttaagcaaataagtacattcccagtgagcctgatatgttgagtgttttgtataaaaatagaaagtcaaaaaggtacttctttagctatctaattaatccacttatgatatgtgctcgatatggtgtaggcttctgcctgcccgatcatctctttgaaatctagatatctaactgcagaaggagctttcattaagacacaatgtaagatgcagttctttgatcttacatttaccaaggtgtgctgtagaatcatcttctaggaagggatttccaactgccactctgagatttgctagtccattttagataccttaattgagtttgaaacattaaggtgaaggtgaatatatatagaataactagaaataaaccaatgctattatgtccagtttgaacttctaatgtggacacctgcttggatgatttgatataggaaatcatgaagtaacaaagagaggcaaaagaacataggagaggaaaggcttgcagcatcctccaggtctctcaatggtgaggatgaaatagagagagataagagaagagacagctagagagagtaaaagctctttgatatagattttgaccaaaatttgtcaccaccctgacgagcatagttttagccttgacatagtttgtgtcttctaattctggacacaccaaaagagacatgttgactaagggtgtcactattgagaagttgaagctgtgcgcagcttcaattggtcttctagcttgaggacaggaggatgagttgtagggatgagggatcgtttcttggaggatagcggtttgatgttggtgattggactagtctccaagtgggagatttgttgggctttgtggagcctagttttgtttgatccggtttgacgacccgacccgaataatattgcatggcttttttaatgggagatttattgaggcctgttgggctcgtttagcccattgtggaaccaccctttgtaattagggttttttagtatggtagggttgccgtgctatatatatatagagaatattgtagccgctaggttgtactctctgtattcttccctgataatagtgatatccctgcaactccgtggacgtaggcaaattgccgaaccacgtaaatactgtcttgggtgtgtgattgtttttctttggcgtgtgttttctctaattttttttgtttctcacgggttgggaattcggtttaattccctacaactggtatcagagcctagggttaggtttgagtgggagcaatggcagaggaagcaggaaaggcgtctggaatagaaaagtttgatggcacagactttgcgtattggaggatgcagattgaagattatctctatgggaggaaattgcatctgcctcttttggggacaaaacctgagagtatgaaggctgaggaatgggcgcttcttgacagacaggttctaggagttattaggttaactctgtctaggtctgttgcacacaatgttgtaaaggagaagaccacagcagatctgatgaaggctttgtccggtatgtatgaaaagccgtccgcaaacaataaggtgcatctgatgaagaaattgttcaatttgaagatggcagagaatgcatcagtagcacaacatctgaatgaatttaatacaatcacaaatcaattgtcgtctgtagaaattgattttgatgatgagattcgtgctctgatcgtcttggcttctttgccaaatagttgggaggcaatgaggatggcagtaagcaattctactggaaaggaaaagctcaagtacaatgatatacgagatttaattctggctgaaaaaattcgccgaagagatgcaggtgaaacctcaggatctggttctgccctaaaccttgagacaagaggcagaggtaataacagaaattcaaatcagggtagatcaaattccagaaattctaatcggaacagaagcaaatctagatcaggccaacaagtacaatgctggaattgtgggaaaacaggtcactttaaaaggcaatgcaaaagccctaagaagaagaatgaagatgattctgctaatgctgtaacagaagaggtacaggatgcattacttcttgcagtagacagtccacttgatgattgggttttggattcaggagcttcgtttcataccactccacaccgagaaatcatacagaattatgttgcaggtgattttggtaaggtgtatttggctgatggttcagccttggatgttgtgggtctaggagacgttcgaatatcattgcccaatgggtctgtttggttactggagaaggttcgacatattcctgacctgaggaggaatctgatttctgttggacaacttgatgatgaaggacatgcaatactatttgttggtggtacttggaaggttacaaagggagctagggtattggttcgtggaaagaagactggcactctgtatatgacctcatgtccaagagacacaattgcagttgctgatgcaagtactgatacaagcctatggcaccgcagacttggtcacatgagtgagaaagggatgaagatgttgctgtcaaaaggaaaactaccagaattgaagtccattgattttgacatgtgtgaaagttgcatcttaggaaagcaaaaaaaggtgagcttcttgaaaactggcaggacatcgaaggctgaaaaattggaactagtacacactgatttgtgggggccttctccggttgcatccctaggaggttcaaggtactacatcacctttattgatgactcaagtagaaaggtatgggtttattttctaaaaaataaatctgatgtatttgtaacttttaagaagtggaaggtcatggttgagacagaaacaagtttgaaagtaaaatgtttgaggtcagataatggaggagagtacatagatggagatgggcttatagagactatacaaggtggataaagatgtaaggaagaacgggaggtacctggtggagcgagagggctcgtagtaaggtatggatacaaggaatggggaaacatgggatgtttcgggaacccaatagttgtatctggttttatcctctgtaatattctctattgtatagtgaaattattctctctcatccgtggacgtaggcatggttggccgaaccacgttaaaacctcgtgtaccgtatgtgtgattgttttatctttgtgttcttgaactaacattgttggcatcaaagctttcgctgtcactacaattggtatcagagcttgggttgaagatttcgggaagagtaaaagatcatcaaagcttccgctggcacaacaactggtatcagagcttgggttgaagatttctggaagagtaaaagatcacaaagcacacaagatgaaaacaaaaggaattttcactgaaggtggagtcaattgctctttcgtggtgatatgatacaaaaaggtttgtgtcatggagagattgaagattaacttcatgtaatttggtccaaggtggagattgttgggaattgtcccaaattcctaattagtaaatattcctttttgtaaagaatattgtatagaatatttctaggttgatagattattgtaatattagacttccttatagaataaggaaggttgttagaaatatctctataaatattctaggttatgaggggaaaaagttatgagatggagatgggcctatagagactatacaaggtggataaagatgtgaggaagaacgggaggtacctggtggagcgagagggctcgtagtaaggtatggatacaaggagtggggaaacatgggatgtttcgggaacccaatagttgtatctggttttatcctctgtaatattctctattgtatagtggaattattctctctcatccgtggacgtaggcatggttggccgaaccacgttaaaacctcgtgtaccgtatgtgtgattgttttatctttgtgttcttgaactaacattgttggcatcaaagctttcgctgtcactacaattggtatcagagcttgggttgaagatttcgggaagagtaaaagatcatcaaagcttccgctggcacaacaaaaagaacctgacttaacacctatagttggtagacctgaaactcacaataaagcacctagaatgccttctaaaactagattctaattaaattccactgaagttaaaatacctcctaatgaaaatttctgatgctacttctatcattctttccacatcataattttgagtacatgtgaaagtgggtttcagttataaaacactgccacatcaaccttagacaaaaggaattactactttgcttttgagagaactacctcaatacttgaatcacttagaattattgaactggaatgccaaatagcagcttagttaatatctctgatgtatgagctaatatgtggcttcaagtagaattaaattcttactgaagttgtgttgctaccatgcccctggtttaggtcattgatctacattttgttgcttttgttatcctacttgagacagcaatcatatcttgtatgattcaagtctctttatttggtttaatctgggatgacagaagtttcattgctgccagcaacaggtgaaaaataaaaaaaaaatcctgattttggttggggttgctggtaaccagtgatcatttccctgtgggtgcctcgcagattatgacccctggttgattccattactctgttgaattttcttgggtatatcagattgaagtcaagtgagatattattaatctacttgctagcttgatgagtgaaggaactcagttctgagtcagactctatagttgattccaccagtaaattgggatgggaaaagtattccttgaaacattgatttggatatatccttaccgtgacttcccaactcagactccattatcaaatccagtcgtaaattgggatgggaaaagtattccttgaaacattgatttggatatatccttaccatgacttcccaactcagactccattatcaaatccagtcgtaaattgggatgggaaaagtattccttgaaacattgatttggatatatccgtaccatgacttcccaactcagactccattatcaaatccagtcgtaaattgggatgggaaaagtattccttgaaacattgatttggatatatccgtaccatgacttcccaactcagactccattatcaaatccagtcataaattgggatgggaaaagtattcaagaaacttggattaccgtgcaattataatgcaggcttctctttgtagatttttttttttttggttgatttttctcccatgtctgttcatttcttttcttgcttctatcaaaaatgccaacactgtttttcatttgcagggaatctctgctgtgaaagcatttt

SEQ ID NO: 13664 - DNA, 4160 bp, Vitis vinifera
  Intron number 2 from transcript GSVIVT01003481001 (locus G SVIVG01003481001) derived from phytozome v7.0 (chr-ID chrU n; pos 10638100 to 10642259 reverse strand)
ggttgtcaagtaaatcccatggaagttaagtttgatataacaaaatggtggagaccgttgacaaatggtagttctcctccttataaaataagtgcactacaccttctaatccatggatataaaactaaatggcataccaacaaactcttttgtcattagagcccataaagaaataaaaaattgaatatggtccatggtttgtaccttataaattgggttaccttcatcctcaaatactcctctattcctatctagccaaatcacccacaagttagctaacaaatcacaaatccataagctctaactctagtttgtctacggctcctaaaaggaaattattagcattcatgagatttctatttaggccacctaatacttaccatgataacaagttttgtcataattcatatatggaaggatgcaaaagaaagagataattaattgacttgtcgcttctttgcataaaacatgtctattgaagctaagggctttatgagtatcatgatttgaaacaaattgtttgagaaatcccatggccacatgacttgttcctctagaattctgataaacccaagacttgaacttagaaccttttgtttgagagtaagagcatcttccaataaaaaattaattacttatctttatcgttcttatttaaagagataattttttttcctaaaaagcaaattagagaaaataataataatgtgcttagcaaaaaggatcataacctaagtacacgattagaatacaaatagtaccaatggaaaaggaaaacaagaaaacaaaaggccacatattggtctaacatagccctaaactatcaatgaaatctaaaagaggggcattatcaaactctatagggcctcaagatcaagcaaaaagacttaagtagaaaatttttaagctttaaataacagatgctccataaccctgaaaactctaccaaagaaaacatacaagctagctttcacgctgtcatacgttctctccatcagaagggtacaaatattaatacaatataccttcgtgttcaaaaagtcatgtgagttacagcacctgtcaagttttatatctctaaagtttctttttatgagaagagcaagaatcgtaattttatgtattttttctttaagaaatgctttaatcccaaatctcaattatactccctcagatttccaagaaatgtaggaggggattagtatcagtacatgattatgctttcataaattttggcctttttttaaatcatatccaagtggaaatgtttaattttcttcgatgtttccgaggtcattgcataaaagagagagagaagagaaagagagagagacataagtgggagagagatagagagagaggattgcagaagtgagagagagagaagtagaggggagctatcatgagcatgaggtctgcagcaagatctagagcagctgcgttgaggtcttcggcaagatcttcctgtgctcctggagtcacgaggtctgcagcaagatctttccatgctcccatacttacaaggtctgcagcaagatcttcccgtgctcccatacttacaaggtctgcagcaagatcttcccatgctcccatacttacaaggtctgcagcaagatctttgtgtgctctgggtgagactcttgacagattcaattctgtcaggcatcaaattctgtcatttatcaatttttgcttctttttcttccacttttaattattttgatttgattcctattattcatcacagatccatcttcgatttctaaatccattccttcaagatcttcatatgctcaagatgagactcttgatagattaggttctgtatcaggcatcaaacagtcatttttcaattttgtctttctttaacttttcattattggattgtgattcttagtatttgtcatagatccaacttcaataagaagtcagaccaaaagaagtccatgatttcaagaatattttgccttttgaagctttagggttgtaagttgatgtgtgtgtgtgtatcattcccaatttcatatcatttatttatatctttagacagttgtgcccatagaagttgtaagaactttgtttgtgttagtagtgcaactatgataaaacatacaaaaccatttttgtctaatcaattgcccaaatgaattgctatggatggtaaaatgcaagaacagggtggagtggggttcgttacattaagattcgtagtaggaacttggtataataattcaagggcatggtgagtcctctttcttcactcacacacaaccacagaaacggaaggggttttgctaattctgtcttgagttttagggtttggtggttgattagttttctaattatatatgaactaaccacttaggagagaaacaataaattgatttaatgtgctagtcatgctatcattgtgagatgttgcacctttcgttgggatcatattaaaatagcctttgaatgcactagttgttacttagtttggaaacatacttcttagggaaccatatatgaacatatcaccaagaggttcttggaagctcaattcaatcattaatgtaggttatctagataggattaaataattactatttttcttaaaagatctttgtattaaattttgattcaaaatggggattgataacccattttggggtccatggtgattgtggtaggttcacaatgttaggggtgaaacaataggttccttggtccttctgcactcctacatcccaagccattttagctttcgccttgccgtcctagcacctttaacttaattattttttttccttacaaagtgcagtcattggtttccattctagatgacaaaattaaatctgctttccttcatcttatcctttggtagtgctagcttcaaattcttatgaattcaattattcattttctatttccatcttttcttaccttctgcccattggtcaaacatcttcatgtctactacacttgttgtacatgtggatgttgtttcttgactacataatacgaatgcctagttaacatctataagcaatgcaaaaagattggggcctagttcagactatgaatatgaaatctctagtcttgggtggttatttatgactttgatgattatttaaagcacgaattagcaccatggtactgttaaccgttagcaaagccatagcccatgaatattgattggtaaacactaaattccaactgggccacatatttgacaggaacagcaatcgagtatccatggatgaatgaatagatactaggagtctttagatacaggatgactctgttagtcctgttcaatgtgatagaatattttggagagatttggatattcagagtatctgttcaatcagttattaccaccagaattttgaatttgggaagaaacatgctaatgtgtccatgcttggtcttgttaatgatggtgccattttcttggtcataatgatttggagtgtattagatattcagtgaaaacgaggattacccaccttattgttttgcttctatgtgtttatgctacttattttaatccttaaatctataataaaacttacagaatatatatttgtgaaaaatagatgaggatgagtagtgtttcctacactaaattctgattaatggaaaaaacctatcaaaaaaaaaaagaaaaaaaaatcttgactaatggaaaagcacactggttcggttcttaattacttgatgtatgctttggtttttggtaactattgatgttccaaaagccttaacaaccactagttatgataaaaacatggaagggtagatgtgctattgccacatttgtctggtagacatatttccaacttttatagacaagctaacacattgatgaaaagctcaatactatttattatcatcctcaaaagatccttacctttggctatgagaatggtgtcactctaagcaatcttaatattggatggcagattcagagacaaacaattcaaaacaagcttttggatctcttgaattctcagtggctggctccagtgctcgtcagacccttcttccagatcagatggtatccgtttacttcagtttgttagatattgtccaaatatctttaaatgtttttcatgatcataagtgaatatcctgcttcaggtccatattccaaggaagttgaaagcgcaaaattc

SEQ ID NO: 13665 - DNA, 18188 bp, Vitis vinifera
  Intron number 9 from transcript GSVIVT01013268001 (locus G SVIVG01013268001) derived from phytozome v7.0 (chr-ID chr2 ; pos 5948897 to 5967084 reverse strand)
aagaaggcaaggtatctaaactaattaatttcttcagtgctgttttaatctttggaagtttttgctataagaaagcaagttgtagtgatgaagccttcttaaagctaatataaaagattattccttttgctcttctataaaaatttgctaaacctaaatatcccaagttttcatgtatgaaaataatccctttttagtatatgtccatttatcattaatcaaaaggtacaaggttgctggattggtaagtgacaccataaaattaccatatttcggctgattctaattttttcttcttcacctaacattcttttttgcttgaaggttggagttactagtttctcttatagaattaaatgtattgtttatgactcttgtgtagacatctgctaattgttgtttagtagacacaaatggagttacaatctgcccgatctcaattttctcctttatgaagtgtttgtccacctccacatgcttagttttgtcttgttgggtgggttgaggtgtgagaaatattgatagtagcctttttgtcacaatggataattggtgatcctttaggcttcaatcatagctcttgaagaagacttatattccacaatacttcacaaattccctaggctaatgctcaaaaatcaacttaagtgcttgattgtgctacaacaaattgttttttgcttctccaagtccctagaaaagtacaatatcccatagttgatctttgatcattgattgaactagcctagtctgcatcaatgtaaacttcaacaagaagctgatcattgttcttaaaaaatggacccttatccagggtggctttcaagtagcttagaattcttttaattacttccagattgcactttagttagagcgcataaactcgctgataacactaacaacataacctatgtttggtcgagtgttggataaatacccagtttcttccaagagatcaagtacatactttctttggcaaacaactataccatgcttggttcttactacttctatgctgagaaaatgtctagaagtcccctcaaatctttatctcaaacttttttgccaaaacttctttaaactttggatttcctccaaattatcacctgtgacaattatatatttacatagacaatgagaacggtcattttcatgagtggcgagcttttaaaaatgatgtgtggtctttttgactttgtcaaaagtcatattccttttaagaattagtgaattgctcaaaccacgccctaggtgattgtttaagatcatactttgcacactgtcttattgttggagatcccttcaaatccaagtggaaaatccatatacacttcctcttgtaggtttacatgtaaaaaagacatttttaccatcgaattggaataagttccaatcaagattatcagatagagatgaatggattctaattgaattcatcttacccatcggagcaaatgtttcttgctaatgataccaagtgtttgccttgggactttttggatcatgtgttggagaagaaggggttcagtcctagatggaggaaatggatgagtggttgtttgtcatcggtatcttatgcagtctaggtgaatggaaacgctaaagggtgggtgaaggcatctagaggcttaagacaaggtgaccctttatccccttttttgtttactttagtcgcagatgtactgagcaggatgcttttgagagcagaggaaagaaatttgttggagggtttcaaggtgggtagaaacagaactagggtgtcccattttatcgatgtggaaggaaaaaaactcaacattccactataaaaaaaaactgattacattcccctctatatatatagatgataatactcatttattttagggatatttacaacttacctaaaaaaaaatcaaaactacctcaatcttagcccctaacattgttgacagatcatcaaattaaatcttcctatagttctacattccccctcaagctgggcggtaaatatttattaaccctagcttggaactcaaatcatcaaacacctttctcggtagagccttggtaagaatgtcagctgtttgaaagcatgtaggcacgtacaacatcttgattattccttcctctatcttctcctttatgaaatgtcgatcaatttccacatgttttgttctatcatgatgtactggattttttgcaatgctgattgctgactgattatcacaaaacattttcataggttcttcatctgaaatctttaattcctttagcacccttcttaaccatagtcccccacaaatgtcgtgtgccattacccggaattcagcttttgcattgctccttgataccactgattgcttcttacttctccatgtgactagattaccccacacatatgtgcagtaccctgaagttgatcttcggtcttgtactaatcctacccaatctgcatcgttgaacacttcaatatctcttctttggttcttctcaaaaaataatcctttacctggtgttagtttcaggtatctcaagattctatacacgacctccatgtgttcttcatttggattattcatgaattgacttaccatactgacagaaaaaccaatatccgatcgtgtgtgagataggtatattagtttacccactgatctttggtatctccctttatccacgggtgcacaattttccttagctcctagtttggttgttggatccataggagtatctgttggcttatacccaagcattctagtctcttttaagagatccaggacatattttctttgtgagacaaagattccctttcttgaccttgcaatctccatacctaggaagtatttgagattcccaaggtccttgatctcaaattctgcagctagaaaacttttgatggtgcggatttcctcttcataatctcccgttagaattatgtcatccacatatacaatgaggacaacaagctttcctacaggagagtgtttaacaaatagagtatggtccgtctgacattgggagtagcgatgtttcttaactacctttgtgaatctttcaaaccaggctcttggagattgcttgagcccatatagagatctcctaagtttacaaattttgttgcgtgtagtttgtgtctcaaatcctggaggaatttccatgtaaacttcttcagctaggtccccatttaggaatgcattcttgacatctagttggtggagaggccagtcaaggtttgcagccaaagatagtagaactcgaactgtgtttaacttggctacaggggcaaatgtctcctcatagtcgattctgtatgattgggtgaatccctttgcaaccagccgtgccttgaatcgattaacactcccatcttcattatatttgactgtgaagatccatttgcagcctactgggcgtttttcggctggtaattctgagatttccaaggttccatttttttcaagtgcatgaatttcttcatacactgctgatttccactcaggtgagccgagagcttcttgtatattattaggaacctggatgttgtcgaggttggcaacaaatgttttgaacttcggtgatagtttttcaaatgacacaaatgtgtatataaggtgttttctgcatgatcttacaccttttctcacagcaattggaaagtcactatcatcattagtttcgggattatagttacctgatggatcttcacttgatctagaacttgggttagactcttggggttgctcaagagatgcttgttgttccatctccttttggttctttctccttcttgagtaggtaatcaactcatcattctttgttgattgaatagtgtctagattttgaggaggtggattagtaggcggattgttggtttgatcttgagaaggagattctaggaagtaaggagactcaaagaagggattttgaggaggaatggattcatgatttagtgatgggcaggtgataaaacaaaggctatgaataattaaggaaaatccccaaaagggggggtgaattgggtttttcaaaattttttttcacacaataatatatgcacaaaataaataaaagaaagagataaagttagagaattcaaactcgggtttatagtggttcggcactcccttgcctacgtctactctcctcaatctcctaaccgagtgagggttccactaacttgaaacttcaatcaaactttcaatcttcttacacttggattccggctccaatgggctcttacacaatctcttcaaaatttgaaccacttgaaggctttcacactcagtttacacaaagataaaactctcaacctagcttaaggatggctcaagtacaagagaaagctaggatgaattacaagagtgcactaagaatatgcaagtgatggtttgatgcactaagaaagaaatgagagctttttgatcaagaacaggtaggtaggctttgaatgcaattgttctcttgtcaataaatgaagaggaactctcaatttataggtttctaagctcgggagtcaaaaacagcaaaaggcaacctcgtccagtcgatctaggggtcgaccggttcactagccgttggagcatttaatgcatgacaggttatcgttgcctcaatcggacctcaaccggtcctcgatcggacctcgaccggtaaaggaatcaccttgaccgggaagagaaggctactgggagagagagaaggttttgaaccttcttcgaccggtcctcgaccagacgacctcagccggtcgacctgttcctcaaccggttgattggtaagccttagcctcgaccggttgagcctttttggccccgaaaaacctattttttgatttctttcttttctaacacttagacaaggtctataggtgagttaatatgccaattttgaatcaatttgcctaaggtatatttgataatactcgggttttaaagaaaatcaagttttaaagaataaaccgagttttctaagatgcatgaaaaggtatgaacatcttaagtgcactcatgctatcatcttacattcatttcctatgatctcaagtcttccaagcatctcgatcttgtatccatttgatcctttgatgaattttcgagtctatacctgagattcttaaacattaaaccaattagttatttaaccatggtttgttatcatcaaagcccgattaggagaacccttgggctaacaacagggttggtcagaattaggagagaaatgaaatgattcttcaatatcccaaagccagtgttcctggataaaattagtctctccctgaatatcagatttggagaaataaggttgttgctcaaagaaggcgacatccatggagtgatagaactgtttagtgactggtgagtagcacttatatccttttttagttggagagtacccaaggaaaatatatttaagagctctaggatcaagtttgtccctgtgttgttgatggacatggacaaaagctgagcactcgaaaactttgaatgggattgtggagatgagatgagtattgggaaaggactgaagaagaatttgacagggagtttggaagtcgagaatacgagatgacatcctatttatgagataggcggcagtgaggatggcttcaccctagaaaatttttggtacatgggtagagaacattagggagcgagcaacatcaagaagttgccagttttttctttcggcaataccattttgctgaggagtgttgacataggaactttggtgaactataccatgactcaagagataatcattaagaatggagttgaaatactctttggcattgtcagttttcagaatttggatttttgcttggaattgtgtttggatcatggtgttgaaggttttgaaaatctggtttgcctctgatttttctttcataaggaatacccaagtgagtttagtgtaatcatcaataaatgaaatgaaccagcgagaactagtaacatttttgatcctagaaggaccccatacatcactatgaatcatggaaaaaggttgagatgctttgtaggattggttaggataagaattacgaatatgtttcgaaaattgacagatctcacattgaaactcatttggatttttattatggaataatgaaggaaacaacttctcaacatacaagaaatttggatgacctaacctatagtgccacaacataattgcactatcattattagactgactcacagacaaagaaataggactattggacactgaacaatcagaatgatgagttgctccttgaggaggatcattaacctctagaagatagagccccgaacacatcttagcactgccaattgtcttccccgagtccaagaactgaaattcacacagatttgagccaaatttagtaacacagttgagatctcgagtgagtttactaatggacagtaaattgcaatttaattttggcacaaggagaactgaatcaagagtgatgttctttgaaactctaacagaacctgtaccagccacctttgagagtgaaccatcggctattctctcagttaaatttttatagcatggattgtaagtggaaaaaaacttctcatctctagtcatatgatcagatgctcctgagtctataatccatagacttagcttctcctttttaacatttagagcactcaaaaattacccttttgtgccaaggaactaataccaaccacagtgggggcaggtgcaggcaaggattggctgaacaatttctgtaagacttctatctgttccttgctgaagggagtgggttcaggtgatggtttttcatccatggagacaaggttgccccgtccttctttgtcattggcaaactgggaaggcttccagtctgcaggtttgccgtgaatcttccagcaggtgtccttggtgtgaccaggatgtcggcaatgatcacaccatggtcgccctttctttggtctgtgatcattgttgttggatggatttcctctaactgcaagggctgagctcttaggatttgtcacagaatcttgagagcccatcatgatcttcttttgactttcctctctctgaacttatgaaaatgcttcccggatatttagtagtggtttggatcctaagattcttcctcgtacttcatcgagattcttatttaatccaatcagaaatttgtaaattcttttctgttcaataatctgtctgtacctgatttcatcacccggacagctccaattgtgctcctcgaacaagtccagctgctgccagtagcgattgagtgtgttgaagtactgagttaccattaactctccttggcggaagtcatggagaacactctccacctcgaacaattccgacgtattctcattgttagaatacgtttccttggcagcgtcccaaatctcctttgttgttccatagagaagaaaattttctccattgtcatttgtcatggaattaatgagccatgacatgaccatattatttatttattttgataggaaacgacaaaggaatatattgataaaaagaaggtacaattagaaggatgaggaatcctcccaacaaagagaaacaagactacaagtaatcaaatataagaaagtacaaaaagagaaaagtagacactctagttacacgccgctaaccaatcaagttgtaatatgttaagaggaatccccttaaaaaccttagaacaaaaagcccaaaaagaagtaagaaaacaaatagaatcccaaagatactcaaaattccttgctttgtcctaaaaaatccttgcatttctttcccgccacaccacccacattaacgtgatgcacgcattttgccataaaacaatccctctcttggaagatccaaaaccattaaaattactagataacatgtcagagatgctccttggagaaacccaatctatctttgctgattgaaataatctgtgccacaatcccatcgtcaaagagcaatgaaggaaaaggtgatctactgtttctccatgcttcatgcacaacttacatatgtcagggctaagtgctttgtagggtcttctcaattgtagcaagtcattagtattaaccttcttgtgagccaccaaccagacaaaggacttgactttgaaagtgacttgagcattccagacaaacttggtagggaaaactggaggcgactcagaatattgggataaggccagaaagaaagatttgactgtgaaaagacctgaaggagataaggaccaagatctcttatttggaaccgaaggtgatatgtgtagacgatcaaaagaccgcataaggccctctaaatcttctatctcagaatcataaagatttcgacgaaaattgaaattccaagagaaggggcgggtatatccaagaattgatgaaataggagcatttttatccgtgactacgctaagtaatcttggatattggactcctaaaggttgttccccccaccacaagtcatcccagaaccgaattctatccccattacctaccacaaaccgagtaaacttggaaaactcttggtagactagtgcaatggccttccaaggacaacgatgagaccatctaacgatgttgttgacatcccaaccattggagtgtgatccataaatgcttaaaataacctgatgccacagagctgaacccttcctaggatatctctacaaccacttccctaaaagagcgacattccttatagatatctttccaaaacccaatccccctctcgatttcggcttacacactacgtcccaattaaccaaatggtctcttttgccttcccctacgcctgaccataaaaaatctctttgcattctctcaatttttgctaccacagaggcgggaatcttaaacaaggaaagaaagtaacatggcatatgggtgagacaagattgaatgagggttattctgcctccaaaagataaatatgccttctgccacccatctaatctctttgatatcctctcaatcataggagatcccaaaagccacacgccttaggaatcccttttagaggaagacccaggtaaagtataggccacccagaagccttgcagtcaagcatctcggccaacctagaaaggtgattctgctcaagattaataccatagatattgcttttgtcaagattaactttcaaaccggaaatatgcccaaacactagcaggacattcttaagggtcatcatatcctcctccctagagctggaaaagaaaatggtatcatctgcaaattgtaagtgggaaacccttgttctgttcctacccaccctgaaaccctccaagacgtttctctcctcagctttcaataacatcctactcaatacatctgccactatagtgaacaagaacggtgataaagggtctccttgtcttaaacctttagatgccttaacccacccttttgcattaccgctcaccagtactgcaaaagaaaccgaggacaagcaacctctcatccatttcctccatctaagaccaaaccctttcatctccaacacatgatccaaaaaatcccaactcacatgatcataggccttttcaaagtcaattttgaatacaactccttccgcccctgatcttcttttctcatccactatctcatttgaccatattatttttggcatttcagactttgaacttttcatctgttttgttcggtttggcagcaactccattgagataattgtctttgccctttccgcatatgaacatcattacagaatgggaccattagagatagttgttcccaaaacacttgaatgagaacaccatcatattgcgaatactgcttgactgaacccattccatccccgcctgagaaaaggtcctatgctacaaacccaaagtgatagaacagtgcaagaagagatgatcaatcgtctcactacttcccctgcagaggatgtaccaatcagggttaagggctttgaaaggcactaatcaggtagaaagttcattggaacccttgtttttctcgacatttgaatgattgggaggtggatgaagttgtggatttatttttatgattggatggtttggcaattgataaggaagggaaagataagatggtgtagatgaacttggatattaataagttttttgttaagcaattttatacagtcttggaactgagggttgttatttcttttctaacacagttagtttggaattcttgggtcctttatagagttaacttttttgcttgggaggcttcatggggaaaaaatttgactttagattagcttcaaaaacagggtggtctttagtcaataggtattttctttgtaaagaagatgaagaatccatagatcacattctttttcattatttatcggttacgattctctggaagtagttgtttgatttttttggtatccattgggtgtaatctactacagttaaggaggctttatcagggtggcatggttcatttgtgggcaaaaaaagaaaaaaagtttggagagcaactctattatgtatttttttggacgatctagaagggaagaaatctcagggcgtttgataacgaggagcgttttgccttttttttcctgcatatattctttcttaggaatttgttcttttaggtgaagcagtagttagagatggtttctttatctttctttgattttattgagtggcttggttttggttgaggaagggagttgttggggttctttcctagtttttgggcttttaggcgctatttgcatatttcatgtctactttgtggcattcttggagcgttttttattaaaaaaaagatttctatgaggaaacatattttgtagcaaatcacttggaattttcatattaagagcttttgaagaattttcattttaagtgcttttgaaggcatgtgattgatcaaatatgtagctatcaaaacaacatcatttagtagtttttttggacattttttttttgtgaacataagagcatttgccttttttttattttattttataatttttaattttttatcaaaaacaaatgatatgtattaaatgataaaagaaacatgagaaggatgaggaatcctccccatgaagaacaagcctgatcgagaactaagtaaacctccactaaccaaggaaggctatacaaaaggtacaaaaggccgcctgatcaaaagaactaagtaaacctctactaaccaagggaggctatacaaaaggaacaaaaggcctatacaagtaaaacaatcctgaccctatagacccaactttggggtgtacataatggaagctaactaagttggattacactaaaaggatagggcttaaaaatgtttgtacagtgtgcccaaaaagacacccattcctatcttagccaccccattttgtcaaggtgtgtcattgcatgaagaaaagcttacaatgccattttcaagaagataaggccctaaaatggaattgaaatactctcttctattatcaattttgagaacttgtatagctgaaaatgagtttgaatcattttgtgaaagtttttgaatgagggggttaaatttggattctgccattagcaagtaaatctaggtggctcttatgcaatcattgataaaactcataaaccatttaaaatcagaataggatagggttcttgagagaccccaaacattactatgaaggataaaaaatgaacttatgatcttttattactcagaggatataaaacatgatgactctttgtcatctcacaaatttggcattgggaacttaaaggttcaattctagcacttggtttaggaaacattaatttaaaagacatgaaatttggatgtccaaaatgaaagtgtaataaccatatctttacttttttttttctctagatgcttaagaagtctaaaccctttcattctctttcactttaggaatcctgcaataaggcccttctctctccttagcattgtaaatcttcctccctataatcaggttcgaagaaacacaatgagttagatataactttacacaacaacttatagagacaaaagatgagaaacaatttttggaagatgaagaattgaatcaagagtaattaatcgaaagattgaaatagaacctttaccactaacaaggataaatgatccattagcaatagtaacctcaccattatttaaaggtagactataaaacaagaaacactcttattcgtttgtcatacgattagatgtgcctaaatcaatgatctagggtttgaagaaagattgttagatatattcaatgcaaaatagatattatgtgacttagcaaaatgggaggaaaggttagatgacgatccattgaccttgtatctcatacaatagctttagttgatccttagagaagggactgtagtttaatgattcaaaggttgtcatagtttcaagatcatctgcaatagtcccttggaaagctttcttgaaaggttccttgcctcttttatcatgaaaaggacgtttcccatttaactttcaacgagtctctcttgtatgctttgtcttttgacaataagcacaccaacgagtatctttttcgccagattttttttttttttaccaaaatttagagagagggaggattcctcatccttctgttgtaattcttattccctagttcaatatatcactttcttgtttctcatcaaaaaatttgtagatttgagcaatatttccctttttttgaataggtatgtgacatagcatcccacaccttcttagctattctttggttgcatggggtttagctgctatgacatgaccattgaattttttgtacttgaggtctcgaatttgaggtctgattctttgggcctttgatgattccaagcacatctttcatcttccctttactcttcatgaaaagtttggtagattgggaccaagaggaaaaattctctccatttaacttttttgttgtaatatgaagtgtgggattttcaaaattggtagtaattttgggtggatttgaagaagaactagaattgaacttatttgagattgccaacattatcaatggaagagagtataaattggcaatgaaggccagaaaaaaaccttaaaaggaaaacgataatggaggctgagaaggagaagaaatcattagaaaaatttccagctttgatactatgtaagttggatttagaattttgaataatttgttcttatccattctcaacttgtatgtaattatttgaaactggtgactagccaatcctttggtcaacacatttgctagcttagcttttcatttttattaaagcaaaattcctttcctggagtagatttcaagtactgtagaatcctgtataccacctgtagatgaacttccttgggacaatgcatgaattgacttacgacattgacaacattggctatatctaaacttgtgtttgtccagtagattaaattcccaactaaatgttgatatattccatattctactactacattttcttgacctttccctagcttatgattttttattttatttttagtaggggtctcaacaggcttacaaccaaacttacatgtctccttaagatttaaaatgtatttctattgagagataaaaatacccttccttgggtgggcttcttcaatccccaataaaatacttgagtcttcacaaggcttttatcttgaatcctttaactagtttcttcttgagtctttctatttactttcatttgtcatcgacgtaaactatgatagcaataagtttacccatatgtgagtgtttgatgaagagtgtatgatttccttggctttgtcaaaacttcatgtcattcatggcttttgcaaatcttctaaaccatgctcaaggagattgtttacagccataaagtgccttccttagtctacaaatatcgtttcccttgaagtctccattgagacctgatggtgtttccatgtacacttcttctaaatcaccatgcaagaatgcattcttaacatcaagttgctgcaaagaccaatcaaagttagtggccaaggatagtaatatatgaatgacattcatttttgctattgagttcccaaactcagtgagaaatttgcttcttgaatggaaaattaagggcctagaaaagaagaggagtgtagtttggaaaatggcgcctatttgtttgttttggtgtatttggggagagcggaatagaagaatgtttcaagaagaagagaagtcagatatgagtctaaagaatctcttccttcgggctctttttgaatggtctcaacaattcatggacgtggactatctctcttttatgaatatgttgggtgtttgacttgttggtcatctttggcttttctaggtttttgtttcctccttttttgccttgggtgaggccttctttgtatactgccggtgtacttagggagcgccccctgttttggcgtgttctaatatgatttcttctcttggtttatcaaaaaatttttttgctattgaagcaaatgttttttggttgtccaccttaaaagtttgcatactcccattagccagccaatgtccttatatatctccaatgtcctgttggctctatatttaattgtgaacacccattaacatccaattaattttttccgtttagtaattcaactattctcaagttttgtttttttcaagagctaacatcttctcttccacgactttcctcccattcttgtttgtaagttcttcttgaattgtttgaggaatttcaatagaagttaattaggtaaagaaggctctatgtgatggggataggttttcaaatggattgaaattggaatctggatgttgaatgcattttgtggtagctttcctaagggtaattggtaaatggagatcatgaaacacttgtgaatctttgttttgaacaaattgatcatgagtttttttggtgagagcaacaaatttgaagtaagagaaatgataccggaaacaaaataagtggagtttgtgtgaacattatttggcccaagttcagattcttgagcttgcatttgatcaagttgagaccacttctgcctagagtaaatctatagttgaattaactcccccttgatttgttttttatgtgggtttttgaccgcgcgacaaggaggtagaacctataggtgggactttggatgtaagtggcttgtatttagaaagtctaggaaaatcaggcaaatcataagagagaaacttatcttcacataagctctcccaatgaagataagtagtaggaaaaatgattaattttcagcaaaagtgacatccatgattgtgaaaatttttcgagaagttggacgataacatttataatttttttggttggaaaatatcccccacacattttagagctcggggatcaagtttgttgcaatttggaggacatatatgcacgaacgacacacaaccaaatattttgggaggaagtttcctagagctattaaaatgtgggaaaaacatttgagtgtgtgtctaatggagtgttattttcaagtacttttgagggtagtcgattaatcagataagttgcagttagacagcttctccctaatatgatttagacatttttttctgaaaaagtaaggcttgggtaatttctaatagatgcttatttttcctttcagctacgtcattttgttgtagagaattagtacatgaagattggtgtataatccttaatttttttaagaaaaagagagaacattttattaaagtactcttttctattattagatctaatgatttttattttaactttagtgtgctaaccatgttgtgaaagataggaaacacaaaactaacatctaattcatttttcatgaggaataatcaatttaccataatacaatcatcgataaaggatataaaccacatcgctctaaaaagacttaggatttgagaggcacccccaaacaatagtatgaattaacaagaaagaaaatgctgattttatattactgaaaggaaacaaaacacgatgatgtttagttaattgacaaacatcacaatgaaaaatgttaaacatctaatttatcgaatagtgaaggaaaccttttttttggcaaaggaaatgatggatgccctagattatgatgatgcaaccatatttgggctttatccaatgagaacttttttgaaaaatgagagagtggcatacaatcaccattgccaaaactggatctaagaaggtagaaaccctccagttccttagcgtgtccattcatcctccctgtggttctgtcctgggtcacacaatgagatgggaaaaaggtgatggtacaattcaaatctctagtaatttgattaattgacaagaggttagctgaaagttttggaacatgtaacacgaattttaatgtgagagaggaagtgaaggcaatttttccttggcctgccatggttgctagtgtgtcatcaataactctaatatttttatccccaaaacatggattataagaagataaaccatgtgaagaataagtcattttatcaataacacctgagttgaggacccaagtgcttggaaaacagtcatttgaaacaccaagagcatgagaaatgggatactcacctaattgggtaagaaaacatgaagcagtaggcttatccattgaagttagaaggctatggagcttctcaatcttctctgttcaatctaacagtatctaaatcattagaagctgagatttctggttgctaattctctttagattgagtaatatgggcttgaccactccgctgtccaaattttgcctatcaatttccattccctctaccaaataagtgtgactttccatggagtttctagctagtatccttggtatgcattggtttcttacaatagacacaccacaagccatctttgttgattagagatctaaacacttcacttcctccataattgctatttggcagtgtggagtttggcttcatagtgataagagttgagtcttccattgttggagtgttaagcataacactcctctttgccactcttataatggagaagacttcatttaggggaggtagatcttcatttccaaggacctgaacggacttgatcatattctacattgagacctgccaagaaatcaaatatcctttccctttcaacatatttgagcatcatggcggcatctttgctgcagttcatcttaatattctaatagtaaatctaattctagccataagcctttcatgatattgtagaattcaataacaaaaaaggtaccctacttggtagcactaatcttggtctttattttatagatatgggcaacatcccttacttcaaagtatgtttgcctcacagtctcccaaatatctattaactgttgtcaagaccatgggcaacatcccttacttcaaagtatgtttacctaacagtctcccaaatatctattaactgttgttaagaacatgtacgtcctgctgatctttggttgcattaaattccagagccatgatataatcaccgagccctcttcatcccatgcaataaactttggatcgttttcacttgagacagatccaatttgacgacttagttttccctttcctttaaaaaacattcacaggagttgagatcacaccaggtaattgtgcccattgagtttgaatgaattttgcacattttgatattctgcagaagggttattgcttgtcaagtgggagcaaagtttgaagattggatgatttgtgatctgtcaacatattggagcaaattagaaacaatttttgtaaatttgagatagggaaaaaaattaatgaggctatgtaggccaaaaaattcaaaggaaggagatgaatatcaacaagttctgctgttggaaatgaaggctgtataagtgcagagaaattcttatcaattaaggctgagaataggaaaaacttagggtgcaaaggagggccctaattttgataccatgttaaattaccaatttttctaaaagctttagcttatatgatttgggtccacaatgtatatcttgtgccagcattaaaaataaataaatagaataaccataagggaatggaagttttgtagaatagaagggaatgctagataggttcacttctttgtttttggggctattttttttttgttggctaataattctattattttcttttgtgttgggttggtggtgtgggggaagaagcattcttatttgattttccatattgtgatactttatagttcataaacagggtatggttcttggctttacacttactaaggacatccatctgtgttgcagtggcagattgtc

SEQ ID NO: 13666 - DNA, 1620 bp, Vitis vinifera
  Intron number 1 from transcript GSVIVT01019488001 (locus G SVIVG01019488001) derived from phytozome v7.0 (chr-ID chr2 ; pos 1050727 to 1052346)
tcttgcagggcttgcgcgattgcgttctcaacaaggtatcttctactgatccaaccaccggtctctatctttgatcaattctctgaatttgataatcttttgatcttcatttctttggttgtggttttctgtgttcgattctaaaattgaaaattgattttagccatagattcgattttttctggctttgtgtgatcgaaagtctaagaaacattgagattgagatggaattatgctttttttgacatatttgtggctaggtgctaattgtaaagagttttgttgataattggaaaatttgaaggttggagtactaaccatatgttctgtgtgactgtaatgagaatgtagagagttgaaagcagttatcttctcatcctgcattttatattttatgaagtatttgatactgaaaggtatatgatattgcttgttcattaggatcctgaccttcagttattggtgatctgtatgaatctcatcttgtttgtttttggattatattctatgttaaaagtgtttgtattttttcaaacatgaaaagcaatagcttaatattttgctaaaattgattgattttgcaggaaatgttttggatacagtttttttgaaaatatgttactctgttttttttaatggaattttcaattttccaagttaccaaacattgaaaagacttactcatttttactaccaaacaagtcaattatgttttcttccttatagttaatcatttttctttcaccggtgcttcttagttctcacaatgcagcttgattataagaataaaaagtatctaattcaccttcttccttcctggtagtggttttatttcatttcattctaaaagatgctactcatttgcaccatccttattcaaccccttgctcccctaaatatatccatagttcaggaatggctccaaataatgtagttatagattttagtggtcttagttgtttgtgagattctggatagtagactgaaaactggtaatttgccttttgtgagattctgattttgtagttttgagcattcgataactgattgggcataattctttgatggtcatccccctgagtcaacagtggctttgagtttgtgaattccacccaagatgcttgcaatgtaattaatcatagttcaggaatggctccaaataatgtagttatggattttagtgctcttagttgtttgtgagattctggatagtagactgaaaactggtaatttgccttttgtgagattctgattttgtagttttgagcactcgataactgattgggcataattctttgatggtcatccctctgagtcaacagtggctttgagtttgtgaattccacccaagatgcttgcaatgtaattaatcaaacatatgtatcagaagtgcaaatgataattttggaattgattttttaagacctataagttaatcttgcagttgttcattttgtttactagccatctatgatcctccttcttgcttgctcatatatatactgctgtttttttgtgatttccctttattgtatttgaaatcgattccttggctttattcttccctttgctaatttctctgcagaaagtgaaaaagttctctctagctgaccagaatca

SEQ ID NO: 13667 - DNA, 11207 bp, Vitis vinifera
  Intron number 3 from transcript GSVIVT01023967001 (locus G SVIVG01023967001) derived from phytozome v7.0 (chr-ID chr3 ; pos 2069958 to 2081164 reverse strand)
acagaagcttcgcgcatcgcctcgccgcttctaaggtattctttctcgaaaacccaattctccctctgtttatttgtttgtttgtttcttttttctttttgggtccgggaggtgggagttgtggtgtggtttcttggttttaagatcggtgcattctgattcccgcaatatggaaaacctaattcatggtttggttttctgatagcgaattttgttcggtggtgttgtgtgttattaatccggttattgtgttgggaggaggaatgatcttgtttgttgattatgtttgtgatctgttagttgggttctgtttggttcgttcctgggaaaaatatgaggggaaagaagggaaaagcttctttgagtatttttcccatgccttttgttattttcccggggagttggtagaagttgtaatcaatttggacattgagtaattttgcttttgtgaattattggagtttgctttctgtttggtagatgagaaaagaataatctatggtttaattctttttttttttttttcactaaactttcttggtaagaatggagttttgtttggagaagtagttgaatctattgctttctgcattgacacatgcttctccatattagtgtgttctatcttcatcacgtggagctactaaactttttctttgtttgtgccttgatatgctttttttaatttagcatctttgcaacttaatgtgcaaatgacatcttatttatgcttggagcaataccatcagaccaagctgcgattcacgtgggatatatggactgccagcttcctctggtatcattcttttgatgatgaggaatccaccctgacagggagacattaatcccaactgccattatagcaaaccccggttgatatgggcccatctgtttaccctatactaatagaccagggaggctcaaatgcaggacctttggttcattgccaaggggcactaccgctgagctacactttgggggcagcttcctctgctatcattttcatctgatgggattgtttcagcccagttgccatcattcaatgtacccttgaagccatttcagtttcaattgcttattagtaagtatatgaacctagtgccccatatttaacggttttactggaaagattatgaaagtcaggcacattaagactcttggtatttagtgtacagggtgctccagagcttcatagtggcatgtaacctctgatttagccttgtaatgtgaaagaatctgtgaatatgaaattcaccatgattctttttattttttattctttcataggtaatctttgttttctttctttattttttgataggtaaataagcagaatatattaaaagcgcttgcaaaaaggcgcaacaaagtacacacggagtatacagatatagccccaaaggcaatcaagaaaagaaaagagaaagattaaaacccaccttcccaccaacacctagctcccacgagggttggaaaccccctagtgaaattccaaaaagagaaagaaaaaaacccctaccctttattgttacatggaactgaaactagaacctcctctatgggcatattattcttcttctgcattgatgcttgtaattcacggcaatagtttggcattgcaactctctctctctctctctctctctctctctctcatcctgccctcagtgtttacacatgtatattgtattatgtgtatttgtgtacatattggccttttggtccttgttatttcattaatcttctagctaatgcttttgtttttgcctttttttttaatccaaaagtactaggctgaaacccgagtaagggagatggtttgtgcctttaattgttctcattacattatttattttttccaatattgctttacgttgcatgcttgcatatgccaatctgatcttgaacagttgtacttgtaatattataacatagatgttataggttttacttagattgcctaggcaacaagcataatttttgcctgctcattagttgttttgatgactcatgagtgggcatcgtttcttatgaagtgttatggttatggttatggttatcaagaatctttcggcttcatattctcaaggtagtgattgtgccaaattgtttactttctggtccttcatttgaatgatagtaaggttaagcttgagatcccttgactcttatgcaaatttgtttgaactgaaagcataaggagctgtggctattttttatgtcattcattagtgattcagctattttccaaaaaagaaaaaaaaaaagaaaaagaatgtggcgcagttatcaattgagaaaaaaattccactttctctgacttgacatttatagaactaacttcatacaagtttgtgctcaaattttacctcacttgctttctgaaatagaaaatatttttttccttacatgctgtgaggatgagaattgggaaactggtgctaaaatgtgtttttttagtgttgtccttgaaattttacttatttgtaaacaaagacactttgatgcagcacacaatcatcattagtttttatttttagcttcctacatcattagtttctattttagattagtttacatttccattagtttctatttttagtttcctacaccattagtttctattttagattagtttctatttcctacatcattagtttctattttaggttagtttctattttctacattattagtttctattgtaggttcatcattagtttcctatttctttcctagttttcctagtttccaattgccttggtttcctatttctagtttcctatttcagttatttcctttatttttgcattacaaacattatttaaaggctcgttgtaattgttagagaggagttcaatatattagaattattctctaattttcagatcctattgtgatctatgtgttggttcttgagtgtttttttgttttgttttgaaacaaaccttctgctgcataaaaattggtatcagagcaaggaatggctaacgacggttctagtggaaaacaaaccatcgataacgaacgatggttcaaaaaaatcgagcaacgacttgacgggatcgacgagactcttcgcaacctcatgcagatggtggttatgttgactatcgaagggaaacatgaacccatggagtgacaaccaaaccaacgtggcgactggcaagagggcaactacgacaaccgacgttggccatagatcaggttggaaatcgatggcaaaggcgcgattcacacgagtccaaccgcaaatcgcgattttcacgagccctatttgttacgagtgtatgagggtcgaaattggggagctcctaggcgtcgtgatgacgacaacctccaatgaggggtttttgatgaacaagatgagttttgtccaccttttcgagatggtgatgattttcgacttccacagcaaaggaatattcaacaaaggcagcaacaaaggttggattgttcatctggagaagatgattttcgtttcaattatcgggctaacaattagggtcaaaataactaagaatttaggatgaaaatggatttaccaagctttgattgtcgactacacattgaagattttctcgattaggtccatactgtcgaaaactttttcgactatttgaatatttcataataaaatcaagtaaagctcgtggcatataagttgaaaggcggaacttctgcatggtgggaacaacttcaatataatcatcaacgacaaggaaaacaatgtgtttgtacttggcccaagatcaaacggttattacaaaggcgatttctcccttcggattatgaacaatttttatatcaacaatatcaaaattgtcggcgagccaactggattatgaacgaatacatggaggaattttatcgattaaatgctcgagttaatttgtttgagacggaggatcgattaatagcttgttatattaggggcctaaaaccggccattcaaaattgactggctcttcaaggggtttggaccatgatagatgcaattaatttggcaatgaaagtggaaagtcaaatcaataggtccacagtggtcactcagggtaactttcgtcgaccaacccaagaagcttctcatgctccaaatgggtcaacaacttcaggcagcaatgataacaacaataaagatgccccttcacgatcagaggaagccttaaaaggctttccttaggcaagacccagttggaagtgggtcgggcctgtcttttcgaaggaggggagaatttcctctcttctcctagagaagctcttcacgattggtgccctagctttccgtccacggcgatgggtcctccccaaggccttgacccttgtgcatcatttccgatgccttcggagttgaacgcaaatcctctagcaggcatcgctctcttagaagaagttctcagattccaaggtatgctctcttcgtctcgttcttcttgaggggaaggccttcttcttcttctactcctttctgggtgtcggattcttctgctttgggcaaagattgcagagggacaacattgtttctgaagcattggggaggatcccttgagtgggaagagggtgtgctagaggtaagggccgacattgtaaaggggccttcatctatggttctgcaagatgggtcagaggtggttttccctgagaatgcttcctccgaagaggatccgccctttgacaaggagctttccaatttctaagatttcagtagatttctaggaatgctggttgagggatttgaagaaaaaattattttgctgctaaagaagttgaagaagatgactggtggggggaccctctgtaaaaagagaaagaagaaagtggtgtctgcatcacgctctgaaaagaaacttaagagactggattgtacggttagctatggagagcctacgcttgcgaatagaaggagtggcaggaacaaatgggaaatgatccttgtggattgatgaagatcaaaatcctctcttggaatgttaagggctcaaggacaaggagaaaaggaggatgattagctcggtagttagagcccagaaggcatatttagtttgttttcaagaaacaaaggtgcaggagatgtcgttaaaggtggtgaaaagcttgggcgttggaaggtttatggactggggtgcaattcatgctgggggtgcctcagggggcattctatttttttgggacaataaggttctagagctcttggagctagagcgcggaggttttaccatctcaggtcgctttaggaatgtggaagatggctttgtttgggtgttcactagtgtctatggactagtcttatcaagggaaaaaaaggagttttgggaagaattgggtactattaaaggcttgtgggatgatccctagtgtgtgggggggatttcaattccattagattctaggggaaatgaggaatgggcttagtctgacagtagagatgagaaggttctctgaggtcatcgaggagttgagtctaaaggatccgccctcttccggtggttagttcacgtggtatggtggtcctaattctcaagcagcttcaaggttggatcactttctaatctctaatgagtgggaggatcattttttgggtgtctttcaatgtgctctccctagaatagtctttgatcactgtcccatttccttggagggcagggaggttaaaaaaggcaagactcctttccgctttgagaatatgtggcttttgtcggatgggttcaaagaactaataaaagtgtggtggacagggtactcggttgcagggtctaacaaccattgccttgctgaaaagttgaaagctctcaaaagggatctaagaagatggaataaagaagtttttggtaatgtctctgctagaaaatctgaggccttttctcgaattcagttttaggattcaaaggagagtgttagtcccttgtcttttaaggaagtagagactcaaacgggggatttggaggagtacaagaattgtgttttaatggaagaaactttctggaggcaaaaatcaagggaaatctggttaaaggagggtgataagaataccaaattttttcataagatggccaacgccaaggcgagaaaaaactttttatccaaggtgaatattaatggggacactcttactagtgaggaagatatcaagtttggggtgtgtagggcttataggactttgttatcagaaactgaggactagagaccaggaattggggatttacaatttcgtgttctggggacagaaaggtccagaagtttagaggagcctttcttagataaaagaagtgttcgaagccctgtgcagcttctccagagatacctggtccggatggcttcaccatggcattttggcatttttcctgggattttaccaaagttgagattatgacattttttggtgattttttccgccttggcactatccaaaggagtctaaactccatttttcttgttctgatcccaaaaaaaggggatgcggaagagttgaaagatttcagaccaataagtttggttgggagcctttacaaatcactcgccagtcttggcaaattgatgacgatgaatcttcaagatatatatcaagagagagaattagtattagttgtaattaaagtagaattaatattacttagaattaaattaggattaatatttgttggagtctaattaggattagctagttgagttataatataattagaatttgagtcatgataggttattagagtcctaataaactttggatgttataattagaattagaatcataataggttattagattcctagtagactttaatttcttagagaagcctataaataggctaatcagtgtaaatcaaaggaatgaatttgatgaataatattatactttctttcattgcaaggttgcaaccctcaatggtgagactccattgattttcttctaggtgagactcctaaaaggccttagtgagattctaaggttttccatcttttcttcattgtttcttctttctctctatttctcatcttataattttctctaccataaaatttattccttattcctctccttacaccctaaaaataaaaccctagcccacctacccttgagtgtaggcaaccctcttagggttgtcctacatcacaaataggctgaaactagttgttggggaggtggtttcaaagtactaacatgccttcattcagaataggcagattctggatgctgtgctcattgcaaatgaggctgtagactttaggttgaaggataatctctcgggtctccttctaaaattggacattgagaaggcgtttgatcatgtcaactgggactgccttctgtcagttatgtccaagatggggtttgggcagaggtggattaattggattggatggtgcatcttcacagctaatttctcaattttaattaatgaatccccttcagacttttttcgcagcactaggggtttgagacaaggtgatccgttatccccttatctcttcttattagtcatggagattctcagccagttgctcttcagagccaaaagcgggggtttcattgaggggtttaaggtgggaagcagtagtggaataggaagggatctacgccatcttctgtttgctgatgatacccctttattctgcaaggctaatagtgagcaattgcgttacttgagttgggtcttcttatggtttgaggcgatttctaggttaaaagtgaacagggataaaagtgaggctatccctgtaagaagggttgattctttggagaatatcgttttgatattggggtgaaagattgggaagctcccttcttcttacttgggcctacccttggatgctcctttctaatcctcaagggtgtgggacgtagtggaagagagattcagaaagtgtttgtccttgtggaagcgacaatatctttctaaagggaggatgcttaccttgataaagagcactctttcaagtctctcaatttactttatgtctctttttgtcatttcgcggaaagtgtgtacaagatttgaaaatatcccaagagacttcttgtggggcggtggcgccttagagaaaaagatgcagttggtgaattggagtgcggtttgtgttgatatgagacaaggagacttaggtattcacagtcttgtggccctaaataaagctttgcttgggaagtggagctggaaatttgttgtagagagggattctttgtggaaacaagtcatcatagacaaatttggggtagaggaaggagattggtgttcgagagaagtgaagggagcctatggtgtgggagtgtggaaagctattagaaaagattgggaaaacattcactctagatcctgttttgtcgtagggaatgggaggaaggtcaaattttggaaggatttgtggtgtgaggaccaaattttgaaagatgctttccctaacttgttttgattggtggtcaacaaggatcagtgggtgtttgatgcttgggaggaggatagagaggtgggaagttggaatcctttgttttcaagacactttaacgattgggaaatggaagaggtggaaggcttgctccggaaactccatccttcggttttgaatagagatgcggaggatgtcttgagttggaagtatagcaagaacgactccttttctgttagatctctctactgttccctcacaaaagcctctaatgacccttttccttggagtattatttggagatcttgggctcccatgagggtaagcttttttgcttgggaagcgtcttggaacagaatcttgaccattgagcagctcaaaagaagggattggaatatgccaaataggtgttacttgtgtaaagtggaagaggaaaccagtgaccacttgatccttttctgtaagaaggcttcaatgctttggagcttgcttttcaatctttttgatgtgcagtgggtcctgcattcctcaatcaaaaggaatttgataggttggcatggtgcttttgtgagtaagagaaaggaaaaggcttggagggctgcccccctttgtttaatgtggactttatggaaggaaagaaatgaaagagtgttcaatgacactgaacgatccaaccaagttttaaaacttttttttttgtacacttttgtgaattggggtagggtgtatttagaggatcattctttgtccttgattgattttatagagtggcttttgtctagataggtgaaaggttttcttttttctttttgcctagtttcttgggcattgcttgtatacttcatgtgtactctttttgccttttctaggcttttctaatacaatctcttatttacctataaaaaaaaaaagatgccccttcaactcaaaatttgacacagaatcgaagtgaaacttcaacccctgttcgatctaatactccaggctgaaactggcaacaacaacgaatcaataatgacccttatgcacgtcgaaatctagggaactgtttccggtgcaaccagccaggccatctttcaaataattgcccaaatagacaatttgttaactttttagaagaagatggcagcgaagaggaacgggttcttgaagaagatatctatgagggtgttgagtttgcagaaggagatgtgggagaagaagtgacatgcattgtccaacgacttttgcttaccctaaaaaagtcagacgactctcaacgacataaaatattccggactcaatgcactattcgtaataaagtgtgcaacgtgataattgacagtggaagtagcgagaattttgtttccaaggctttggtgaaagcactaaatttgaagactaaggaacacccttcttcgtacaagattgcatggattaacaaaggcatgaaagttcaagtgctagaagtttgcaaaattcctttgtcaattggaaagtattacaaagatgagatcgtatgtgacgtgctggatatggacgcttgttatattttattagggaggtcgtggcactatgatgttgatgtcacttataagggtcaagataatacttttgttttttggtggtttgacaagaagattgttttgatgccacagtctcaatcgtcagaaaacaattcggttactaagaaagataagccgttattcaccaacatagcgagcctagatttctttaagcaagtcaaggagccgcacacatgtcctctagatgagttttctttgcaatcacaaaacttgaggacgagttttcttcaagtggaggggattgaacacaatcatcattagtttctatttttagcctcttacatcattagtttctatttcctacattattagtttctattgtaggttcaacattagtttcctatttcttttctagttttcctagtttccaattatcttggtttcctatttctagtttcttattttagttgtttccttgattttttcattataaacattatttaaaggctcgttgtaattgttagagaggatttcaatatattttttcagaattattctctaatttttagatcctattgtgatctatttgttggttcttgagtgtttttctgtttcgttttgaaacaaaccttccattgcaccacacttctttttgtcagacatatttgcaggcgccatagtttgtcttaagatttagttccatatgttactgtgctttataatttcttttcccaaatgtttacctgagatgaaatattaacttcatacaagtttgtgctcaaatcataccccaccgctttgtgaaatagtgaatgttttttcccctacttgctgtgaggagaagaattgggaaagtggtgctaaaaagtgtctttttagccttgtccttgaaatcttacttatttttgtaaacaaagacacttatttttgtctgacatatttgcaggtgtcatagtttgtcttaagatttagttccatatgttactgtgttttataatttctttcccaaatgtttacccaaaatacaaatatttctctaacaaccctattttggtttatgggtcggacaataatttgtacatacaaagaaacaacttattgagaaagtaggggaaagatagaaaggactctttggaatcttgatttcttcatcctatgcctctgcagaaggtcttttatggcagtatggtcagccctgtgaaaagcattatttttttttggtgtgctgaaattccatgtgaaactacctagaaagatgtatttagatggttcttttctgtttcaggatcttgtgcttcaatttgatatctataggaagct

SEQ ID NO: 13668 - DNA, 3036 bp, Vitis vinifera
  Intron number 2 from transcript GSVIVT01022271001 (locus G SVIVG01022271001) derived from phytozome v7.0 (chr-ID chr7 ; pos 18051036 to 18054071 reverse strand)
gagtgacaaccgtagatattgtggcatacctgcaggtatcttaactttcaaatttcttttataactgctctttatagtttttcattgtcattgcaatgatgatatactattactttcttgatggttatttcttctttcttttaaggttaatcaaccccatagtgtaatgcatggtttgaaatgctgagtcacatccaaagccataattttgaaaggtttcaataataatttcctgcacaagatgaagagggctttcataagaaccaactttgtccttgcttccacattaagctctttctaaaccagaagctatgttaataaattgcccaaataggcaactaagctctttcagtttttggctttgtagaagccaatccagacaggtcctttgtgtgcttaaaaaactactgataggttctgattcaaaaagaaaaaaaggaaaagggtccattattagggaagtagtgacatagattctggtttgacccgatttttttgatatggtggtgttgaggcatggcacatggcctaaaatcttaccttcatcatttttgtcttgtatctcaacattagtcaggagtggtacaaattcgactttctaaggtcctagctaataggataatggagctcatcagcaaatttaacaaattgacatgatgctgtagtggaggccattaaattttggatggtgccattaggttcttgtttgagaagaggactaccaggattagtgtataagcagttcattgaaaagacttacaatcatgatagttggaatttccttttatagttaatctcccctatgaggcagctcatttggatgtggatttgtatcttttgggttacatactttgttctttttaacaggacttagtttggtttcttaaatagttgcaagggcataatacaaggttctatctttctccttttcatttcattgtagtgatggaagtgtggaagtagggttctttcaaggttgccatgtgtgaggagtggagagggtaccaaattttttattctcttattgatgacttgcttccttcctaaggagctggcttgggtcaatttggacgagggagagcttattcccctaggaagtataataatgttcttcaatgtatttgggttgcaaagcaagtaggttgcccacatcttgactccctttgtttgggtgcttttcttcaacagtgattgaaatgtcgatttttattggtgaaatttcgccgatattttcagttatcagtgaaactgaatacgacattaaggaccgataatcggttggaaggaatttcgccccttttttcaaagttatcgtcaaaatattggcgaatatcgggtttttgcctatttttcgggaaatttccttatattctgctggtcaatgtgctggcttgggtcaaagtgtagctctgctcccctcaaaaattaatttttcactgcagcgtgggcgttggggttcgatgaaactgggatcgtcgaagaagaagaagaagaggagatacgaggttgcttgcttgactgggtggtgggtccagaagaaggggctgctgaggatgcctctgcccgcttgcagctctgagtttccagacaaaagcccccacccctcaaatcggacggttgctcgccatctgaaaagcagcaatcagacgacacccgatccatgattccccaccattttcaaaactccaccaacaaaaacaatccccaagattcaatctttccctccccacctcaaccacaccaaaaccccatatcacaaaccctagattcctcccaacccagataccaatcagcttccacaacaccaaaaccccccaaatcacaaatcctaggctctcccacccaaactcccccccgattcaaacaaactactgggtaattcttaagctaattgagcataggttccgattcacaaacaaaggtaagtccccaagaaagagaaacaaaacaatacagagaatgggagacaaatggaaaccctagctatcgttcttcaataaagaacagtagagactattttccaacttttcattcacacacccacatgtataaacccatatatatatatatttatatatagctataaacatacataagtttagtagacatatatataatatacaaaattgtgaataaagaccaatatgataatttatactacacatgtttcatttgtggaaggaaataaaaatggagtggaaactattctttaaaaataaaaatatattgtatcttgatgtttaaaaaaatatgaaatctttttcatgtttttcgcattatatgggtatcttttgatgatttatatttaatatgtaattttttaatttgtttattaataacattcatgattgaaatatgtagaatttataagtaaaaaaatattatattatgaagttaattcttaatatataaaatcaatatctatacatacatatatatatatattatgcatgtataaacttttttcatctctcttctttttaaccaaaaattttacttgaattaaaattttttgttttgcgaataacatgaaaagaaatagagaatggaagagaataaatgagagaaagaaatttatgatccatgagaaacatatatcaatctctcaacatgagattaatcaaatataatttaaaggggatgtaagagagaggttaaccgggtaagttactctatctcattttgtattctattgtcaatcgaataagtggagaagtctagagacaatatgggaattagtctactttttattacactcttagaatttggtgtgtaattatagggttaaaagagccgaatcttggaatgaagaattgccttttttgtacgtgtattgttcactaaagagagtagaaccacatccattgtgaataatattaggcttatgacctgcattctgtctttgttacacatttacaatttagcctaagaaaaagaaatacaataatagaagattcaattagttaaccttttccctctgtattaaagctgggggatttgatgaaacacacccttttgtttatgattttttgtaga

SEQ ID NO: 13669 - DNA, 10277 bp, Vitis vinifera
  Intron number 2 from transcript GSVIVT01000840001 (locus G SVIVG01000840001) derived from phytozome v7.0 (chr-ID chr1 3_random; pos 2762577 to 2772853 reverse strand)
gtggtgtgtggggaaggtggtattacgggcaacccatgactattgtctggagacagaggaatggcaacaactagtgagttggtaagaggggaaagaaaagaagacaggaagggaaagagagagagagagagagagagagagagagagagagatgtggcatgactaacaatgggtctaggttgtagcaacaatgcaatattgtcgaggtagatgacagggacaggtggcagaggatgctgctggaaatggaggtggcaccagctatggaagggagaaagggaggaaaataaaggaaagaaatgaagggaaaaaaaaaggaaaaaaaaaaaaaacgaggaaaagaatgaagggttggttgtatagtgcaaatacgaaaatgaagagtaaaatgcccttttagcatttttgtttttaacggatagtggggatgtgactaaaaaatgaaatgctagaatttaattttcttaatggatatgaacatgggccctaaaagtaggctgaaaactcaaatggaatgggcttaaaaataaaaatgaaagcgggtgggatcgaaattcttaacaaaaagggacctaggaacaattttaaggtctataactatatatatcaaaggaaaaacattaagatattgtatttgtgtgtaaaatgcataatttgaaaaacttaactagggatctttttagaatatttgcataaaatttgactactttaacctataattagcaattgtgctaattatctcttttgaaattcatgttgtaagttggtaaaattttatgcaagtgttgtataactttcacattaatctaaaagatggaaaacaagattaaggcttaataaccaatggttgaagaggaaaaatttagagattgatcatcagtttgatactaagagcacattttgatatttggcgataaaactagaaagacttttttatatggaatgcaatatataaggatgtattgatttgatgaagcaaggcaaatttcaatttctcaatggtattagtttagatacttctataccaagactatattcatagtttttgaacaatgattctatcatattcatatttcaatttactaggatacaagtaggttggtgtttcttcgtattggttggtatcgaagagaagctcgacaaagcaacaaactcactagaatctcgagaacaataatttgatatgcgaaatcatattttgatatgagaactattgtatatcacacgctatcacctggtattgacttcaattaagaaactcactagaagactagatgattaattttgatatatgatatgatcaatttcaatacatgataacatcagggttcttttattgcagtgcatcataatgtatcattttttccaattgaatattgataactagaagagaatgtatattttatatcgtagttagtatagatttttttaggaagtatcaatacccattcatgaactgtaatcatagggatcaaaattgaagatttagttgttagattttcttatgattaatattgagtacgtggcaagttgtgattggactagagactaatcaattgcttataaatagcttgctatctagtcatttgaagggagttagagaagttacatggagagagataaagttttagatattagagagttcgtttatgatttccttaagagattttcttcgtttgtgagtcttgctttggagagttaaaaacctattgatctttggagaagctttcaagatgcagcattgaagaatgaaaggatgcatttctttgtaatgtttttaattgcaatttttttttataattttatttttttatcttaaacttgaatccttcttattttttattgtaaaacttattcattccatgctgaagaatctattggatgtgatgccttgcattcatctattgttttctactatttctattaaaagaggttttaggaatcggaataggaatggatttgatcatagaagtgtgagattcttaattttctaaaagataattacaaatttaaactaagaaataggaaatcctatcttaagtgcattaagaatgataagtcgtttcatgataagacttttctacatatcaatgttttatatcaaatagatttatgtataatattattattccatgtgcagatgttatgattgatcaatttgttttcatgttatcttaattctttcactctttattcttttgtaaaaatgatctagtttaagctcatatgattatcattaataatttgttctcttgatataagtccctatggagataaactaactaccatgctagcctttgtatttcttttaatttccaatgatgaaattcttttgatttggaaataagaggtttcattgacaagtctagcatatttgtatataatctaatcaatcaatttttcattttctaattaaattgcataatagaaaaaagttaaaaccaatactatcaatgcttcttccacaatggcaattgaatttattgcaagccattaagccacctcactagttatttagctatgaaactcaactttaggactcaaatttatggaatctctaagccaattaatatatcttgtgataattctacaatagttttcttttctacaagaaaattctctactaagtcaaaacatattgagttgaagcaccatgtggttagagaaagagtctagtttcaaaagatgtccatcaaacacattggtatagatatgtgtagacccccaggagcttgagctttttattattattattttttgttgtttctcaagtgggctgctctcgggcagctagagaggatggggggtagtcaccagatgggacgtgtagcaacaggcaggatggcttgctgaggaagacacaaacaaaagagagaaaaaagcttgaaggaagggaaggaggggcagctttggatgggattcttcttctgagagtcacaaagggagtttattcagttgcttgaggagcccgttcttctgggagtgacagtctgattacaaggagataacggagaaaaagagagtggttgcaggtgagtttgaggtaaattccttgcttattttgattgatatatttctcatttatttcctatttggtttgctccacgttgctcgtcgatttgggttgggaaaatatggattatatgctgtatgttgttgattttcggacctttcttttatgccctgttgctgctgatctcattgccatttcctttaatacccaccagcccactccatttcgtcacctttgaaccacaccttcatacccatcattcaatcacccatttctctctagactttcacacccatttatcaactgcccatatcccttttttctaaccttcacgctcacccatctctccaaccttttcccaacccctccatcaagatcactctccatcaccagcctattaaggaagctgcactaggaaacactccaactattgctttctgtgacactgatttcccaatgcaatgcgtcgcactattgctccaggaccacgccgccgctgccatagcccgcgacagcgccgccgtcttcgcctggaagggcgagatcctccaggagttgttctcgcgccaccgaggcccaggagctgtccaccaagcctggagaatccatgacctcgggcaccgtcgccgctgccgccgcggggaggtggcaaaggtgtagcagccggacgtggggggggggggaagctaggaagaagatgaagttttggtttttgggcttgggttaaggctaggcccaattttgtgtttggtttgggctttgggcttgagtttgaatttggagcccaagcccaagcctatgctgaagatggagcccaaagccccattattattattattatgctagtttgggctgggtggagatggagcccagagctctttttaatgattggacgtgggcttgggcttatggattgagtttttttttaatgttggacgtgggtttgggcttatggacttgggtttatgatattatcactattattattattattattattattaactattattattattattattattattactattattattattattaccatagtcattattattattaattcaattttccaaatcttattattgttattattattattattattattaattcacactttcaaaaccttattattattattattattattaattcaaactttcgaaatcttattattattattattatcattaattagaactctcgaaatcttattaatattattattattattattattgattcaaactctcaaaatcttattattattattattattattattattaattcaaactttcaaaaccttattattattattattattaattcaaactttcaaaatcctattattattattattaattcaaactttcgaaatcttattattattattattattattattattaattcacactttcaaaaccttattattattattattattattattattattattattattattaattcaaacttttgaaatcttattattattattattattatcattaattagaactctcgaaattttattaataataatattattattattattattaattcaaactttcaaactcttattattattattattattaattcaaactttcaaaaccttattattattattattattaattcaaactttcaaaatcctattattattattattatcattaattcaaactctcaaaatcttattattattattattattaattcacactttcaaaaccttattattattactattaattcaaactttcaaaatcttattgttattattattattattactatcattaattcaaactttcaaaatcttattattattattattacaaattcaactttcaaaagtctatggtcttgcagttcaatttcttaaagttcgtttctcattttctttaacaaatttcaatttaattaccggagctctaatcttttaaatttaattccaagtactccaattttcaaataaactccaataatccaattttcactcaaatagttttaatcctatttcagttcctaaataatcttttggtcttcttgattttacataagcaataatgattccttcataattctaaaacacgggatttgtgagattagttcgtaggcaataaatcgggctttggtagggggggggcctatgtttgatccctattgactgtcaactgttgtgcttaatagattttgcttgatcttcattttgcactccgatatgcataagctataatttgtattcgttaattgtgtactaatctcgtttcttgatagcgcattgtgactcgtggcccaggtatgcataccatttcgttttgatcattctctatgcatgttccgattttcatatgtgcatgatttgacttaggcatccattgacttacttattgattgccacgacgacttcatcctaacagtagagacctgactttagggacttagaggggtgctacggtccgtaccgtaccttcccgataagtaacttgacccccgagcccgatctggtttttcacagaccaccttttccaaaacaaggagtcacacttagggttttctttcttattttgtttacccttttaaatataaaacaaaaataagtgacgactccaagtcatttttaatcaacaaatcaatttttcaagtaaaaatcgagctcaccatcgagtgggaagcgcatgagccgaaaatgcggggtccacaatatgataaatccttttacaaaagctttggtgcctaagaagtttaaggaacatatttactctatgggttttacggatgtcgtagaattgttttaaacatacaataataaaatttcatgctccctcgtgtacattttttggaataatgattaatagaattgtcaaaaattttaaataaaagtcaagaccatttattagatgtttataggttattacttcctcatttaggttctctaaattgagtaaccaattgtgtgatgcatagaatgaattatatctgataaaattaatgatatgttaccatcatgatccatattgaaaactttgttagattagcatgtactgatagcattatttttatatggccatttagtaaatccataaaagtttcaagtccctatgtggttatttgcccaatgtgtgagaatgtcgaaattattgtgcactaaaattccatattacataggattagaagaggtagattaatataatctagtaggaagtaatcatgtgtgactcttgatgggtaaggtcacttgaaattatataaaagggctcttgcttaaagttttaagtttgtgaagattctcatcatttttgcaagcattataaataataaggagaggtaaatacaaggtgtcaataccaatacaaagtgacaaggtgttgcttaaagtgatgcaatttcataaataatctatgtaaagttatctttctcacaatggcataaggtgagtatctatggatttattttgttttgttaaactagaattgaaaaatcttttttacttgatttccaaatggattgtaccatagtaagcttgtccttaagtatttcaaaacatgtagctaagaaaggtttggttagtttgtttgctatttgtttctccattggaatgtattgcatgtttagttcctttgccatgaatttctcttttatagttgtatgagatagacatcaatttcgatattctcagttctcacatggaacactagatttgaagttaagaaacctactctagaattatcacaccacatttttagagtatcatcaattttaattcctaactctttgatgaataaggactaaagctaagtaacctttcttgcaacttgggccaaggatcgatatttagattctatgctagcactttctgttttcttgagctccaatgtttcaagttgcctctaagataaatgcaaaaaacgctaatagattttctatctacactactagccctatcaatatcccaaaatccttggaaaaacaatctttgagttactaggaagaatcaatgcaaatgcagatccactagcaccttggtagagattaccttccaaaaacaataattatatgatagtaatatatatgtttctatgttgtgcttaaaggtgtggttaggacgtttggagttctagaatgatgtagtcatggtaaactatcaacaaatcatttatagtgagtgagtttgctatgggtagtatttgtcaatttgtatataaaaagatagtaaattatgtgtgaaagtctttactatgatgagtttctcaattcaaaaagaaataatagatggcaaaataacatttataatatcatatgctaatcatttattttcatgttcaagaattctcattctagtgtagagaggaaaccaagaaaatctattttctttttattgatttatttaattattgtataccattttttcaaataataatgttattgactttattttataagtttccaatttaacttttttctttctttttttactattggtgatactaaaaataattttatattggtgaacaaatcgctttttgcttacaatcacaaaaaataaataaaaaataaaaaatcatccactttcacatataagaaaaataaacataaaaacataaaatgttccaatagtgtcttgagcattgaccaacactgtctaaatgggatcccaaatatctccaaagtaattaagtgagtagttgatctagatatctttactaaaacctatatataggatatttacaagaaacatcttcacttggaagttcaaaatattaggtcatgtgggttgctagaaaatttaggctatgtttagttctcataaagtactaaggaaataaaaaaaaatgctaaaaaaaattattttcccatatttggttttctcattaaaaataagaaaaaaaattaaatataattaaaattattaagatatttgtatatttttaaattatttaatttttatataaaagagttaaataaaaaatttaaagtagtatataaaaataatttatttactttaaatctattttttattttccttcaattttttttttatttttttttttttacttttcctctctattttctttcaaacttttagaaaaccaaacatagccttaaggaaaatgtaggagtgaaaatagagaagaaaagtaggagaaaataaaataaaaaatagatgtgaagtcaataaactatttttatatactatttcaaactcattttacttaatttaatttttcaatataaagattaaataatttgaaaacgtataaattactacccagttttaattatatttgatatatatatatatatatatttcataatatatccaaatataagaaaatcattttccttaataatttttttttctttcctgtgctttttaggaactaagcataagtttaaggtctagattatttattccaagtgggtataagatttaaagagatgcaaaaattctagcatactcgatttaaaatggatgaaatcatccctaatttgtaaaaccaaccctccacttttttccatcctgaaaaatacttattttagataaaaattgtctcacttttttcttgtaaaaataatcttttcttttaaaacacatgtaaataattgaaatattggaaagtatctatgtctaaaatggattactctttaagttcaaaactgagaaatgttaaatttataaatttgaaatctttttatccttttaatcaattaattcaacaaaaaaaaaaaaaaaaaaaaaaaaggacaggagggggaggggatgattctattttcaatgtgttgcaactcttaaaacatgatgaaggactagtgatagctctatttctttaccactatagttctatctcatgtttaactttaaaaagtattcacatactagtaatagctcttcaacactctttttttttttttttttttaatcagattttgtagtttccttttctattaatctttgtgacatgtggatcatattcttgccactcatgaatctagcattatttatccatttcctttcataaattatttcttcttttaattcttattgttatttttttttagataggttgaattaaattttcatttacaggaatccaagggttgcctcctaatattagataggcttcccatttttctattttttttaaatcacttttaaaagggtatcaaaatttttttaaatagttttaaaaactattagaatctatctagttgtgtgatttcaaaacatttttttgtttttaaaaataagaaactatttttaaaattcctaatatgatttaatcattgattctctaaaaacaaagtgaaataaaaaaataaaaaagtaaataaaaagtactgtttttagacaacaaatagaaattgttgtcagcaatttttaaaaacaaaataaaaacataaaaaactaaataaaattaacatgatatcattttctttcattcttcgatcttcgatctaataccgatacctaaacactttaagcaataaaataactacaaacatatgaaatttagatgaaaataaatttatctgaattatgggattttgatatttcaacacttccaaaaataatttcaaggggtcaaagagtcgcatgaattgcccttcaaaatccctctttaactgctctgtatgatacatagccaaagccaaagccaaagccaaagccaaaaaccctttacagtaggatagaattgcccttccctgtagaataagatgacccttctcttattttctttttctttttaattttgtatagtgagtgtttgtgtccttatcttcttgtgagttgaaagggtcaccacaacaacgatcttacaatctgtggaaactttaccttctcctatctcttttgctctctcgcattttctgaaagcatgtttgtggctgaggctgttggatcttccttcattggtgtgttgattgacaagttgatcgcctcccccctgttagagtacgctcgccggaaaaaagtcgacagaacactcgaagaatggaggaagacgttgacccatattgaagcagtggtggatgatgctgagaacaagcagatcagggagaaagcagtgaaagtttggctggatgacctcaaatctttggcttatgacattgaagatgtggtggatgagtttgatactgaagccaagcaaaggagtttgacagaaggccctcaagccagcacaagtaaggtacgcaagctcatcccaacttttggtgctttggatcctagagc

SEQ ID NO: 13670 - DNA, 16841 bp, Vitis vinifera
  Intron number 8 from transcript GSVIVT01012536001 (locus G SVIVG01012536001) derived from phytozome v7.0 (chr-ID chr3 _random; pos 919143 to 935983)
catacaggtagtcaccatggtagactatattgttttttatttgaaaatttgttggaaattttataattatctgcagttcaccagttcaggctgtttgtttctctttaacttatgcttgaaaacttacattttcacgatatacttcaacttgatgccttccatgctgcaacttacttcttttcctttaaaaaatttcactttgcaaagaaaaaaaatgaatgtggtctcttgcttgacaggatgttactaaatgtaaaattcaagttttttgagtattctagaaatatttgccgttatcatccctttatgtagttgtctttgtgctttttttttacatttcagttccctggcttgtacacagatgactaataatgttccatggacaaaaaattaataaaactgctgaggagtttaatcctatatgcagattgaaacttatctttgctgtataatggataagctgtttctgaactttgaattggaatagaatgtatggtaccagatcattccagtattctgtttgaggtttaccactgtaaagtcctagtcgcctatcaaatatatgttttttcatacacaaacctatatcttgaaaaatgaaaaagaaaatatgattatgctttttttttttttaataggctaataagagtatgaatattaataaatatattgtggaaatccgttataattttgaatgatgattggtaggataataaggaaagattgaggccccaattgtggataatttgtgttcttccatatttgtatttttttcctttttgattgttctcgtgtatttgttaaatagggatacgtttatgtaaaaaaatacagtgttgaatgaattttaaaatcattctcagtttttgcatgatatcagagcctcatttgctctaaaaccctaatatgtccatggatgcccaaagaggaaacaaccatgaaagagtgtcggagatacactcttcaattggccctgtcggtgcattcgacaactccccactccaccttaccgttgaaaaactgaatggtaagaattacagaaagtgggctcaagcaatcaagctcgttattgacagaaagagaaagttagggttccttaccggcgagacttggcgatcacctccgaccgatgtagtagcatcccagaaatggcggtccgaaaactcctttatcacctcatgcttgattaactccatgaaaccagccattggaaagacttatgtgttcctctcgacggcaaaggacgtgtgggatgcgatacgggaaacgtatttcgatattgagaatgcttcccaaaactttgaaatcaagacgcggctttggcagatgaagcaaggagatcaggaagtcacggagtactacaccgagatgttgggtctgtggcaagatctcgatctcagctgtgaagaggattgcacgagggacagtgtgcgcttcaagaagaagatggagaacgagagggtcttcgagttcctagcggggctgaactgtgagcttgacaacatcaggagtagggttctcagtcgccggccgttgccctccatccgagaagtcttctccgaggtgcggcgagaggaaagtaggatagtgatgttggatctctcatttgggcgtgagggctcaacccttttaactcatgggcctcctgctgttgttggacgtgggcctcatgctgctggatctagtgggccaagcccaagacagtccaagaggacttattgtgagcattgtaagaagttgggccacactaaagacacttgttgggctttacatggcaagcccgtatattggaagcccagatagcccaataaagcccatagtcatcaggcctccaccaaaacccaggcagacaaaacacctacagaaatttgtcagtcaacttctagtgtggggtttaatttcgaccagcttgcgaaattatatgagtttttttctaatttccaagcctctagtcagtcttctacttctttatcctctggttctttggcaaaaaaaggtacctttttgatagtacttagcaccatgtctcagactactctctgcattattgactctggtgcatctgatcatatgactgatgctcatcatttattttctacatattctccctatgtcggtaatttaaaagcaaaaattgcaaatggtactttatcatcagttgctggcaaagggagtattcgtatttctgagtcaattactcaaccctatcctacatgtacctaatttgtcttgcaatttgctgtctattagccagttaaccaaaaggtctaattgctcagctaaattcctaccatctcattgtgttttttaggacctatcatcggggaagacgattggcagtgctaaggaatgtgagggtctatgttacttcgatgaaactggtgtacttggacagagttctcctactgtttgtaattctgcatcttatcctaaagacagtgaacttttgttatggcacaaaaggatgggtcatcctagttttcagtacttaaaacatttatttccttcactatgttcaaataaaactttattggattttcagtgtgaagtgtgtgaacttgccaaacatcatcggtgtcttttcctaaatctaagtataaaccatccataccatttactctgattcacagtgatctatgggtccctcatgtacccctaataggacccataaaaaatggttaattacttttattgatgatcatactcgcctgtgttgggtatatttgttgactgataaaactgaggttcgatcagtcttcatgaactttcactctatgatacaaactcagtttcacaccaaaattcaaattcttcttactgataatggtactgagtatttcaatcactccttgagcacttacttacaagaaaatggtattatatatcaaagttcttgtgttgacacccctcagtaaaatggggttgcagaacagaaaaatagacatattcttgaagttgctcgtgctttgctatttacatctcacatgccctcacaattttggggtgactccattttgacagccacatatcttattaaccgaatgcctagtcaagtcctatcctttgtcacacccttccagaaattccaagagttttttcctcattcgagacttgatgcacatcttccacttcgtgtctttgggtccattgtgtttgtccacactcatggacctaagcggaacaaatttgatcccagagtgcttaaatgtgtttttcttggctactcttccacacaaaaaggctacaaatgctaggacccaatttcacagaacctatatgttagcctagatgtcacatttttttagcatactccctattacttgcttcagggggagtccatgagtgaaactagaccttccttaacctgtgaccatcttgatgttgctatgtttgaatccactctgtgccttatatctaccccttcgcctaatacagaaggacacttaaactcagggggagatacggaattacagacaaatagggaaacacttgtctactcaaggaggccaaaatcgaagttcgatgagacactcatctccgaagcactaaaagagtcagaattggtgatagttccaacccctcgggagtatggctccaattctaatcaggtaacagatgacttacccattgctcttaggaaacaacctcgttcatgtactctccatcctatctcgaaatttgtgtcttataattctctttctgcaaagtgtcgtgcttttacaactaaccttgacagaatccagattcctaaaagcattcaagaagccttcgaaattctagaatggaaagaggttgtgatggaagaaataagggcattggaaaaaaatgagacttgggaagtgatgaatttgccaagggggaagaaaccaggggcctgtaaatggatattcatagtgaaatataaggcggatggcacagtaaaacgatacaaagtccgcctagttgcaaaggggttcactcagacctatggcatcgactataccgagacatttgcaccagtagcaaagctgaacactatacgagttcttttatccttggcagaaaacctcgattggccactccattagtttgatatcaacaatgcctttctgaatggtgaactagaagaagaagtatttatgatgctaccaccagggttctgtaaggaagaagaagaaaccagggtatgcaaattgaagaaatctctttatggtctcaaacaatcacccagagcatggtttgatagatttgaaaaggtgattaagaaacaaggataccgacaaggacagtcggatcacactatgttcttcaaacagtccaatgatggaaggatgaccattctaatcgtgtatgtcgataacatcattctcactagagatgacacaggagaagtggaaaggttgaagaaggtctttgccatagaatttgaggtgaaagatctgggtcaaatgcggtatttcctaagaatggaggtcgctagatcaaggaaaggaattagtatttcccaaagaaagtatgtacttgacttgttgactgagactggtatgttgggatgcaagccaagcgatacccctatcaaggcaagaaacagaatggaaagcgacggaaagcccgtggatagagagaaatatcagagactagtaggtagattgatctacctttctcacactagacctaacattgctttcgccgtaagtgtggttagccagtacatgcactcaccaaaggaaagtcatctgaaagcagcatataagatcctgaaatacctaaagggttctccagggagaggactattctttaagaagaatgatagtaagaaagtagagatctatatagacgcagattgagcaagatcagcaaatgatagaaggtttactacagattattgtacctatgtctgggggaatttagtaacatggagaagtaagaagcagagtgaagtagccagaagtagtgccgaagttgaattcagagcagttgcactatgtatgcgtgaaggattatggttgcagaaattgttggaagaactaggcatttacaatagagctccccattaaactccattgtgacaacaaagctgccattaatatttctcataatcctgttcaacacgacaaaaccaaacatatagaagtggatagacactttataaaggaaaaaattgagaaagggattatttgcatgacttatatccttacaagggaacaattgaccgaaattttcaccaaggggttacaaaaatcaagctttgaagactttatttgcaagttggacatgattaatatctatgatccaacttgagggggagtgtggaaatctgttataattttgaatgatgattggtaggataataaggaaagattgaggccccaattgtggataatttgtgttcttccatattgtatttttttcctttttgattgctctctgtgtatttgttaaatagggatacatttatgtaaaaaaatacagtgttgaatgaattttaaaatcattctcagtttctacatatataaagggtgctaaactaaatttgtaagcatagtatattgggagtatacaagtgagaaacaaaaaaccaactataatagctacaaacccactttaagaagaaaaacccatccattctataaaatctaataaagaggttgggccttcctgcccatctcctagaaggaaccctcaagaccacatacacagattagtaatgagggaatccttgagagcttggatagtgcattgctccctttaaaaagttctttgattttgctccttccaaatcatccataaaaggcaaagaggggttgttctccagacctcccttcttttcatgctcacaaagctactatgccatgcctctaataactccttagcagaaaaaggaagagcccatgaaatgccaaaggacaagagaaagtgtcaactctctagctatcccacaatgaatgagaagatgtttaactgattcatccgcatctttacacatacagcaaaaacctaccaaacccatcctctcctcttaatttggtccatagttaggatccagccccaagttgcttcccaagtaaaaaaaactcgctttggtaggagcctaggaaccccaaattatctttgaagggaaagtctctttagccccctcttccaatgcattgtagaaagacctcatagagaacactccattcttgctagcttttcaaaccattttatccacctctcctctaaatctactaaactcattaagttttagaaaaaaattatttacaacatctagtttccaatcatgaaagtttcttgaaaagcaagggttccaagtgaccatccctccttctacctcccaaacatcatccatccatgccttcttagcaatagcaaaagtgaataaagaatgaaaagaatccttcaaaggcatatcgtcacaccatacgtcatgccaaaatttgattcttctttcgttgctcgcctcaaatcttgttttggctttaaaagttccccatactttcttaataaacttccacaagccaactccatggccttctctcccttcctaagagcaccaacctcccagttctttgccaaaattttcggatattagttttctccacaacatatcccttttttgaggtgaatttccaccaccgtttaccgaaaggagttttgttgatggtggataaatctttactaccaagatcctttttaaaaaaaaaaaaaaaaaatctttgaaaattgccaatgaattcacaagatgaagttttttttttccaatagaacctccttcccaaaggaaatccctttgaatttcctctaatttcttagccaccgacttaggaataatgaaagagaacaagaagtaaattggaaggctgcataaagtacttttcaacaaagtagttgttcctccttttgagagaattttgaggaggctggatggttggaaaaaggcctttttgtcttttagagggaggattactttaattcaatcaattctgtctcacatccctagctacttcctctccctcttcaaaattctagtatcaatagcctcaaagattgagaagctacaaaaggattttctttggtctagggtggaggaagggaagaaagattatcttatcagatgggatgttgtttgtaggccaaaggagttgggaggtttgggttttaggaagacttctttgagaaatattgctctcttagagaaatggcttcggaggttccctagagaaaggaatggtctttggcataaggttattgcgagtatttatgggacacatcctattggatgggacgctaacatggtgggtagatggttacgcagatgtccttagaaggctattactcaagttttctaggatttctccccttttgtccgcctagtggtggggaatggggagagaatatgtttttgggaagatctttggtgggataaccaaactttgtgctctcaatttgctggtctttatagagttatttatgtgaaaaacctcattgtctcaaatgtccttgacaattcatttccattgtcttgaaattttaattttcgtcgtaatcttactgatacagaaattgatctccttcagagaatcatgtcctcccttagttcagtgcttttctctccttctttggcagattcaagagctttgtctttgtcttcattaggcttgttttcagtgaaatcttttttcttggccttgttaaaagtctcaaatcctatcctgttccttctggccaagtttttgtggagttcaaaagccccctcaaaggttaaggcccttgcttggttagtagtacatgggaaggtaaacaccaatgacaagttgcaattgagaagaccctacaaatccctctgtcctcagtggtgcattctttgcaacggaaatggagaatcgatcgaccacctttttcttcattgtcttgttaccattggactctgacacaagatgttcaatctagtagggttggcttgggtccctctaaggggtattgtggacatgatggttattgcttttaaaggtttggggaattcattaagaggcaagacactttggcaaatcgcttgccttactttgttatggatagtgtggcaagagagaaacaattggatttttgaggataaggggagaacaaaagatgtgttatgggacttgcttattttttattcctctctttgggctttttgtactgcaacttttagtgaagttcctcttagtgttttacaactcaactggactgcagtttatgtttcaaaagtttgagactgttggggtttttctttgtatttagttttctaaagttgggtgttttatctttttttcagtttttgtttttgtgggaagaacctctcatccttctcttgtttcttctctttctcttgcatcttttcttcttttaatatttttttcttcgtttttgatcaaaaaaagatgttgccttttccaaagagtcaatcttttaaagaacctttcctccatcacatcctaaacaactttggccttaaaagggaacaccaagggataggcccaagtatgtagcaggcagttttcttttaccacaacccatcaccaaagttgctcctccacattggggacatcccctattggaataagctcactcttgctcaagttaatctttagacctgatgaagtctcaaaccaaagcaaaacccatgctaaataagtgagttggtctggacaaggatcagagaacagaagagtgtcatctacgaataggaggtgagaaattaaaactccatctccacctccccctcgtaccttaaagcctgagatgaagccactctccaccacccttctcaaaagagaacttaaagcctccataaccaacgcaaaaaggtaaggggatagggggtccccctattacaatccccttgtgctctagaaaaaaccttgagcttgaggaacaccatttaccaagattgaaaaactggttgtggaaatgcaaaccctaacccactcgatccatttatgatcaaagcccatttttcccatcaactccaaaagaaagctccaatttacatggtcataagctttttttgtgtctaatttacacacaatccccccgctacggtggctcaatcttgaatcaatggcttcattagcaataataacatctaaaatttgtcacacttccacattctgtgaatctgacactagctctcccatcattttcttcaacctattagccaagactttggctaaaattttatacaaactgccaacaagacttacgggtctaaaatccttcaaatcttcaactccacctttttgcggaattaacattagaaaggtggagtttaaacttttcacaaaggttccccttttaaaaaattctttgaaaaaactcattatctcctccatcaactcatagcaatcttgctaaaaagccaaggagaaaccattaggtcccgggggtttatccctgttcaagtccataagagccttaaagacctccttctcattgctcaacgacttgagaagtaggccatttatactaggtctccactcccccacaagttctaacagtagcaacttgaaataatgaactatctttgttgcaatttctgatttctcagttacccactctccatttatcttgattcttccaatgaaattcctgttgtgcattggctattttgtgaaaaaatcttgtttttttgtccccttcctttaaccaagcctcttcagacttttgcctctaagaggcttcttcaagaacaacccaataactgaattcttctactactagtcttctagcaaccatatcatccgaagaaagacgaccttccctctccttagcatcccagaagttgatctagtctagagcacaagccttacaagttgcaggattgccaaaaacacctttattccaaactttgatgtcttcctttaaagcctttagcttggaagccaaaataaagctagattacccactaaaccgatagccttcctaccattccttcaccaagtctttgaatccaacgaccttaagccgcattttttcaaatttgaacggggttttacttcttctcacctcacctccctccaatagaataggagaatgatccgatacaggtcttggtaaaagggtttgcgttgtattagaaaaatgatcctcccagtcgcttgttaaaaggaaatagccaattctcaacattgattatttgttaagccccttgcaccatgtgaaggagcccccttgataagggcagatcagccaacgagaactcttctatgaaatttgaaaagcttctcatgttggacgaaatgctaatgcaatttcttctttcttatgggaatttgacaacattgatatcccctccaatacaccatgggtcctcttagagtcccctaatagccccgaattcctcctaaatagtgtcaaagtctcttccatcccctgcctataaatcccagaaaaaaaacccaaacaaagttgtcctcacaacatttgaatttgcaagagattgagtaagagccaaccttcatttccaaaaggtccaacactcttatcccaaaacaacaccccaccagcagccctggatgcctcgagagcaccccaccccaaaaatctccccacccctaaacttctgaccatagtaaaaaacataccttccacctttgtctcctacaagcacaccaaatctgaattctgggatctaataagggatttataactttccctttttcctcattattagcgcctttgacattccaagacaaaatttagatcctcattaaacaactgcaactagatcccatcccttattgcctccctttttggtctccttgatgaaactgcatagttcacaaaactttctaatttccttagctccctttcactttgagacaacataacacctttgcaccttttcccagagatgggagccttcttcctttgcctatcctccattttccttaggagagccaaaatctccttcttgaaccttttactggcatccccaaaaacaaactgaaagctgtgaacctatagaaggaacatcctaaatgagtttcaatcttcaactcggaagactcgacaaccaagttcaaaccttgagatcctaaaggaatcacaaccaaagaagaaccactatttcttgcactatcaaaaagatcaaaggctcttccatccttcataatcattttcaaaggcttctcctccacatgcaagatgctcttgaccaatccacccctttgtgccaaacaaaaatcccccacagtagcaaaaacatcccctccagaagatggagaagaagaagccccagaacagagacgaggggaagagggttgagacgcacctagcctgagagaaaaagtgttgagatggatcttcaaagtgagccctaaaggccgagggtttgctgtcgatgaagaagggatctccctctgcatgtggatcccgtgaatcattgttggcttttgctgctgtgacgacctctgaaacaaacaagaattcattctcccatccatggagactctgcccttcgcactcccgttgacacgtagcatcttgctggaactacccactctaggtccttgatccttgaaaaaagaggaagaagggtagtctgaaattgagctcacttaggcctgttctgccctgcctaacttgaaagttaaagggggtctaaatgggccataactgattgggtcctaagcaaagaccactgagctttgggcctggcactcaagcctaactgaagtctcacttgctccctttgcctctcttctcgccacttactccctgcaacttgaatttttgaacaccccttattgaaaatgactgttgaagggccatcaggtgacgtgtcatttaccaatgttttggacaaaggctcctctctgcctatgcacccctctgagcatgacaccgatgtgaagtcttcttctaccttcgactctatgtccattccttggaacaacttgatccacccaaggtggacattcccaccacaactaaactgcaaagcacgaagaaccaaccaccacattcaacatacctgggaaatttctgcttctagctttgacaaggactctagcccactgaaaattccgatggtcagctgtatcttcatctattgtcacaaagccactgcaagcattccccagatttacaagagttccttttcccatggatgcactagaaggcctactattctcacccaaatctcgcttacgtgagcgccattcctcaaccatcccacacctagagaccatctttccagaaaaagcatcttgcctatgaaccaattttctgctgtgaagggtcatttctgcatctgaagataagaaaatatgattatcttctgttatctaaacataagaaaatagaatatttataggttttttgctcctataatcaaatctgtttcttttattaagaaacatacattttatatgcactgtgtatgcttttgtgtgtccttttgctagctgctgttaatatatttgatctttacctatcacacattaagaaataggcattcatttcatagtaacaaaagcacagtagactaaagataaaaaggctgaaccaaaatcactctgaggtcatatgaaacttgcaacccagcacaaatactttgggggcatatctcatctcatatttgttcatctttcttatcttatgggaatcaaagggctaacttcaggaaaaagtgtaattgaggacagacgatttcctgtgtatggatgatcggatgctgctttcctaaaatctgaatcattgggtgatctataacatgaactgaccttttcggatgtttggattgactttgaggaagtcgaaaactcttatttaagtccaattaggcttttgccttcgagtaatccaattacaagtgcttcttgggggggggggggggggaatagaaaaagtaaagatgatgttgcttttcatggaagccctttctggcttatgtgggaagttgtttcttgtttaataaatctttctgaataccaggattctttctttaaaatcacatctttaacttcagaaggtatcctaaacaatgtctaaaagtaaaatgactcacttttggaactttctcacatcaaacttttagtcagaccgtgtcttaactcatagtgttgagcacagatttgcttttccaactctgtgttgttatcccttgatagctcactgtccatggctaggttttgagtgagaagtagagagaggaagaaggctgcagcaaataaaatgggtttcttcttggttttctgtatttcatttactggaagtatcattgaagaggcaaacaaaatactaaagttcctattcttctgtgggtgttatatccaccggtggaatagaatatttttagctgaaacattgcaaaataccccataaataaacatgagataaagcaagaggattagctattgctttctcggccacagtggtacattttttaccgttgcaatatgaacaaaatggtatttatagcaatgttgtgtagcacagagatacaatgctagacctagttcaagagcatgaatctgaaatgtagctcctatctccatggtccctcccttagaagcacctctaagtgcattcttctaatttcactttataattgggtcactgaagaacctctttgagtatttggtccctcttcgtgatgtacttaccaatgcccttccttgatcttaaggaatcataaatcatgtcttttcactgcctattcatagtatcacatggacctaagaattcattctgaattttcttcccatgctaggtttatgaggttctatttcccaaccttcttttgtaggatagggtttaaactattataaatactaaaacaatattatgtggtttcttttttcattctccctattactctctaattatgagtgtgttgtgattattaggaattttttcaattgatgtacttacagttgtttatagccagattgatttaatactcaatgatgtgtgttatcacctaatggataataaaaaatatggtttttttttttttgataaataagaaaatatattaaaaacatagctaacccacaagagtacacatgatgaaatcaataagcactaaatgacaaaacacaatagagggaaaacaaaaaaccactccctccctcaacaagcacccaacaaatctacaaaatcaattaaagacagtgcttccatctacgtacacatgaatccacaaatagagtgtatcgtctcacacccaaccgtatagatattgtccgttatgggccccaagggaccctcatatctttaaaacgtgtctacaaggttaagatgagctcatacatatataacgtcaggaacttttacccctatccaatatgcgacatcacaatcactccccatgtagatacaacgtccttattgtgtctcatgggattgtggggtcaaacaaataaacacccctcacgggaccaaacaaacccccacactaggattagggatcaactttgatgccattttgtcacgtccccactctccactcgatattgtttggttcagggctatagaggcacacacatggtctaccagctagccccgaattttgcttctttattgagtctacgcctttaagaaaaggtcttgatggtatgttgtgaaagccctccacatatgactcttccctattcacttcccaagcgatgtgggacactacatagttggatgcgagtggttatagtttggctccgtaattccatgggatataacaaagatgttgtgtttgtatgaggatgtgtttgtgatatcccacattggataggggataaagttcgtagcgctatataagcatgaactcctcttaattatgtaaacatgttttaaagccatgagggctcatttgggcccaaagtggacaatatctacatggttaggtgtgagccattataaatgatattagaaatgattcctaaccctagtgtggggttttgtatggccccgtagggggtgtttgatcccgtaatcccgtgggacataacgaggacgttgtgtctacatgggaaaaggggaaggggcggggggaaggggcgggggggagggagttgtgtttgttatatcctatatcggatattggggctatatatgtatggactcctcttaatcttatagatgcattatgaggactctctttaggcctaaaacgaataatatctaaatggttgggggttggtcgttacaaatggtatcagagtcgattctcgactccgatgtggaggtttgtttggcactacaatcctataggataaggaagaaagttcttggcgttatataagtatgaactcctcttaactatgtagttgtgttttaaagccgtgagggctcctttgggcctaaagtgaacaatatctacatagttaagtgcaagccgttacaaattttgtgatgtcccacatcggataaaggaaaaagttcctagcgctatataagtatgagctcctcttaaccatgtaaaagtgttttaaagtcgtgagggctcctttgggcgtaaagcggacaatatctatatggttaggtgcgaaccattacaaatggtatcagagacgatccctaaccccggtacaaggatttgtttggccccgtaagaggtgtttatttgtttgaccccatgatttcatgggacataacgaggacattatgtttgcatttggggagaggatgtttatgatatctcacatcggatagaagagaaagttactagggctatacatgtatagactcctcttaaccttgtagacgccctttaaagtcatgaggactcccaatgggtccaaagcggacaatatctacacaattggatgtaggctgttacaaatggtattagagttgatccccaaccctggtgtgagggtttgtgtggccccatgatgcacgtttgtcagtttagccccataatcccgtgggacacaacgaggacgttgtgtttgcataggagagtgtttgtaatatcctacatcaaatgggggagaaagttcctgacgttatgtaagtatggactcctcttaaccttatagacacattttaaagccgtgaaggcccctttgggcccaaagcggacaatatttacacggttgggagtggattgttacagatagattgttaagaaaagagcttttaagtctttgatttaacatcccctcattttcaaacacttttcaatttctttccttctaaatagtccaaaaaatacataagggagcggctctctaagccttctttcaccttctacctacgaaagaaccacaccaccctaagtgagtgtctcttaccaaggtagaaataacccaaggaatactagataaagaaaacatcaattgccataaaattctagccttcacacaataaagaagaatgtgataaatggattttgtttcctctttgcataaagcacacttgttgactaacgaccatcctcttctttggagctggtccaaagtcaacaccttaccctaacaagcctccctaatgaaaaagctcattttagaagaaatctagggagttccaaataatccctaaaggaaaagggatgacacaatctggttccaaaggagagtaaagggctttgatggagaaccttcctctgctattgcccttccaaactactctatccttctcccttttcttctcttttggcttgggtgcttcttttgttatttatgagtttttgtagctagtctttatcttttttcctgctgtaacatcaataaatgaacccattattctgctcatattttattgcatcttatctcatgcaatatgatttgaattccatttttcatatttttatgctattttgagactaacaaaattgaactctatcagaacacagatctcaagaagagaatctatccttccag

SEQ ID NO: 13671 - DNA, 4163 bp, Vitis vinifera
  Intron number 8 from transcript GSVIVT01017648001 (locus G SVIVG01017648001) derived from phytozome v7.0 (chr-ID chr5 ; pos 2365986 to 2370148 reverse strand)
aagaaagaaaagaggtctttagtgattctttcatcattataataattaagttgatggcattttgacaatgtcatgcacatctttattatatctaggttcaatgagaacttgtccaaccttgatgctaacttaattaataaatgattacattggagacattatggtcaaattctgtagcatatgttattaaacaaagtttttaaaagaaaaagtgtaaggggaggcatttttgttcccgtagaggcgaggcggaagccttttgaggcttgaaacagtttttgaaaagttggaacaaagaggtgtttgacaatgtctcggtaaggaaggaggaggcttttaagaagttaggcttctgggatgataaggagagggatggggtgttgtctactgctgaggtagaagcaaggattctgcaagggaggagtaccaaaaatgggctttgatagaagaagtgtcatggagacaaaaatcaagagaaattttgcttgaggggatagaaactcaaagttttttcataagatggctaatgctcacagaaaaagaaacttccttgttaagattaaagtaaatggggagcggcttataggggatagagatttgaaagaagaggtggtgggtgcctttaaaaccattgtgttagaggaagggggttggaggcctggtgttgatgctttgccttttgaggtgttggatgatgctaaggccagaaagttagaggcattttttcagaagacgaggtgctggaggtgttgttggagctgaatggagacaaagccccaagattggatggtttttcgatggccttttggcttttcagctgggagtttgtgaaatctgatgttctgaatttttttaaggagttccatgagcatggtaggtttgtttgaagcctaaaggcaacctttctggtgttgattccctagaagaaaggtgttgatgatgtcaaggactttatgcctataagcttggttggtagtctctacaagttgttgactaaagtattggttaatagactcaagaaagtgatgggtaaattggtttccaagtttcaaaacaactttgtggagggaagacaaattttagatgcggtgttgatagcaaatgaggcaattgattcaatgttaaaaaagagagattgtgggttgatgtgcaagcttggtattgagaaaacttatgatcatgtgaattagactttttgctagcaattcttggcaagatgggtttgggcaaaaatggataatttggataaaatagtgtatctcttcagtcagtttctctggtttaattaatgatcctcctacggcttcttttaaagctggaggagaggaagacaaggagaccctatttccccctacttgtttgtgattgctatggaggcccttagtagattgctcttgaaagctgggaatggtggttttatttcaagattcaaggttgggggaagaaggggtgggggtgaatagatctttcatctccttcttgcggatgacaccattgttttttgtgaggcctcttaggagcaagtcactttcttgtgttgacttctcatgtggttcgaggctatgttggggttgaagattaacttgaaaaaaagtgagatgattccaatagaggagttggacaatgtggaagatttggcttgcgaaattatgtgtaaggtgggaaagttgccttcttcttacctagggctccccttgggggcttcttacaagtcggtggtagtttgggatggggtagaagaacggtttcataagaagcttttgttatggaagagacagtacctctcaaaaggaggaagactcactttacttcgcagtactcttgccaatttaccgatctattttatgtctttgttcaccatcccaagaattgttaggttgagattagagaagattcaaagggattttctttgggaaagaggggccttagataacaaaatgcacttagtcatgtagtcttctgtttgtaaagcaaaatcgaaaggactaggtgttcactctttttttgcttaataaggcctttctttgcaaatggtgttaacgattctctactgaaagagattcattgtggaagaaaatcataaagggaaagtttggggaggaaaaagggggttggagattaggggtggttagagtgatctatggggttggggtttggaaatagggggttgacttcttagattggttggggtttggatgagggagagagtattttttgtgttccctctttcccattttttgccaagtttactttgtatacttcttgtgtactcttgtatgcttttgtcactttttaatatattctaatgcttatataaaaaaatgaaattaataaatatgtaaaaatataataccgaatatattacataaagaattttaaataaattacataattcttttagaatataaaagaataaaattttaataataaaatttttaaaattgaatattatcataaccaatcattaagttaaatataaaaacctaattatttatataattttacaattttccattagaaaaaaaaagaggatgaaaggtgagaaagtggaaattggatggatatgctagtaaggggaggtaagtggtcaaaccaaaaacaataaaacaagatgtaaaaatgtggtcatggcagagagggtgtggtggtgaagatgtaaaaagtaaaaacaagaaaataatgtcttggttttgcccaagaaaaccgaaaaaaaaaaggattaaaaaaaaaaacaaaaaattggtcatggtggagtaggtgtggacagagaagaaagtagaaatgatgaaggagaaagggaagaggcgagatggagaaggcaccgattgttgagaataggcaaatggggtgtcattggagtgagaagtcatgattgtgagttaagtttttcacagatctagggttggggtttttcttccattttcttctatattctcagttctcactcactctttatgagatttttgagttaaaatgttgatatctttttcaatttttgtttttttctaacatggccacctaagtcataaagacccataggggcgtatgcctcaatccttggtgcacaaaaggcacatccaatgcatgcctcgaccacaccttgttgataaaggcatacagctttctggagttttgctttttcttcagtgcctcaaggtgtttttgccacctgcttcaaggcgcacctaaaaaacacctttgaaaaccttgttattaaataagacactagcatattctttgtaattttccagcttatctggcttctgtttggtcgctggaaattgctgaaattacaataaattgttttatgtttcatgtagagtatactatgtaatgttggtgtttagtataaggatataataggaattttttataattgtatgaaacataattatatggcaacccaataatatgttattggtttactgcattcctctttctatgcaccattaccatttaacacgagagtatttgagaaaatgtaaaaggaactggtttcattacttttaccatgtaagcataccctgaaatataggggttagatataggtatcgctgtgctgtaaggacataaagcatgacaaggttagtataatatatgataatacttctggatcaagatgggcagacatgcttcagaatccatgtgttaactatcaagtttagaaaacaaatgctctgtttagcaacattttcgataacagttatcaagaaactgtttttgagaaccattcttaaatatagttttcaattgttttcagaaatgaaattctgtttgagaactcaaatataaaaaacagttttctcagcttattctccatgaaggtgttatacacttatgtttaatgcaaaagttttgaaagtattcccatcttttcaattgtcatttagaaaaatctacagaacttaaaatgcctatactttgttcttaaaaaaaatatgttttcaaaacaaattctgatgtttcttgtcaaaagtttgtcaaacatgttatctaaattagaaaattgtttttaataacaggatgaacagttatcaagttcctaacttgcacatgcaattatctagtttacatattgttatattgatcacccactatctattttccatgttatagaaactgtatctaatgttggtttaatctttattcccaggattgtaata

SEQ ID NO: 13672 - DNA, 4458 bp, Vitis vinifera
  Intron number 1 from transcript GSVIVT01030995001 (locus G SVIVG01030995001) derived from phytozome v7.0 (chr-ID chr1 4; pos 20521031 to 20525488)
gtatcctctctccagttgccaaaccacaagatcaggtatgtatagaaacaacttcatcagatatatagctttcgtctcacaaacatgcatgctaccgttcattcaccgatctcttaatctgtgtttggtttccaaaaattttaggcaaaatacaaggagaaaagactagaagggaagaaaaataaaacataatagattttaaattaataaattaatttgttacttcaaaacctttatacttatttaactcatatataaagataaattaaataatttaaattttaattatatttgattttttattttatagtaatatcaaacatggtaaaatgattttccttacacgttgggttttattataaaagaaaataaaatataattaatattaattaaaaacttatataattttaaattatttgttatttatataaaaaaattaaaataagttaaataagtttgaaatagtgtacaaaatcattgagtttaaatttatttttaaattttttttctttttactttctctttagtccctcattccctcgaattttcaagagccaaactatttttttttattttttttttctttttactttttctctttattccccattccctcaaaattttcaagatccacacattagcaagaaatttgcatagttaaatagattagaagttaagtctttatcactttcctccttataattgtgttatttgtaggcaccttagatgcaggttgattttgttttgatagggatgatagttttgttagtttctcgggtgtcccaccccaccccacctctagtaggatgggtatgagaaagcgataatcagggatgagatgaatttgacaagaatttcgaaacctaaatcaagtttagagcaagtatgggttttatactattctacctcaccttgcccccaaatatgaatttacagaattacccttcatatattagaaaattcccaaaatatcgatcatataaatattgtatctttagaaatttgcccctctccccacatagctcctctcctattttttgcttggatctatcatttttttgccctaatcttaggtcacatgggagaatgtgaaaggcctataggactagcagaggaggcatctataaaagttcccttagaaaagcatcctattgaagcaccccaatagtgagttgttgcttgtggtagcgagatcgatggtattttagctattgtacaatgaagatgttgacatcaatgggaattaccacttcagagcatctaagaaggtgatgagttgcaagatcgatttgtgggagcctcaatggtagatgatggaggatctttgggatttgtaagcaatgtagagagaaaatgtgttgatgatgtgattaagaatatgtcctcttttaagtttggttgggtaatgcttgtgattaatttaggagatgtaaagttgttggtgaaggaggattggagggtttggatcctgccattagcaaggttatagaatagtagatcttggaaagtaaaggcaattttcttgcttttccattgatttggttggtttccgcgagaccaaaggctcagtttggttgttggaagaggacatgaaagggaaatgctaattgaaaaaggctctctttctttagtatttcaatggagaaatatcgatccgacgatatttcgggatttatcgcaagaaatcgccgattttttttcccgatatattgtatggtcaatgcgggtcaaacgaaagtgcgctactgtgccctcccatttgcttgctgccgagaggatttgaaccccaaaccaagaggtttggggttcacccgcgtaccacttgggctaacttgaattatatgcaacaaatatatatatacttaaactcattatataaaaaaaatataagaatattttaaagagcaaattatttataattattttataattaaatgcaaagtcttttaattaattaccaaaaatataaaaattatataattttcttcataatgtttttaatatcattaataattaattaaatattaaaaaattatatatatatcattatttattttatattgtttaatacaattgaattaaatggatcatattttaatactaatatatattttaaaattagacatattataatcaaatatcataatattaggtgtaatttaataataaatgtacacttataaaattcatatttttatcgatgcatatgatattattaaatcgtgttatacatatatcaaaatttttaataaaataactttaaaatgtctattatacttctaattatattattatgaggttttcctaacatttttatgagtttttaataattttaagcttaccgatatttttttccaaaatatccgccgatatatccgtaaaatcgaagtaccgatatatccgtgattactgatattttcatcattggttggtacttacaacctttgaacatttgcatacccatgtgttctaggacttccttaatggaacctttttgtttatttattttgtagaagcatgcaaataagaaaaataagaaaataaataatgaagcaatcataaaagcatataagatttaacaaggtttgttatatgcttatgtccatagagaaagaggatcaatttgcaatactcaagtgagtagttacaattttgaagcactaaattaccaacaaattggaatattaattaaaacaaaattgctaaaatataaacaagatttaatgtcttaacagttataacttactataagttctgtttaatgtgtaaccataacattaattttctttgatagttataatcataactcttttttttttgtttgcatatcaaggttgtcatttctattgaatccatatgctatatgcaatacactcctctcctttcagtatgatccttcccagtttagttgcagttttccttctacaagatctcaaatattttggaaaactttttatagcacaagttctccttcttgaaatcgcctttcttgtaacttttggttatatgatgatgttattccttgctgatagtcttcaacttttaaagtagttgctttgctcttcaagtaagtctagatctagttccaaggtcatcggggtttgctaatcgtcaagcattagtgtacccaattggtattatagcttcgggcccataagctagtgcgaatggagtctcccatgtggctgatcttgtttggtcctgcagcatgcccataggacaatcgacaacatgtttcctttggcttaaccttttcttaagatagttcaacaaggtctaattggtggcttcttcttggctattgccttgcgggtgtaggggaataccttagaggtcgactattttaaggtcattgcaaaattttttgaattctttgaaattaaactaggcgtcatggttaattatgaggattcgaggtttattgaatagaaatactatattttgccatacaaatctccatacatcccccttttttgtttttgaatatgcctttgcttcctcccacttggtgtaatatagtaggtagctacaagaacaaatccttttcattaaaccgcaacaagtaggggtccaatcatgtctagcccccattgagtgaatggtcaaggtacactaaattgatgaaggtcctaattcatcttcacttcaattagaaccttcattaatttcttataggatgtatatttcttcaaaagcttatgttttttttgaaataagaatggcaaacatttagtgccttttgaatacaattttggttttattaatttaaaaaatcaatgaattttcagttgtaatttttttaaaagtacttgaagatataaaacatgtttactaattcattttttttttgttaaaaaaaaaaaacacatttgatagttatatggcaacaagtagaaaacaatcatttttctattttaaaatttgtttacaaaaatggtaataaaattttttgatgactttattattattattattattttaaaaatttgttctatcaaaatttgaaaacaagaggtaaaaatgggtcaccaaacatgtttccaaattttgtttttacatattttaattaaaaaaagatttgaaaaataaaagtgaagccaaatatacccttgttggtcaatttcaattttacgatggttttatgcttaaaattcagaaaacaatatttcattgtacttgaaatggttcaatttttaggaaatttaatgtaattttcaatgcttttatacgattttctatgtaattttcatttttttaaaatttaattgcgagagttgaaaatacctcattttcactatcaaagaggtcctaaatcttaccatgtctaggtgatggcctatctgttctgttgttagtaacatcctctagtttggtttctttacaattttaagttgtatagaactcattttcattttaagtgtgactaattttatgtttgttttacatgatcaggctcaa

SEQ ID NO: 13673 - DNA, 12070 bp, Vitis vinifera
  Intron number 3 from transcript GSVIVT01010928001 (locus G SVIVG01010928001) derived from phytozome v7.0 (chr-ID chr1 1; pos 15520875 to 15532944)
attcattcctacaatacaaactaaacaatcaatttgttgaaaaaacatttatccacctctcataaataaactttggttgctattcaagaactcgagctgaggcggagaatgcgatagtgacagtgaggagcaataggtaagctgtagccttggttgtaaaagaaatgagtgtgtgggttgccatttgagacaaaaaaaaaaaaaaattgagaagggtggagaaaatttctttgctattgatgatggaatatatatatatatacacacacacacctttagctttaaacatgagctaatgagatcgagtaggttcttgtatttcctaactttttagtgttttggttagaacacctaaacctgaattcaattatagaaagtggatgggatggaacagttgggttggggacaaaggtttaggtgtcttcatagagccacatcttcaacttacacctaaaagtcctacaaccacttctagtattgatgtttcatcaacaatgaagagaaaatggtcatattctttcatttctaattcattttaacatagctttctagacaacaaataacttgagatccaaaactagcgtgtatctacaaccaattggttcatgatccttataaataacaacattctttcatttgaggatattaaatagagaaattttattcccaaagcaaaaagatagtaatccttgaaacccacttgtgattcataaccacaaaccttatatgcatcatattgtgatgaaaagcaacaatattcttatgtcaacaacatcaactgaatccattgattgaacaactcaaattgacaaatttaccaatatcattgattaaagaaaacctcttaatctcctaatttcatcaacaaattcatacaatcaagggagcaaaatatatagaagagatcaagatcacacaataaccagtactagaaaaggaaaaaaaattattgaacccacgtgatatagatccaagagtctgaaattcctgtggacctaaagaagcttaatactccattatcaacaactaattgtaaagaaaccaccaaaattaaattcacccaaaaacaaaaataaaaagtacaataatgtagaaaccctaaaataggctaaaataaaagtaaaaaaatttaaaaaaaaatacaaaatataaaataaaaaaaaatattagattcaacagatctaaccttaaccaaatggtttagaataggaaggggtgtgaagagcactcacaaacctaaaaaagacaaataaatcacatttcccatttaacctaaaactagtttctatgatccagttcctgctactcctactacgcgttaaaattctatcccctagttcaaaatgttttctaacccaaaatatggcattccctcccccttaaaattctctctccactgctactactcctagcttggcttccctcatagttaaacaatgataataactttctcgattcccttcctttcttagagcttaacctcatccccttttgtaattctcaattaaaataataataaaaataaaaataataataaaaccctcaaacaacacaacaaaattagatttgtaaaatagccaaactcaccaaaaaatagaggatttgctgccacaatcacataatctcatttttttccactaacttgatgaaatctctactacataaaatgatcataagttagaaatctaaaaccaagggaaaaaaaccctaaactaagcagaagaaatctttaaaaacatagaaaaatccctttaaatgaggcaaaaaaaaatgtgttaagaaaaaacactaacctgagatatgtctcttcttgttgtttctctcttagtgtggacttcgtcaaaaaacctcacatctctttgagataagtacttttgtttttgcttttattttctcttggttttagaaacaacaaaaaacaactccactttgattttgtcttttgttttctttttaaaaacaatataaaacaacctaaggttgtttcttaagtttttttttttaatcttgtttttaaaaaattgtgccccaagaataatggccaaacacgattgtaagttttaagaaactattttctatttttaaaactataaaattgtttttaagttatttagccaaacatacactactttattccattctaactcccctcacaaccttaatccatgccattactaaaccatcaagagtggaaaagagaaaattagagtagtgattaagaactgcctattttattctcgatccttgattgtttgttttagagtttttttcaaggaaatgtaagtatcatatggttattccttctcagattggaaagtaacaaattcatgaacaacaaaagcttctgcttcctcttagattgtcacttcttttcttcttgtcatatgaaaacatcaagatcaactatttaaacttgaaatgtcattgaactaaaaaaacgattgaatctggaagtggctttgccacacttagttatagaagaaaatcccaaatcatagctaaaatcccaattggctactaatgaccttaataggatttacttttctactatcaatcgaggaaaagcttaaaatcgatgctttgattgataatgcctaacataagaatgtattataccttctctggtacttaccagatgatataaactaaaataaaataaaatagactattgcattatgcatagactaatcttatgaagaagaaggaaatgatttgatgtcaacaccactctattattttgtctttcttccttgactacttgagaagatcctaacaaagggtcagtgtttgtccattcatcttttcataagacaagagtaaagcattgtgaaagatgaatgcatgattgtaccatgcataggcttatttggcggccaatgagatgagaatcttacttttctcattaacatgaattatgaccaattgaaatagctagttgaacaaaggaaacaagaatagaagaaattttaaaggaggatctaagtaccaaaagggaaataaaggttaaatcaatatcattctccacacacccaccattagttagcaaaaacattacaacacccaaccatttcactaaagtctttaataagcaatatcttttgcaactagaggtacttagttaaggtggctcggtgagatagggaagaggaaaaggaagaagtagtttggcttccattcctgagtgttagtttggagataacctagtaacaggagttgaacacaattgatcatgatccgttgaaagatctattaccagttccaatcgatggcataggcacaaaagcccattgtttcgaatctttcaaagaataaagagttatcaaattgcttaatgttaggaacttcgaatttctccattccctatccttgaatcttgtaaggtgtatgcatctatccttaggcatctttaaatctatcacagcacaataaaatgacaataaaaaaccattattaactataaaactagagatattgtactcatacttgtgatttaaatgttcctaaatcaaaattcatccaatgaagatgaagcttattgtctgtaaaggtctcgtatgcccaaagtcttccgcccaatgactctaaccatgatcttgtcactttagattgtgggttttagaatgatggaaacctaaactccctctcttaaagatgactatctaaatccatgcatgaaaaccttaaccctaactactaaggggtatttataggtttcccttactaggcttaagtgacttgagcccactaaggcttgtatcacttaatcaagtctaaaataggttctaattgattaattaacctaacatgaccgtataattaagagttatttgattaaaagggtctttgaaaacctaattttagaaatttaacctcccacctttggtctcattcgaacaaaaatgccctcattattttcttctaaaaataacttctcttttaaaacctacatgtaaatacttgaaatgacaaagggcatttatgtaaaaaaaatcggttacttttcaagaaaaaacatgaaaagggttaaaatacaatttggggattatttcatcccttttaaccaaatatttctataattaatcggttagcctaatctagataccttgttcactataccctatgcagcattgcataattaccaaaatacccttatgcacaaaagtaaacctagagctaatctaaccctcataaaattgtgtcatcatggtatatgagcttagaacagggactattgggactcataggagtattggctcccttaaaatccaattttgaagttgatccactatagataatcaattgtactctagtactttatgtaaataacaatgagatgaagtttggatccatgacctactatccactatatgcaaactctccatgaactagtgtctataatctaataaggtagtgttatcacttatcaagattgccttccaatacttgagtcacaaacccaacttattatgtgatcaactgacatactctagttccaatgagcatatattaaattccactaaaggaattactacaatcacatattcatgattacatgtcctttagatcacccaaatggacatactatctcaattccatgagatatcatggtgcctctattgagaatacttgttgccaaaaacctctataaacaatgacccaatccatagggatatatgaccactttagggtcttacccaaagatcaattatttctgttgattttggcacaagctcgttatcctctcaaggttgagactctatgtagtatagtagtttagtgcatcatgataattgataacattacgtcatgattcatcgtaggttctatccaatgtgcataaaatacactagtacactcatcatgggaaattcatcccaagagctaagacaagccattcctccaattaggaggtggtgcagtatagtctctattggattgcccaaatatatgaactggttgtagacaacttatctacttacaaggaaccccatgacttgtatcctctatacaactcctaatgcacccaagtcatgtacaatgtaagagatatgagttaaatactcaaatcaatgtcgatatatgaaatgaatagctaaaaggcaatcaagtctaaccttgttacaaaatgtcttgcttttaggggttcaatcccaatacttaaagcacttaaaactattaaagcagttaaagttttaggttaaataaaaggaaaaactaaaagttatatgcttaaaacttaggggtaaaaagcagtgccaaggcaaatgacaagtgaagattaggatatagttaagatattcgactggataggtaaacacattccattcaacccccattattggattggttcattcttcattgaagcatatagatcgatctagatctagtaatgatggactttatattttgtttattgaatcacatggaattttacccaactccatatatgtaatctaatatatgaaatttgtatgaatgaaggaataaagagatttttctacttaaattggaaaggaactgagaaatgctacttagacttatggagttctgtgtataatatcaaaacaaaaatgattccatttgtaccattattatgattttatgcatttcaatccgattagatactagaaaaataaatgaattcaagatttgatttgttcactaggataaagacataatagttagaaagagtatagagttttttttttttttttcaaaaaatgattcacaaagaagaaagaaatttcaatatatttttattttgagcataatttgtaggatacaattgaagtacgcaagaagggttatattttttaaacatgtgcaaatatgactatctatattccatatccctttttgcacttttatttagggtagcttaggttgtgctctatcaatttttttttattcaatctattgaatgaaaattgaagcattataatttcctataaacatcatatatagataagatagcatattttatgtctttgttagaatttaagttatggggtttacatataatcataattacttcttaaaatataattgataagtctttttcattgaaaggatcaaaactaattagttatattatataacaatttttattttcttatatcattagggaaacacaatttgagattcaaatcaaatgatcattcatgaattcacagtcaatagtaatagacaatgggtccaatttgtcctaaattttagctttgtgactaaaaatccacatttggtttttcaatagaaaagagagagaaattttttgtgtattatatattttgagatactacataattagtcaaagggagggatccaatctgaaaaaatgaaagttgatttttaggaaagggattttggaaaatgagattcaagatttcttatatattataattatttaattatatatcaaatcaatatctaatgaattgaatggttccaacaaaaatgaaagaaggggatggaatcatactaagatcctgacaaaaaaaaaaaggtatttgggatgcatgtctagttctcattagaaacaaattagccctaaacaaccttctgtctctcgcttgacacaatttgacacatggtgatacttgattagctcaaaatctatagttatagaaaaaaatatatcaagagaacaagcacttaggaaaaagtaagcttctaatcaaatcaatcaagggatagaggctcaaccaaacattttttcctaagctaagacatagttgttgagtgacaattactctatttcttaaagagggagttctaggtaataccatttctaggcataccatttatttcttaatgtaaggagaaagagattgtggggggaaaatttcctagtgctatatatgttgttggcatcttagatctaagcaatagaagcaataccaatttttttttttaaaaaaattgaccttttagtgttataaagtactaacctttaggtttggatgttccctgattactactcaaaacatactattttgtagcttgtaattagctcttttaaacacccttgagtagtaattattaccttttaactcaattggcatgatagggacccttgcaatcgtttctaatcaaattgtgttaagttttggtatttttgatagctttttgctcaccaaagcaatttaagaatgagggagagctgtatatagttcatggcaaagcttttggaagctcaaattcatgaagaaaccaagctttggagccttatagtcctttgccttagtcgttcaaagtatgcaaggaaagagcaatggagagaggaaaacagagtgaagaaaacagaggacagcagctgtagtcttccttcgtacttttggagcacttcccgaagtccattttctacattctttataccatttcaaagctcaggaagtcaagaatccaacacttcaaacaatgtacgaattggatctgaaatgaggaagatatggcctttgcaagacaactgcatccagctgaaggacaaattctcatcttgcgaatttggaactccaacgtgcaaaattaaagcctacttttcgaaatggaaatggaatacaaccgcacagtcacagagaagcccaacttgtgaaagtgattttgcaacttgcgaacttggagctcaacgtgcgaaaatggattccaagttgcgaaatcaacttgcgagatttttgcaagtcaccatgcaacgtgcgaaatctacatgcgaactgggatatttgtgtaccgactcttttagatcttttcttcagatatttttgtataaatttccattcttctccttgtaatccaccaaccataagatttcttagctaggaaggttggaaaaacttctctatatatattcccttgcatccattgtaaaagatagagatatataagtatgtagaatcgatcaatatatagaatatacagagccttgctctgtttttccttctctttcattttcattttcttgctagccaaaaattctctgagatgttttctcagaggatgagtggcttggctttttattttttgggtgaaggaagctaagtaaggttccggctacataagtgtgagattttgttgtttccgtttttaatgaagagaaagtgtgatccgtttttggtttttatatttttagttaactaggatttccatgaatagccaatacttggtaagctttcggattccatggattcttattgcttgcaatcttgctccatggaggtccaattgttatctcttgttcgcttgtgaaggatgatccgatggtaaggatcaccttgaatggcaaatactaggtgagaggtacgagccattgcaaggtgtatcagtgagagggtttagcgttgaaaccattaatggcaagcatctgtatcacaccggttcgggaaataactataggttaaattccgaatgtgaggaaaagattcaagtgatcggaatctccctctttgtagttggcacctgatcctagtaacctgaaatcccaagaaacacctttctttctaattttttttctagttaattttagttactttatgttaggttagcttaataccatccattttcattcaaacttatgtcttcttttaaagctaacaaagaaaagaaaaagcaccaattcagtttttgaactaatatcaattgcgaagtgaaaacccatctctgtggacgatcctagagccactatactatgctagctaaatgctaccccggtatatggtgaaataggtttataaattttgttgattactcccgtctgaggattgagatcagagcacatcaattgagttgaatcaattggaacaccaatcgggcacgaatcattcccaaacctcaaaatccaagtgttgaagatgactttgaagttgttggaagtctcgtaaacccatgatcttccgctcagtgaatcaaccttgttcttcgcacacttctagtggagtggaaaggagagtggaggctatgactctttatctctctaaatggtagaagataaaagttatggaaaccctaaccactagggagtatctatagtgttcctaattgggcttaagtgacttaagctgacattggcttgggtaacgtaatctagcccaaaatgggtcctaattgattaattaacccaataaaacctactaattaatcaattagcctaatccagagaccttgttcacttacccctatgcaaatttgcataattaccaaaacgctcttatgcacaaaagagaacctagagctaatccgaccctcataatccatgccaacaaggtatataagctcagagtggggaccactatgacccataagagtactggctccctcataatctaattctgaagttgattcaacatcccactatagagaatcaattgaactccagtatcctatgtaaataacaatgagacactaggtgctcgagtccatgacctactatccattgtgttcagtctccccatgaactggtgtccatagtctaacaaggtgaaagctattagcctttcaagaccacctctactatccttgagttacaaatcctcctattgtgtattcaattaacatgtcttagctctcaaaaagtctatttcaagttctacttaaggaactactatagccatagtttccatgaacgtacctccttaggatcacccaagatgacacactatcgcatgagatatcatggtgcctctattgagaatacctattgctactgacttccatcaacagtgacccaatccatagggaatatatgatcaatttacgatctcacccataggtcaaagccagtgctaactttagcacaagctcaatattctctcaaggttgagagacaatacaatgaagcaacttggttaggttatgactacttgatagccttaagttataactcaccataggtcctgtccgatgtgtaaccatacactttagtgcactcaccatgggaaatccatcccgatagccaagaccaaccattcttccaattaggaggtggtgcactacaacctctaatgggttgccaagacccatgaaccgattgtgaacaagtcatctatttgtaaggaacccatgacttagatcttcttagcaactcctaatgcacccaagtcacgtaaaatgcaaaaaatgtagataagaatgctcataaagtataatacatggaataaggatagataaaagtgaaactgaaacatcattaaataaataacgaattccaaatttattacatcatgttatggttttaagggctctatcctaacatatgtatgagcttcttttaaccatgtagacgcattttaaaattgtgatgacccaaggacttagggcaaacaatatccatatggttgggagcatgcccttacaaatgctattagaattgattcctgatcctaaaatgggagttgatttggttccgtaattttatagggcacaatgaggatgttgtgtctacatggatggtgattgtgatattccacattggatgggggaaaaagtttttgataccatatatgtatgagtttctcataaccacatatatgtattttcagttgtgaaagtttattagtagacaatatctacacggtttgaaacaagtcattgtaaagacacaaaactataatttaatcatcaaattttaaagtaaaaagaaagaaaaagtgaaagaaaataaaaattagattggaaatcaaaaagattatattttatatgttacttgaaattattttgcttatttttaacttgtctaaataaagattaaataatttgaaaatgcataaattatttatgtatttttttcttttcatatttttcatagtaaaatggaaaaatttatttttcttaacattttttctctttctttattactttcctataatgaaacatagtgttaggacactactacaaaaataatttatggtgtcacttttaaaataatgacaccatagggtttataattaataaaggtgacatatcatataaaaaaccttcaattgaggtagttagatgatgttagttttatatttttagtgtcattttttaggaaatgacatcatataaaataaaaaaatttaagtattacaactcaatgagcctacttgagcccacttttagaattaataatgaggaacaatatataaaaagcccattgtttccacatgccacccataatccaaaaaatctcaatatagaaaccctatatataaaaccataatcttcttctaccttttttctcacccatagtcaacatgctcacaactgacattcttcactttgtatacacctaggtaacccaaaaccttttagatctatcatccttttttcttttattaatgtcattatatttattgtttcagcatctttgtattatggtttttatgaactgcgttttcttgagttgtatggaagaaaaatttaagtttaaacttctagcataggagaagaaacctgtagattaattgattttttaatctgaaccaaacatatggccttctccttaaaaacaagtgaaaaccaagaaaaaaatgaatgatttttaatatgtatttgtgtgagaatgaccagttttcggtatcaagatgccttgtttagcaattctgatggttgccttaagttttcaaagtgactttggggtcccaaaatttggcccattgcttaatcccataattcaaatgttttggttatgagaatgttaacaaattctaagcccacagtgaacttttggcacctctatgacccatgaatggaagtcatgcgatggccacgcgctatacccatcttcatctaaaaacccaactctccaaaaccctatgctctgttcgcgctacctctatctcactctccagtttcccctctcccacgcttatctcttgctatcgaattgatcatagattccaaaaaatcttggataaattccgaaagtatttctgaaatttattttaggtggagattcattaagattttgttccatttgtacataatataagtgatacatggtggctctattgaatttgtagatacggtataggtcgtagcaggattttttcatcctggttagatcaaaaagctagggtttgtttcacatttttctcag

SEQ ID NO: 13674 - DNA, 1240 bp, Vitis vinifera
  Intron number 10 from transcript GSVIVT01029626001 (locus GSVIVG01029626001) derived from phytozome v7.0 (chr-ID chr 9; pos 20519798 to 20521037 reverse strand)
tggacctgggttctttaggtttaaggcagaaataggtaacctttgccacagtaacttatttttcagatttttatgtggtttggttatctataggtcaatatctctatgaggatatctaacatctccacacccatatgcatacatcattgatgatatattttcattttgtgctttggtttaccatgcactattatgcatcttattgttagaatcaagatattagccaccttatctgaaaatcaagtgactacaaatgatgtcaattcaaccttttcatatgtttcgagcagtgttagccacagatcaattatctaccattgaggtcaagctaagctttttcatatgattccaaaggtgttggtatcaaaattgtgttagcttgatgctaatgttgtgcggttcaaactggccgaagaccaattaactaccaatgagatcaagctaaagttttttatatgattccaatggcgttggtaccaagattgtgttagcttgatgctaatgttgtgtggttcaaaccatataaagaggttgagcttgaccttaatgactatgaatcggtttttcatatgtaaaaaaccaatgcattagtcttaacaagtggtgctagagccaagattgccgctcctgaggaaataatgacctaagaagtaaggttgagattgtttggctcaagatttggtgttctgctcatgaagtaaacctaagattgtattggctttaggattttgtgttagctcaataagtaagctgaggttatgttggcttgttgtttgtggttgactaggaaccaagcctaagatggtattggctcagaatttggtgtttgcttctgaattgtgctaacttgaggttgattagtattattcaaactatagaaagaggtttaacattatctcactagcagccaattggttttccaaagagaatcaaattagtgtttagatataaaccaaaaatgcttttgataatgtttttgagaatatgttatataacaaaaaaaagatatttagtagaaacaactaccatgtgttaattgtagaatcggttgaagtgattctctagattttcaaatgtcatttctgcaactttgtctgataccaaattttgctatggatgattgttcaagcaatagaaaatgcttctaaccatttaagaataaactctcaattagactttaaattagcactatttggatctcagtgtgttgatggtggcaagttgtatgcaacagatttca

SEQ ID NO: 13675 - DNA, 13976 bp, Vitis vinifera
  Intron number 6 from transcript GSVIVT01034376001 (locus G SVIVG01034376001) derived from phytozome v7.0 (chr-ID chr1 0; pos 17203361 to 17217336 reverse strand)
gtaccacaagttgtcgtggtggcatcaactaataggttattgttacaccttttgttttaggggctctctctatttacttatttggtcatttcattaatatttctatatacatatatgattttctacgctcaattgtttgttgaaaatacatatgtatatatatatatgtatgtattctttattttattcgtctctggagttactagataatttggaaaatattattaaaactctgttgttatagccatagaagtgggaaaaacatgtaattgtgtttaagataaacttggctggtaaaaacatttttttcaaggttttctattttcatggttttgttcaaatttgaaggttttctaaagcctataaataaggctaattgggggtctgatggcaaagttttttgaagtggagaaaaaggctttccaggtaaagtttgaaagctttaatgggggaacctagatctcaataacaaagagaagtcgaggttttgttgtctcgataggttttggagaggaggagttggattggttgtcggagcatttgaagaaagttgtggagttggaggcttctaggggttttattcgaaagattaggggcaagactaggactcatttgatggagatttgtttcaatagtagagggagatttatgaaaattacagaatttgttacaaagaggaaacctttagttctagttgttcctgagggtgttaaaggaaatgggtgggaagcccttaggaagacgatttcttcaatgcaagacttgtctgatcaagttgtaagagccttgaaggagacgattgaagattctcaggtgagtaagggcatttatagaggaggtcggtcctatgcagatgtggttgcagaggaaggacctaggaacgaagctctgttgccagttggaaaatgggtcagagctgtaatttgtgaaagcaaaggaaaagttcaagattggttttatgtaggaaaagctattgcgaggatgatggatatgaaaggaatggtgtctgtaacccctatttccgcttacaaggggtgcttttgcgtggattttgcaaggagagctgattggtttcaagatcaggggagtttaatagtgagagggcctgtttttctgaggagatggtcgccaagagaaaatacgattgtatttggaaaatttagaaggggttggttagaactaagaggccttccttttcatttatgggacgaggttcagctgagatacattctgcagaagtgggggaaggtaacgaaggtggcacgagactctctaaagcttgtagacctgtcgaaggtaagttgtgggaggagatgcttccaaatgtcgtgctacccgcgctgctagaggtggaagatggggcctcgtcgttcacggttgcaatttcagtcatcggagaagttgaaggagacgaccttctctggtttgagtcaactcggagcaatgacgagttgatgttagcgggaggttgcgtctctcagaggccaaagaactctgcggggctacgtgttactactagggacaatgagtgctacaattggaggactcttgatcgttcccgttctcattcttcagtttcaaatttggcggagaaaggctacggagggagtctcttgggcccagcggtgggaagcgttatcgggccaacaaagctagatgccttgtttaaagcccaatctgttagggcccagtttggggcgaagagttttgggcctcctgctggtccaacccacgaaacagaagtaggatcttttaatggcagccctgtagcacctttgccctcaaagttccaatgctggggatcctctgcaaaggaggtaatgtcgattgttcactctcaagagtcgtcaaagataaaaggccccttagtctctgcaaggcgttaaacaagaagttggcctccaagcctaaaggtgtcgtcttttgcactgaaacgtaacctagatgggggtggttcggcggaagcaaatcttagccattttccggtgcagttcagtctccaataagggcgttctttctcctgttccagaaatttcccaagatatcatcggggagacaaagggagacgaagggctttcgcgttgcagtatggttaacaaggtgtgtcttcctttctcaacttcctctgagcagggccatcctttggctggggcttttgttccaaaatctcttcctgtctcctctgtttctgctgtttcctcttttcggtgccaaccctttttttcgattccgttggagtcaaactttgcttctcaggttgttccctttttgaattctcctggtgttgagcttagccgttgtgttggcgtgcccttttctgaaggtgtggcgttccccttagaagcctttaaccgaaattttaaagactgtcctttccttagggaatcacttagtagcccgagatgctttgcgtctcaggtaaggtttcatccccagagttagatactcccaccctcccgttggaaggttttcagattgagggcctcacgcctaggaagatggtcaaggttcagtcggttttagagagtttgaggattagaattgttagagataatggaaaaggtgtggtagtagagagcaagagtactccttctgcggacaaggtctattttagaaggaagagaaaaaatgattgtggaacccagggagaggcttaggtttggttgcagcttgtgcttggttttttgtttacatgaagatcttaagttggaatacaagaggattaggttccaagaagaaaaggaggactgtcagaaggtttttaagttctcaaaatctagatgttgtgatgatgcgatggagaagagcgagagagagagggttggagagagagagagtaagagcgagggaggagagcgagtgaatctgtgtgcgagcgatggtgcagaaagcatcgtccgcttggagccttggaacagccggaggaagagcagcttcgaggtggagtcgaagaccttcgagatcgaggtagaaaagaagaagggcaaagtgcaagtcattattgtggaaaggaaaagaggggtgtcgtcgtgggttaagatgggttcggatagtctagggctttttgtggaaagtttggctctatgcattaaggacacgtgaactggcaaatggataagaaattagaaggaaagagggaggatctactcgctgttgcgtgatgaaaacaaggggggatgcttcatccgtctgggtgtcgaggatctagagaagaaaaggttcaacatctttatccccaaaggaagaggagggaaagggggctgggtttctatggtggagacgcttagggctttgggtgttgctacggagaggaaggagagtcagaaggacgaggcgatgccgtcggtgcccattttagggaaaagttttgcggaagtggttaatctgcaaaatcgcaaaggcaggtcagtggctagggtggaagtaagccacaaggatctcagccaaaatctaaaaaggttggatcactgcctcgttggctcgtgggatccaaaatcagtgaaaggggatgacttgagaagttgggggacccaaatggcacaaacttgggggttgaagggcaacttaggtttggctaagttggaaaggggaaaggtgctgctggagtttgagatggtggttgaagccgaaaaagctctaaatctgggaggaattttgctagggaagacatttctgcaactggagaaatggagccctaggacggggtgtccgatgaaaagagagaagaaaaacgaggcatgggtgagaatcgtggggttacccatctctttatgggatcaggccatccttagaaaggtaggggagaagtgtgggggatttttagctattgattctcaaacggagaagctggaggagttgcaatgggcaaggattctggtgaagctaaacggcgatgacatccttagcgtggtggaaattggggtcgaaggggtgtgttattcgctaaccttgtggtgggaggtaaggccggtaatgagattgttgccggcagagaggagggggaagaacagcggagcagaaaggagaggttgagggtgacatctctgcacgcgcgtgttggaagaggttgacgacgcaaggatcgagacccacttgcagtctgctgatgggagcgggggcagataggtgggtcggggcttcattgggctcggtcttggggcctcgttgggttgtcagtgggggaccaggaaggcctacaacttatagggggcccattgggcttgacccagtcttatccccttttcctaaggttgggtcgtcttctattgggccttcgtctttggagggctctaggaggtttaaggccttggaggccattggggcgcctgggctggctaggatggacgactgccgaggcccatcccaatctttggtgggcagctttggtgtggccctgccactggtgtgggctggcccaagtcttttgaggggttcagacgctgaaagcttttccttctaggtgaaaaatggccggcggaagcaaattgaggaggaactctattctgtggagagatcaaggactgatagtgccctaattgaggaagcgtcgaggtatgggtgtgctcctaacccttgtggtttgttttgggtcctcatcttctctttctttctttttcggtcggactccattaggggagtattgcgatctttctggggacgatagggtgacttcccagagggaaatcccattacgcatgctcctcactccgggacccctagaagaggagaatgtcagccgctaggaattgacggaggttatcaatggctgcaaggaaaactgtggaaaggagttgtgtttagttcaatctatgccacgagaaggaaagggttgggaggaggatagttgggaggaaagtgatatggccaaattcagtaagtttttggggttttcgatagaaggtctagagaaagacatttcggattttttggttaaaatctgaaagagaagggaaagagtccacaacaaaaaccttctagaaaaatctaagtttgaaagggaattgaaaagattagagtgctcaattaactacgagggggggaaaaacagaaatgtggaatgcaagtaagagggtgtcagatcatggtagttaaatgaagctaagactcttgagttggaatgttcgtggagctaacgacagttccaaaagaaaggtgattaaggccatgatcagaagtcaaagggtggatttgttctgcatccaggagaccaaaattcaggcaatgacagaggggctggtgagaagcttgggtagtggtagatttctcaattggggtaccttggatgcccatggttttgcgggaggtttattgatttgctgggataagaggaccctggaagtgcttgaaatagaggtgggaaacttctcaatctcttgtaggctgaggaacgtggaagatgggctagtttggatgtttactggtgtgtataggcctttctctatagaggaaagggagtgtatgtggtaggagataggggcgattagaggtatttgggatgatccttggtgtttagggggtgacttcaatgtcatcctatcccagagggaaaggagtaatcagggaaggctaacgagtgcaatgagaaggtttgcccagattgttgatgagttaaagctcattgaccttccattgcaagggggtgtgcttaccaagagtggggggaggaataatcaggcttgggctagattggataggttcctagtgacccagaattagcttgatcatttcaatggggtcatgcaaagcaggctgcccagacctacctcagatcattttcctatcttgttgatggggggtaggttaaggaggggcccttccctgtttaggtttgaaaatatgtggcttaaagctgatggctttacggaccttcttcggggttggtggcaggggtttgaggtgagagggagggccagtttcagattagccactaaaatgaaggagctgaagcaaaaaatcaaagtgtggaatagggaggtgtttggtaggctggaagctaataagaactcagctcttcaacaagtggagttctgggatggggtggaaagtgagaggagcctttctgaaggagaaactgagctaaaaaaaagaagtcaaggaatcttttaaaaagtgggttttaatggaagagacccactggagacaattgtcaagggagctgtggcttaaggaagggaataggaacactggcttttttcataggatggcaaatgcccaccgaaggaataattccctggatagaattaaaattaattgggtgtggatgactgaggaccaggaggtgagggaggggatagtgaatgcttttcagtatttgctctcagaagagccaggctggagagctgatattgaggagctgcaccttaatcgcctcaattcccgtgaagctgaagtcttggagttgccttttactgaagaggaaatttactctgccctaatggaaatgaatggtgataaagctctaggcctagatgggttcacagtggctttttggcaatcaagctgggagtttgtgaaggaggagattgtggacctgtttaaagagttttatgaccagagatcttttgccaaaagccttaataccaccttcttggtcctcatccctaagaaaggaggggctgaagacctgggggatttctggccaattagtttgttaggggggttgtataagcttttgactaaggtgttggcgaataggttgaagaaggtgttagacaaggtggtttctggagatcaaaatgcctttgtgaggggcaaacagattttggatgtgtcacttattgccaatgaggtgattgatttctggcacaaaagaaacgagaaagggctgatctgcaaattggacattgaaaaagcctatgacagcatcaactggaactttctcatgaaagttttgtttaaaatgggctttgggtcatggtggatggagtggatttggtggtgcatctcaaccgccaaattttcagtcgtgatcaatggggtgcttgctggcttcttctcgaattccaaggggctaaggcaaggagatcctctttctccgtatctctttgtgttgggcatggaagtgctaagcaatctgataagaagaacggttgatgggggcttcttgtcaggctacaaaattcgagggagaggggaagtggagatgatagtttcccatcttctttttgttgatgatacaatcatcttttgtgaagctaggaaagagcaactatccactttaagctggattctggcttggtttgaggtgtcttccggtctcagaattaatctagataagagcgtcttaattccggttggtgagatggaagaaattgaggaaatggcagtggagcttgggtgcaaagtggggtttctgcccactgtttacttggggctgccccttggagcccatcacaaagctatttctatatgggatggggtggaagagagaatgaggagaagattagtccagtggaaaagacaatatatatcgaagggtgggcgtatcaccttaattaagagcacattggccagcttgcctatttacaatctgtccctctttcaaatgcctaatattgttgcaaataggctcgaaaaattacaaagagactttctttggggagggggaagcttggagaggaaagtccacttaattaattgtgaggtggtgtgcactcaaaaggagaagggtggcctaggcattcagaagattgatcccttgaacaaagcattgttgggtaaatggttatagagatttgcctttgaaaatgacaatctttggaagatggtgattggggtgaaatatggtcaggaagattttgggtggagaactaaagaagcccgtgggacttatggagtgggagtttggaaggagattatgaaggaggcaaagtggtgctgggatagcataaagtttaaggtggggaaggggactagagttaaattttggactgattagtggtgtggcaatgcggcgctatcccaaactttcccccagctttttgccttagcggtccataggaatgcaacggttaatgagatgtggaatcttagattttatagagattttaatgattgagagctggacttgattagaggattgcttaatatgctcaaggacttcaggatatctttagaggaggactcagtgctatggaaaggtgggggtcatggcaaatttggggttaaggatgcttataatgtgctggttgttcccaatgcatgcgccttctcgactaaatgcacctgggtggacaaggtcccaaccaaagctgccttttttgcttgggaagccgcgtgggggaagattctcaccttgaataggcttaaaaaacggggatggcaactccctaatcgctattttttgtgtggttgtgaagaggaaaatgttaatcacattcttttacactgtatagtggtaagggccctctgggtgatcgtccttgcccttgttagggttcagtgggtgttcccagagttagttaaagaggcgttattcagttggagggactcttttgtggggaaaaaaaaggaaaaagatttggaattccatcccgtcgtgtattttttggacagtatgaaaggaaatgaatagattagcttttaggggaggttctttagctatacagaaactcaaaaattcttttgtatgtaacttgtggagttgggctagggtgtatattggagaggagtcctcttcgctcttaggctttttggagtggctagcggccacttaagggtgggtgaggttgcttgttttaggctgatttgtatactccctgtatgctttgtggcctttgccctttaatatatttgtgattatctatcaaaaaaaaaaaaaaaaaatctagatgttgtgatgcttcaagaaacaaagagagaaacttgggataggaggtttgtgagtagtgtttggaaaggtagaagcatggagtgggttgctcttcctacttgtggggcatcaggggggattgtgattatgtgggattcaaataagttcaagtgtatagagaaggtgttagaatcttcctctgtgaagttgaactttggtgaggaagggtctttttggttaacttcagtgtatggcccgaataagcctttgtggaggaaggacttttggttggagcttcaagacctgtatggtctgactttcccaatgtggtgtgtaggaggggattttaatgtaataaggaggatctctgagaaactgggtgattctaggttaacattcaacatgaggtgttttgacgagtttataagggagagtggtttgttggatccccctttaagaaatgcggcttttacttggtcaaatatgcaagttgctcctatttgcaagaggttggataggtttttgttttcttctgagtgggattactttttctctcaaagtcttcaagaggcacttcctagatggacctcagatcatagcccaatttgtttggaaactaatcctttaaaatggggtccgactcctttcaggtttgagaatatgtggttgctctatcctgagtttaaggagaagtttagtgattggtggcaagagtgtacggttgaaggttgggaaggtcacaagttgatgaggaaattaaagtttgttaaatcaaaattgaaagattggaataaagtggcctttggagatttaagagagaggaaaaagttcattctttcggacttaggtagaattgatttaattgaacaagaagggaatttgaatcttgatttggtatcagaaaggacttaagaagaagggagctagaggatttgttattaaaggaagaggttcattggagacaaaaatctagggtcaaatggattaaagaaggggattgcaattctaagttctttcatagaatggccaatggaaggtgaagcaagaagttcattaagtcttcgatttcgaagagggggggtgactttaagcaacattgaggttatctctgaggagattgtaaatttctttaggtgcttcttggagggttgaagggttagattgggtccctatttctagagagagtgcggtttggctggacaggcctttttctgaagaggaggtatgattggtagttttccaattgaataaggaaaagacccctgatcctgatggttttactattgcagtatatcaagagtgttgggatgtgatcaaagaggatctcatgagggtgtttcttgagttccacaccaatgggataataaatcaaagtacaaatgcgaccttcattgctatggtgcctaagaaaagctaaacttttaaaatctcatattatagacttattaacttggttacaagtttatataagataattgctaaggtcttattagggcgtttacgcaaagtcctccatgaaacaatctttggctctcaaggagcctttgttgaagggagacgcattctggatgctgtgttgatagtaaatgaagtggtggatgagaaaagaaggtcaggggaggaaggggtagtcttcaaaatcgattttgagaaggcctatgatcatgtgaattggggctttttagatcatgtgctagaaaggaaggggttcaacccgaaatggagatcttggataaggggatgtttgtcttcatcaagttttgcaatcctagttaatgggaatgcaaagggttgggttaaggcctctagaggtttgagacaaggagaccccctttctcctttcctttttactttagtagcagatgttctaagtaggttgatgttcagagcagaggaaactgggctaactaagggtttctttgtggggagggataggactagagtgtttttgctacagtttgcagatgacaccatctttttctctaaagcctctctggaacatcttcaaaacctcaagattatccttttggtttttgagcaagtatcaggtttaaaaatcaacttagaaaaaagcacaatttcaagtattaatacaaggcaagagttgttgtctattttgaccttggttttttattgtagagtgtcagagtggcctttgtcctatttaggtcttccattgggagggaacccaaagaaaataggcttttgagatccggtggttgagagaatttcgaggaggttggatggttggaaaaaggcctttttgtctttgggagggaggattactttaattcagtcaggtctgtctcacatccctagttacttcctctctctcttcaaaatcccagtatcaatagccttaaagattgagaagctacaaagggattttctttggtctggggcgggggaagggaagaaagatcatcttattagatgggatgttgttagtagaccaaaggagttgggaggtttgggttttgggaagacttctttgagaaatattgctcttttagggaaatggctttagaggttacctagagaaagaagtggtatttggcataaggttattgtgggtatttatgggatacatcctaatggatgggacgccaacatagtggttagatggtcacacagatgtccttggaaggctattgctcaagttttccaggatttttccccttttgttcacctagtggtggggaatggggagagaattcgtttttgggaagatctttggtggggtaaccaaactttgtgctctcaatttgctggtctttatagagttatttatgtgaaaaacctcactgtctcaaatgcccttggcaattattttccactgtcttggaattttaattttcgtcgcaatcttactgattcagaaattgatctcctttagagattaatgtcctcctttagttcagtgtttttctctcctttggcagatttaagagcgtggtctttgtcatcgtcagacttgttttcagtgaaattttttttcttggccttgttaaaagtctcaaatcctatcttgttccttccggccaagttcttgtggagctcaaaagccccctcaatggttagggccctcgcttggttagtagtacatgagaagtaaacaccaacgacaagttgcaatcgagaagaccctacaaatccctctgtcctcaatggtgcattctttgcaaaggaaatggagaatcaatcgaccacctttttcttcattgcttgttaccattggactctggcacaagttgttcaatctagcaaggttggcttgggtccctccaaggaatattgaggacatgttggttattgcttttaaaggtttgggaaattcattaagaggcaagacactttggcaaatcgcttgccttactttgttatggatggtgtggcaagagagaaacaataggatttttgaggataaggggagaacggaagagatgttatgggacttgattctgttcttttcctctctttaggcctcttgtactgcagtttttagaggagttcctctaagtgttttacaattcaattgggctgcggtttgcacttcaaaagtttgagagtgttggggtttctctttgtttttagttttctaaagttgggtggtttctactttgttcagtttttgtttttgtgggaaggacctctcatccttctcttgtttttttctctttctcttgttcttttcttctattaatataattttcttcgtttctgatctaaaaaaaaaaaacatttttttcatatacactcttgtggcttttgcctaaatatttgagtgtggaaccatttaaacaagaaacatgaattgttgtaagttattataagtttttatgcaccctggaaatgaagaaaaaaataaagcttagaactcaactgctactaggaaaatcgaaagaacactacaaaataatggaacttacgtttttcttttttttttctttcaaaatttataaatcaaaagaattaaatcacttaaaggattctaaacacatatcaagtcattcatttaaacaaataacttcgatctccaaggccttcaaagtcaaggcattataagaaattggttaaagaaggatttcttgtgctttttcctaataatcaatatatactaatggatttctagatctagaagattttccttttccttttaggtcaattactgccttttagccctttccaatacagcataacttaacctgttcccaacgattttgcttcagctacattaatccttttttgcctcccagctttttgagaaccatatactccatttttcctaggaaattgtattttctaattgcactggcctgaatgttcttttcaactcttctcttgtccgttggcacctactattttgtatcaaaacttcactctcccagacttatacgctaattggccaaatgcttctcatattttcttcaactattctatttctaacttctcatgaatgcattcatttttattttctcttttcttgtatatgactcatccagattagcattctcatttaggatataaaaatcatttagcatttcatttcttaacgaatcaactattgccattataatagttatcatatcagcaatcagcaagtcaagatggtgggaataatcttggcatagttaaccacatttaagcaaggagccagctgagaatttcttccacttctatttttaaaatgaaatattttctatatattggctataagatttgccagttattcccttgtttttgtttccttcgcaattttccaatagtaccaagattttaaattacattctttgcttcatattttcagtgtacatccaaatattctatacatggaacttagaaaaatcttagaaaaattctcatttgtcatctaaatgtgtttatgaattaaatgcctttatgctgacaaatataatgtagagaaacaacaggagcttatgtgaaaaaaaaaatgttttcagtagagtgttcctcaaaacaaacaggaaagaaatgtttttgcaccagatatgtgtaaatgaccttttcctaaaacaataaatgttagatacccttttatcattgttattattatttttaagaaaatctataaaactttcatttgaatatatttgttatttctggtttttattttattttattttatttttttatgttcatagagtgg

SEQ ID NO: 13676 - DNA, 5017 bp, Vitis vinifera
  Intron number 2 from transcript GSVIVT01000891001 (locus G SVIVG01000891001) derived from phytozome v7.0 (chr-ID chrU n; pos 3516304 to 3521320 reverse strand)
gtccagagtgttggtaaatcggagggttggtcgtgcccatcaactcccattgtattcgtcgtaggcacttaggtgaatgcactaaaaggctagggtatgtacctttcctaacagcaattgcttttaggagagttggtagcacctgatgtcctacaagtggtatcagagccaaggtcacgggttcgaaccccaagggtgtctctaggggggagattgttggaagatcgaagggttggccgtatccatcaactcctcttatgttcgccatatagccttttgctacaaggcgtgccttgaacttgtctacctctccatgctcattaagctttgttttgtaaatccacttgacaccaatcttctttgcacctgcaggtaagttgattagcacccaagtatcattcttttctatggattttattttagaatccatagcagctctcgactttgcacttttcacagcttcttcaaaataaaagggatctccagatgcaaacaatgctatatgagtttcatcttcttcttcagacaaaccttcacccgtttcataatctctcatccaaactggtggacttctaactctcctttcattggaactaggtgaactctcttcatctaccagatttggagaaacaaccccaacctcttctacactacttccatcttcactctcgacctcaccttcattatttgcagcaacattttcttcattatctccccattctaacatagctatcacctgttctttatagctcttatcccaatcccaagacttgtcctcttcgaaaactacatccctgctaattacaattttcttggctattggatcataaagcctataagctttagactcttcactaactcccaacaacacacaagtaaaacgtttatcttccaacttggttctcttgatatcaggtacatgaacatgtgagatacaaccaaacactcgaaaatgttcaactgaaggcttgactccactccaagcttcatccggagtcatgttcttcactgttagagtaggacttcggtttagaatatgcactgtccaattcacagcttctggccaaaaagtctttggaagcttcttctctaaaagcatacttcaaaccatattcatgatggtccgattcttcctttctacaactccgttttgttgcagagtgtaagttgttgtcaactgcctcttgatgccattttctttacaaaattcattaaagtcttgtgaagtcaactcaccctcttgatcagtacgcaaacacttaatataggaacttgtttctttctcaacacaacttttatattgtttgaagataactaaagcttcagatttttcaatcaagaagtaaatctatgcctttcgactaaaatcatcaatgaagctaattagatacctctttttgttgtgtgagatcggtgtgatagggccacatatgtcagaatgaatgagctgaagttttgaagaagctctccaagtgctcttctttggaattgaatttctctactgcgttccaaccatgcaattagtgcatacagtttttgaagcttcgaattgtggtagtccattcaccattttgttgttttgaagagtccttaatcctttgtgactcaagtgtccaggtaataccagagatgtgataagttttttgtagttgtgtgaaagcaagctggtttctttggttgtggcgcaaccaacaaaataaacattctattggcagacatctctgcttgaatgatcagcccttctcaggatgatagattttacacttgttatgttgaataagaattgctaaacctttctcctgcagctgcccaatgctcagtaaattgttcttcaactcaggcacataaaaaacctcagtgactacatgattgaatcctttcactttcaaccttacattacccttacccatcactttcattttttagttgttttccagcttcactatctgcctgaagcgttcattgaagtcgcagaagagaattttatctctacacatatgattactgcaaccagaatctaaaaaccaaacatcctccttttttgcttcatttatctcaacataggacatcaacaacatcgcttcttcttctccaagctcagcaaaattagcctttttgtcccaacttgggcactcatattgaaagtgtccaagttagtgacatttgtagcattctacagtatctttgttgaaggattagtgtcctctacctctatctcctcctcgagaggatccgtgaccacgacctcttcctcctacactttcttcatgaattacctagagtgcttgctcttctcctttgtgcctatggaacttttgctagtgaacaattaaggaactttgcaattcattaattgataggagatcactgtcctttgactcttcaattgaacaaacaatataattgaatttgtcactcaatgatcgaagtattttttctactattgtaacatctctcatttgtttaccatgaactctcatcttattagctacagacatcactcttgagaaatagtcaaagacaccttcaccagatttcatctcaagagtttcaaactctttgcgaagagcttgaataatggattgtttcaccctttcattgccctaatacttcttcttcatggaatcccatatctgtttggatgtgttcttctgtaggatggtttctagaatcgttcgatcgatagcttgaaacaaataatttttcaccttcaagtctgttagcttcatctcatcaagcttcttctgttacgcctctatcaatactgctccgctttttggctcaacataaccagtctccacaagactccaatactccttagattttaaaatattttccatcaacatgctccaatgatcctaatgaccatcaaatcgaggaatagcaggttgcacaaaattcccttcagttgtcatctgtcttgctgctgcaaattacaaaagctactgctttaaacctggctctaatatcggaatgttgtgaatcaaaactgaatggaacaaaactgggaaaaatccacatctattgatcaacaaccttagctaataaaatagccttacaataactaactgataagaaaaacagcccacattttacactaacaaataacgtggtaaagagtagagaataagtcaaagctgaaaactaccctgcttataaaactaccctgcttaatagggattattaaaacagaaaaaactaaacaatcagaaaacttaaatcttgacactctcccttaaactaactgctaacaacaattagtttacatttggaacttcacaaacacccatcaactctctcagcttcagaaacaagtcaagtttgagaggcttaatcaacacgtttgcaatctgatcttgtgtaccacaatgaactaattccactactccttttttagtaagatcacgcagaaaatgaaagcgaacatctatgtgtttgcttcgtccatgcatcattggattctttgataatttaattgttgaactattgtcacaaaacatagtagtacaattaccttgtgtatgactaagcttctccaagattctcctcatccaaacagcttgacatgcataggatgttgatgctatgaattcagcttcagttgtggagaatgaaacaacaggctactttctaaaggaccaagacacagctccggaactcaacatgaatacataccctgatgtgcttttcctatcctccaaatcaccggcatagtcactatcaataaaggcaaccaatttatcattccctcccttcttgtagaagatcccaagatttgttgtgcctctcaaatatcttaacaccttctttgcagtctgtaagtgaagctcaattagctgccccatgtatctactaattaaactcactacaaacatcaagtcagaccgagttgctattagatacatgagactccctaccatttgcttgaagaatgttgcatcaaccttgacttcatttttgtctttgaagactttaaaactagtaacaatcgaactatggacagaattgctctcctccatcccaaatcttttcaacacatctaaggcatatttcttttaactggtgtaaatgccatcagtcttctataacacttcaactctaagaaaatacctcatctttcccaaatcagtcatatcaaactcatgcatcatagagctcttgaactcataaaacattgattcatcatttccagtaaaaatgaggtcattaacataaaaacacaaaattaaaattttaccttcttttcttgttttaacgaacaagtatgctcactgtggcacctcttaaagccttcattcacaaagtgtgcttctatacgactaaaccaagctcgtgaagcttgtttgagttcgtataaggttttcttcagtttgtacaccttgtgcagattgtcattttgctcatagcctcttggttgctcaacaaacacctcttcatttagctctccatggagaaaggctgatttcacatctagttggtaaattgtccaatgcctttgagctgcaagagcaataatcattcgaactgtatccatccttgccaccggtgcaaaaccctctgtgtaatcaaccccatgttgttggcaaatcggagggttggccgtgtccatcaactccccttgtgttcgtcgtgggcgcttgggtgaatgcactataaggctagggtatgcgtctttcctaacagcaattgcttttaggagagttggtagcgcctaaggtcctacaagtgatattagagccaaggtcacgagttcgaaccctaggggtgtcgctgggggggggggggggggagattgttggcaaatcggagagttggccgtgtccatcaacttgttggcagatcggagagttggtcgtgtccatcaacttcccttgtgttcgtcgtgggcacttgggtgaatgcactataaggctagggtgtacgcctttcctaacagcaattacttttaggagagttggtagcgcttgaggtcctacacaaaggttgagaagggattgccttgattctgagtgttgcg

SEQ ID NO: 13677 - DNA, 5018 bp, Vitis vinifera
  Intron number 7 from transcript GSVIVT01034468001 (locus G SVIVG01034468001) derived from phytozome v7.0 (chr-ID chr1 8; pos 20841451 to 20846468 reverse strand)
ccaagttcatatttctcaattctatcctcggcctggtatgctactgcttacctcatttaacattattagtttctatcggtccacttggttgtgatgcaaagattaaattgtgcacattctagctttttttgttctggtaatttgctttgactaattgtcatggatcaaatccaatcataggccatgactgccatagcccaagtcaggatgagtatgaagtactatatcaaactaatcaatctaaaatgtttgacctgcaatattgatcaaagctccaatactgaagtaatacatagtggaaatagctgtaacgtaactaaacataattttcacatcacaaataatttttttgtttgataggtacatatcacaaatatctctgtaggagcatgcaaaactacagcttccaacccactatgaacaatcttaatgtaaaagaacaatagtctgctagaacgtatagtctctccacaaataaactctaagataactggttaaagccaagggaaaatgaggccaactttgcaacttgatatgcttctctgatgctacacagactcagcaacatccctcatcctcatggggcataaaatttgtaaaaaatgagagctaaaagccaagaaagttttaagctgatgtggggttcaacaatggatatgtactctatagaagtattctatattgaataaaatagatccaagtttcatactagatgatcatggtttaatactaaccacaaaatatgtcctaagtatagatatgccaatgcattttcggatcatgctcttctcttactctacactaatacatattgaaattccaaaggatgtataaggatcagcaaattaatgccaccttgttcacttggatccaaatcacttgtcaaatacctgtttaaaaagtagctagtagatgatggcctttcttacttggtctgaagtctaaatgtctgaatttatctaaaatctgatagaaataaacatggaaatattattccaacttcaaatttcaaataaaagtgtaaatttttttatttttttgtattcgaacaaaatatctaaaaataggacttaaaaaataaatgatattagaacatctgaagtctattaagatgaacagcaagacaaacagggcctcaatcccttgcccaatgggatcaaaaccagtatgctcatatttaaatgcacgtatgatacagtggtgccaagacgaacacttaaccccttggcagtcgggatgtagtggtttctaatccagagatcattagatttccatagcctagtttgtagacccattttcatgatcatataaaagcagttgaaacaagtttttgcatgtaaatgaatatgctcagatggaatcattcaacacattaataagtagaaagaaaacattttccatattccaacttaaatcaattctataatttttcaaataagaaaataacaattctcaagccttcaaagtttaaactgaagctaatcatatgataagaaatgattaatgactcaaggttctaagttattcatgattaatatcataattagatatcctaatctcccaaaattgcataagatcaatcctaaagtcctaaggcctaaacctaagcacacaagttttgaaaaacacaaacccattaatcaacacatggttgtttgacctgaagagaaaccagttcggccaaagccatagcagctatttcaatgaattgttcaacacctgctattgagtttgtagatccacaaaatcaaaaactagccagagatgccaaaatacactagtcagtccattcactgaattagctgaccaactgaacaataacaccaattttggctaaaaatagccttaaaactcgtgcaatcctctaatgcaattcaaacctaatttaaatgctaaacccaatagtcaaacctatctataatcaattaacactagagtttaacatattttgaagctttgaaatcatttaataaccactatcaagtatttggaagaaaacagaatgtttaattggattatacaaaaagacttataaatgttattaatagaggttttagttgatgttttaggtatcaaaaatcatttcctgtattcaaagaatttactctaacaaacaaactgactaattgattgagagtattccacgtatgtgaagggctttataaacaaatttcactttgttgttggcaatggaagaaggattaaattttgaaaagatagatggtttggagacctatctttggaagagtctttcttgactttattctctatggtcattgcaaaagattcgtgggtagcaaggtatagaagcagggaaggatggttgttggattccctgcttcttaaggcaactccatgattggaacttgaagttgtggtggcctctttatcgagattgcaataaagcacaatcagagggatgaagaggatagaatgggttggaaggaatccaaaggtggcaaattctcaatttcctagctttggctagaagggagcatttttccccaagtatagtatggaatccctggactcctacaaaggtgggttttttgctttggaagttgcatgcggaatgattttaataattgattagctcaaaagaaggggatggataataccaaatggatgcttaatgtgcaaagttgaggaagaatcaactgattgcatgcttcttaattgctccaaagcaagtttcctatgtcaattggttttttctttatttggagtggcttagttgttgcactccacaataagaggaaccttattgagttgacatggatcttttgtgagaatgaaacagaaaaagtcttggaaggtcaccccctcatgcctgttttggacactatggaaggaaagaaacaaaaggtctttcgaagatgttgaatagtcggacgaagcactcaaatatgttttatgagtctttttttggaatggattagctatgttgattgggttagagtggacatagtttatcatttattgattgtgataagctatgttgattggcttagcttcaagtaaacaaagggagctttttttctgtttcttctctcttcttgttccttgtttgatggtgcctattatatacatcttgtgtacattagtgtgcccttcacttaggtgctattaatatttctttgtttttgcttatatatatatatatatatatatatatataaattgaatgagattattccaaaaacaattttacttactaatctcccctaaatttcaaaccaaatttccagtttataaatctaaaattttttaatgtctttagcaattttagcaaaatgaacctgtgagcttttgagaattggaattaatttattctgagaattgagaaattacaaataaatagggaaagaatatcgcataaaaactcaacaacctaacaccctaacaaaccctgaactaaccggatttgatgaaacagaataatcagaaaaataacaactagatcttatccctacaaaataggaattcaaatttatttcctaagtcctaaatctccaattcttaactaactcctaaatctttgacactcctcaagttggtgcatatatctatcattcccaacatgttgatacaaaactcgaagttacaccttaggagtcccttggttaggatgttgtgttgtacaaacaaacgacaaacatatagcatcagcctcaagtttctcttttatgaaatgcttattaattttgatgtgttttgtcttgtcatttgtactggttgtgtgcaatactaatacctgctttgttgtcacgataaaacttcataggaagagtattgggcctccttagttcttctaggacacatttcagcataacatcttgtaaaacccatgtgcataggattttgtattagagagtgaattgcttttgaggcaatatcttttatttatatgcacacgatcaaagctttcctaaatctgtggctgagttgtggttcttaaggtatgctactttggtggagttggtctaggttttgcaacactgatgccctatctgaaggtaggatagtttgttagctgggttccttggttagagggagagttgttcttactcataatatgtttttaggagaatcatgggagactcatattgtgagatatcttaaatcttatttcctaatcttaacatatgttaggcattgattaattggctaggatctatgagggatattgcttcatgtatggtaaatattaatccttaaaaaaaacgcaagcacccttccattaaattagtctgccctatttaagagaggagagactttctttaggaatgtttgtgaaaatcttgccaaattttagagagaggctctagagcctttgcagagaaaccccaaggatattttaagctaaggtattttaaaacttaagtagcaagtctttgaaagacaatctggagagctctttatgactcactagaccaaggtagtcagtggcttggaagggagctcctctgtgggcctgtcacaactaacactctcaagtaggcttccttagctgccactccctcctttatctaaatatctcacccatcctaccacactattattgcaacactgttgttgccgcagttacatattgccatcttgacacctcaatactaagagtctaagttaactcctctatcaaccaagtcccaaaacagtcggtcatcaaaattttaaatttgatctaagaattaaagttgcacacagtgaacttccaaaaggatctgagttgttatgcatgcatgcacaatgttacaggggtcagtttgtttcacatatttttttggtatttgatgtctagacagtactatgtttgagtacactcatatatgtttggttttcatgagagatctgaattttagtgtataaaaacattacaagtcttgaatgaattagacaacaattcagccattggatgttaaactgtaatattgaaactagtttgtaatcatatactgcttgtagttaaatcttggttttctgtatgcttcttgaatccagggacacctgcggccagg

SEQ ID NO: 13678 - DNA, 3471 bp, Vitis vinifera
  Intron number 8 from transcript GSVIVT01016918001 (locus G SVIVG01016918001) derived from phytozome v7.0 (chr-ID chr9 ; pos 2561956 to 2565426)
aggcaagtttccctacagtactagcatttgaattattctgatttcaaactttctaacacatgactgacacattgcttgatggaaacaaaaattcaactttgacatggttgggtgttgatgatatgaatgacaggctcggctgttgtcaacaattcatcatagaaacttggtttctctaatggggtactgcgacgaggactcaaacatgttgctaatttacgagtatatggctaatgggaacttgaaagaacatttatcaggtatctaattgtctttatacccctaaaatgaaacctttaattttgtgatttatttctctttatactcctttgaaaaattcgaaatatttggataaaccattgaaaaattctaagatagtatcaaaacactgactgaaaccaatatttggatctatatattctttttctgtgctctatttatgtaagaacattatttggtatttttctttgtagcaaaagcatattagagatttaagttatgtgccataagtgcaggtaaaattgggtcggtcttgagttgggaacaaagacttcacatagcgattgaggcagcacaaggttagaagatgaaccatacaaattttcttatataaaccactagttttttttttcatatttttccctctcaactaactgaagtggaatttgacgagtttgcagcactggaatatttgcatgaaggttgcgatccatccataattcacagagatgttaaggctgccaacatcctattgaatgaaaaaatgcaagccaaagtagcagattttgggtggtccagaagcatgccctctgaaaatccatctcatgtatcaacgacctttgttgttggcacttctgggtaccttgaccctcagtaagtactgatctttgttacttcactgaaatgcagtgccattacattgatgatatctcaacaaatctggaatatagtacgtactagaacttgaaaataaagtttttgtttccattttgaattctctgcagatttttcttacaaggtcagtatgcactgttcactgataatgttatcttaccatgcaagaagtttaagaaccaataatggaggaatttagttagtatatatacattactctatgagaattttctgttcctgcattcaacattggtgtggcttgcactaacagtaaattttatgattataaatgtaactttataaaaaatttcaaagtttctaccatatattaacgagtttttcataaccatgtaagcatgttttaaagtcgtgaatatcctttaagccagatgtgggactctgtttagccccacaaggtatgtaagtctgcttggcgctgcattcactgcagaatatgatgaagacaccgtctttgccattgttttttctttttttctcttatgagcaactgagattgttttgcatgatttttaatttatgtaggtacaacagaactggacagttgactaaggaaagtgatgtttatagctttgggattgttcttttagagcttatttccggccggcctgcaataatggaggaaaatcgcagcatattggattgggtccgtcccattattgaaagaggagaaatagaagacattgtggatccaaggttacaaggaatcttcaatactaactctgcctggagagctatagagacagcaatgtgttgcgtaccattcagctccacagaaaggaaaactatgagttatatagtgagagaattgaaagagtgtctgaagctggtagagatgagtagcacttcaaatacaggaataagcattactcaacctattggacctgcaaccggtcctcgagcaagatagaaatgttgactagtaatgtgtgttagtgtgtgcatagtactgttgtttgtttacttaatatttctgaactttcatgaacatgcatatgtactttaaatgatgatgttcttgcctttggaacatgcatatgtactttaaacgatgttcttgccttctttgttataatttgaacccaatatattatgtgttagtctccttaggcatgaaatttttttggacttgttataaattttaggttttctatttgaattattgaaagtatatatataggaaaaaaaaaaaagaattattgaaagtgtatatatggggaaaaaaatggaattcaattcttatttgataattgttttaaaaaataatttttaaaaaccgttttggaaacaatttttaaaaattgttatttgatgttttgtaaaataaatatctgtttgaaaacttgaaatgttttaaacttcttttctaagtttttaaatatgttttaaaaataacttttacatgtagtgttttattttaaattattttccatatttatgtaactatttttttaaaataactcttataaaataaataaaaataattaaaagatgttatttgaaaatatcatattttctatttttaagaataaaaaactattctttattttttttttgtccaacatgttttcttatttttttgttatgtaaaatagaaaattgttttcaaagacaattattaaacaaacctccaaattctcatatttttgctttgctatgaaaattatgaaagaaaattaaatataataaaattatttgaatatttttatatttttaagttctttattttttgtagaagagaaatgaaacaaatttattgatttcaatttatgtttttttttccttccttttttaaggattttctttgaaactctcgtaattgtattaaaaaaattctagtaagaatttgaatttcttaaaaaaaaaatagaataattaaaaaatgtaattaaatgtgatgatataatgaactaattaatagaacctactcaaatttatcttaaaacattgaaatagagttacatggtatgtgaaaattttttaaatattaacattgtgtgagaataactcttgaattaccacttcgcattgtagagatgaatataggattaaaattaaataatataacaataaatattttaattaaactaacatgaattctatggtagaacttgaagataaaatgtggattaaagagcatgttgtcaaggaaagttaatatagaataagaatatatattatagtagattacccaaaatttcttaataaatataatttggcaaaatttcccctatttttatagcccattaaattctttttaaattaaaattttcttaatttcaaaatattaaatatctaaccttaattcaactaattaaaataactaggaaataaaaaatagttaattaacataaagtgagtattttaggggatatctgacccacttagatgatgcagagactttaagaatatgattgttattcttatattaattaatagttagagacatttttgtcatgggaaaaaaagtgcataatagtacatttacaaatactctaagagtacataaggttaagtatgagagaaaattcaccatttattctctctctttttttattt

SEQ ID NO: 13679 - DNA, 3544 bp, Vitis vinifera
  Intron number 5 from transcript GSVIVT01033182001 (locus G SVIVG01033182001) derived from phytozome v7.0 (chr-ID chr4 ; pos 9134882 to 9138425)
tttaaccgtgttgtgcacaggttatgaccagccacttataggaatctttcatgggaactagataactgaggaacccaaaagaaactaatgtatggatgttgcaaagccaatgcttgctttctatcaactatattttccatagtcaagatcatcctactctagtggcatagcttgataacatcaaatccatattgtgtagtttgtctacttacaatgctaacatattttgatccttatgtttaatagaagtggacttcttccatgctcaactagatccagatgcacaaaatgtaagtatggacttgggataaaaagtgaataactattccatacaaataatgaactgcactgaaattccttttctaatccatgggtttattttgcaatatgcatttgttttgtgtgtgtgtgagagagagagagatgtcaatttctgtatgtttaacctcagtgtatcatagtgggataaaaagtgttgagggaaccagtttcctatatctggattgtttttttaaagagaatattttaccttaaaacaacttgtccagaaacatcttaaaatagtttgcactttcatttccattccttgttttataaaaattgacatattttagaaaaattaaaaagttcaatttccagattcctgtgggagttcagaaatatatttcttaaaataaattcaaaattgcccttagcttttatttatttatttttgtgtagtttacatatgcactttcaatttggccaaacctaggtagttggaatttggcactaagataataataatgataattattgtattagtattttttgttgatattaacatcatacttctatatgtggcagctagagattcattgcatataaactacggtggagctaatgaaattattaaaaataactttgggaacatcaagtatgaaggagatatagatggtggaggaagtgcatcaagaaattttatcagtacaaattggggatttagcagcacaggagacttcatggatgatgatagtcatgatggagataaatatattgaatcaaattcctctgtcctctcaatgaatcactcagtgttgtacatgacaacacgtaaagctctcatttccctcacctattttggattttgtctgaaaaatggagattacaatgtatgcctccactttgcagagatagaatttacagatgaggaagcatatagcaagcttggaagacacatatttaatatctatattcaggtagccagttactatatcataagtgtggacctgcatttctcacgtgcgtccccacttgatcggcgagactcgctttttatttgtgaaaaattgattttttttttgaaaaagttggagtcgccacctattttatttttattttaaagggaaaataaaacaagaaagaaaaatcctataaaaaagtgactccataatttttggaaaagcaagtctttgaaaacccaagtcttggtccggggatcaggttacttattgggaaggtacctctaggaggtagcacccctataagccctataaaggtctctactgacaaagttaagggaagtgtgaccattaatcgattaattatagatacctaagtaagcttggtgattttaaaataacatgttaacaagaaaatcaatcacaatcatatagaagatttagggtacatacctgaaccacttcttaagcgctatcatgaaacatcaattgttagtttagacaatatatcactcagcatgcattttatcatgaatattcaaacgatgtaacaaatatcgagacatgccaagcattctcaaacataggtataattcacaatgataattatatttatagaatttagaaggtagatgacaggggacgtacctggatagcatagtgtagaccctcattaggggcacatttttttctctcattttgtgcagctcacttgccagctggagggctcctacaaagccaagtgttgcctcctagttggttgctatggaatcaacctagtggagttgatggatgaatgggaaagcaacacgaataggaggatatgctggggatctgcaggccgttattgggtagcaggccagctgcaagaaagggggtctgggctgccgttggagatttttttcagagagggagatgcttttccattagagaaggggctgcagagatctttttggagaagagcttttgtgtggtttttttgagtagagagagatagcttggagagaaggctggagagctttttggggagctttgggcagagagcttcctaaagggggtttttcatcttttctgagacagaggcttttagctgctgttttctggcagagggaaggagccatagtctggagcagagaaccagagagagggatctcttgagctggagagaagtttgaggtaccagagaggaaggagggtaagcttgagaggggaatcagaggagaaaagggtgagagtttgagggtgattttctagcttagaagagaggctaccggaggagagaacaggaagcaacaaactgtgagaggtagtggtgctattggctgccgtttagaggatactctcaggtatgaatgtaacattgtttatggtttgatttggattcctattactcctctatgtttcttgttgatatctgaatgctggttagcttgtttgggtggataaatgaaggccacttattgcctgttgagataaaattctgcgttcatgcccaacattattaatcttgatgtgccatgtctctcttgttaaatacccaagaatcattctaacgttcatatttgatgctaatctactcacctgaaaggaagattcactgatgaccccatgaagtgaattttctaaagctttttgtatttattctttttcctctatgctctgtttctccaccttcctctgccttctagtatttgtccatagcatgcgtcaaatcccccatctctacttgtagaggtaaggcattacaagacataagttctcagtttctgagcatgaaaagctgcagtggattatcccgttgggtctggctattttgactgaaatattcttttgagaagtcaaatgaagaagatgtctctttatcactccttctctggttgtcttgatggtgcttgatcatgttgatttggcctctgtgtctccctgcaccgagacgagtcagatttcaagaggagtggagcatgcagtagggatgaaaatgacaacggcttctcattcccactaggctacaatagtttagtggagaggtatccacgcattggaaaggatcacttggtaaagctcctgaagcagaggcttttctaacagaaccatagaaagacgaatttggcatgtccaaacagggtgcaactgaggttatatttagtgaggtggaaaatgagaatccaaaggaagcagattggtttccagcaccagaaaggcaagaacgaattgcccaattgcaagcaaaactgttccatgcagctgcaccacccagtttagttgttcagatggatggttcatatgtaccgagaaataatctggaggaagcaatcctacttttg

SEQ ID NO: 13680 - DNA, 2689 bp, Vitis vinifera
  Intron number 2 from transcript GSVIVT01023507001 (locus G SVIVG01023507001) derived from phytozome v7.0 (chr-ID chr1 4; pos 10808644 to 10811332 reverse strand)
tgcaagcaatagaaatcgcttgctcctcgattcaggtacgaccatttcactttctgtctggtttctgaaaaaattgaaggataggaataaaaaatcttatctcgaaccccatatttcccgatcttatcgttgttcaaggcttggataagttaatatctttttttgatagtttttattgatggacaaataacagttcgggactccaaagttattttttcccatggttttctaggtaaccaaaccggttcttggaaaactgtgatgttcttagtgtctagacttggatttatgaaaaggtttctagtagattttatccatttgtattactgaaatgggaaattctagtaattgtttttcttaggattttaggttggatgactagttcctgaattttaatcgatgaatcaaaccagagaggaagttatttagcacttatagatcaaatatctaaatcaaatttcggtgatattttttaggttgtgattcatagagttgggtcactgaagtcagttataagcctacaatcaatggctctctctcatttgtggaagcatttcaggcacttgtgtcatattatatgcttgtgctataaattttttatataatgttacaaattactagctgaagaataatttgcatgattcattgccatctacacgcacacacacagaggcatgaagtcacatcgagcttgttagtgatattgtttgacttttgtatttcacattagataaaggagaactagaagtagttactattatcgtgtaattgaattttatgtttggaaattatatttcaaaaatgattttattaaaaacaagaataatttggacatttttgaaaattataattaaatgaaaatgtattttatgtgtttgacagaaagcatagatctcctacttcttcaaagagaaaacatattaacatgcaagagctgttcttaatcagttgggaaaaagtgttcttttatctttaatttgatctcattttatgagtctaagtggttaattggttctctatcgttggtttgggatcttacgctaccataagcatgctactccttttaattttgctttcataatcttccatactttcaatcataacatgctagttaaaataatattccgtggatataaaccaaccaacaaaggcaggactcgattttctgaaaattcagtagcttcaagaagcactttctgtgtcgtatgatcactttgcttgaagttgaagactcacacccttgtcattaaggagttatttttcttgattcctttccaatagcttcactatctcatccagcttgttgattaattgtactatgacctcttgctggtattgttgtgtggcagaaatttcattcaagcatgttgaagtagctttttgactactgcaacttcttttagaagtcaagcttgcataaattattctactccttatttgcatgtatctcgaacaaagaacttttgttttgataccaaaattgacttaggacaaccctaggggagttgtctacaatcaaacaaagtggggtggagcttgtttaggatttaaagataggaatcaagaattaaggttgtgacaatggggaaaaaagtgagaaaaaagaacgagaagatggagaagaaagacatgaacaccttagtgtcttgttaaggccttctagaagcttcaccttgaagacaaaacatggagtttcatgattagaaattgaaaggtatacaaaaaattgatattattttcataatttcattttgcagcaattagtcttaatataggctttagaaaaccctaaaacctcaagaagaccatgaaaaaaaatgatacttaattctttctaaaactattaaactttccgcttaaatagaaatagaaatttggaaaatataaacgttttaaaaactagaagtttttatactgtagacatttttagaaaacaaagattttctagccggtagaaggttttagaaaaatgtgagcttttagaaaaattgagttttagaaataaaagtttttagaagatagaagcttttggaaaatggaaagtttaaaagtataagaacagattataataagggatttttaaagacagctttctaattttatataaaagtcaaataaccatctagcaataaacttgatcctgaataacttcaatctacaaaattatctatgtacctttgatggagtaatttaggaatctttatttcctttcattccttgagtatatcttttttttttgataggaaacaacaatgaattatattgaaatagtaattaagaaacacaatagaagcatgaggaatcctcccacaaatgaaagctaaacaaaatgaaattccttgagcatatcttggaggattcttcccgtctgtacctaatcattttcagtgataaacaatgactgtcacttctaaagttacctaatgtattgtggtcacataataatctctttagccttttgtgtatttttttccttgttagattgcttaactttacacctccattgtagagcttgcactgccctagtcctcctactgaaatgttatttgttgacatttacagtctctcatacatgaatgtatccatgcatgttagtacttatatgcatgtagtttgtgcatgcatatgaatttgtagagatgcatcacacatagacatggttacacatgtgtttttgactgtttcgcag

SEQ ID NO: 13681 - DNA, 4793 bp, Vitis vinifera
  Intron number 8 from transcript GSVIVT01012830001 (locus G SVIVG01012830001) derived from phytozome v7.0 (chr-ID chr1 1; pos 5870250 to 5875042 reverse strand)
tcaactgactcatttgtattgcacaatcagtactggtgagttctttttttgcttattttgcatatcacttaatactgagccaagacaccgagattgatgtgcctcgaaacccttcgagtcagtgacgatactgcaattttgaaccatggttagagggggcggttggaatccttgtttttctaagcctttcaatgattggaaggtggaaattatggagtggttctgatggggaaaagccttttaaagtttattcaaggaggaaagggaagacccaagtaaactttaagtaggattaatattaattagaattgaattaggattggtagttgttggagtctaattaggattagttagttgagttataatataattagaatttgagttataataggttattagattcctagtagactttgaatgttataattagaattagaatcataataggttgttagagtcttagtagactttggatttcttaaagaaacttataaataggctaatcaatgtaaatcaaagggatgattgatattaataatattatattttctttcattgcaaagttgcaaccctcaatagtgagactccattgattttcttctaagtgaaactcctagaaggccttactgagaccctaaggttttccatcttttcttcattgtttcttttttctttctatttcttatcttataaatttctttatcataaaatttattttttgtttttctccttacaccctaaaaataaaaccctagtccacctacccttgagtgtaggcaaccatcctagggttgtcctacgtcaagttccttttgagaattcaaggaaagagggtgactagagatgtggaggatagggtgctttgggaaaagtcaaagagtgggaagttttctgtcaagtccctctatgtagccttagagttaacaggttcagtcccttttccgatgagtagtatttcaagatcctatgctcctcctcctaaggttgattttttgcttgggaggcgatgtgggagaagaccttaattttgggtcaagttaagaggaggggttggtccttagcaaacaaatgttttctttgtcatattgaagaagaatccattgaccacattctagttcattatgtaaaggctagggttctttggcagttgcttttggctctcttcgatgtgtcttggctctttcctcctacggttagagagactctacttggttggcatggcttgtttgtgggcaaaaagtgaaaagaggcttggaagatagctcctttatgcatcttttgaacaatttagaaggaaagaaacaaacttgcttttgagaatgaggagtttttgatccaaaggctaaaaaactcttttatttgtattttttggtcttggacaaagccatttttagatgactggcatttatctttaatcagttttttttgattgggctctaggagagggcaggtgttgttttttgctaaccctctttgcttttggttttgcctttagctgttcgttgtatacttcctgtatcttttgggacaccatttgggccccctttctttatatatccacacttttgtttttacttatcaaaaaaatattgacaaaagacctatcaagtttcatattttatgcaatcttagacaagctgcaaatgcaaaatatctttgcaccagcttgagggggagtattagaagattagcttaaatatttcctgccatattttttcctttcttgtgaaaattgacccaaattttctataccaagaaatctaggtaaattccatataggttaaaaatcatattgcttaatttaagagatctcttgtcaacccttttttgtatacatatatcttgtaaatcagaatgtgataagatatatgacagattatcctgttttgtttcaacctttctattagatggtagacctaatccataagaccttggtgtaaaatatcatctacatgaaaattaacatctatgcatgaaggctcattcaaactataggttttctattgggaagagaagacctattctattttttggaatcaaaaaggggaaaaaacattagggttgaatttttcaggttgacattaagtatgtcttccatgcgaggagtgaatctcaaaagtaggggaggttcctggttcaattccatataaaaagatttaaaaaaaatgaaaataaagagagtgaccttagaaattattgctggagaaagatctaggcatgtaaacaacccaaggaatttgtgggtggagtagttccttatatccgaatcttccatgttgtgtctatttgctcaaccttgatagacaatagtttcaaagtggagagtattagcagagatcggggcttctgatgatgtcttcatggatgacttcaaggtgtgaggaagggaaggaagaggggttatgatctcatatattctattttctgacaattctcttagtttttgtgaggttagcggttattaactgttatatttgaggtgttaagatgggggcttctgtgttttggagttgtttcaagcttagaaataaatttggagaatagtgggcttattccaatgaaatctagaggagggagcacaattggccttgacttttagatgtcgaatgggttgactttcttaatatttgggtttgtttgaaagcctctttcaagagttatgcggtttgggatgtggtagaagggaaatttgggttgcaataaaggagaaatttaataaaagaatggcttcttggaaggaaaactacctttcaaagggtggtaggttaggttcactttgttgaaaaagcacagtttgtatccttccaagttacttgatgtcctccttcatgattctaagaaaaccacagatgagattggagagaattctgtgagagtttttgtggtgtagcaatcctcctaatgctaagatccatttgattaggtgggatctatgctgttccaattagatggaggatggctagcactaagaagtcttccactgctgagtgaggcattgcttggaaaatgttcacagaaattttcttgtgaacaaggtagtctatggacgagaatcatggaagggggctggggaggcttatgattgtagacttttaaataccgtaagtaggggttggggagattttcaagtgaagactggcatttccattgctaatggtcaattaacaaaattttggatagatgagtggtgttgggagacaaagctaaaggattgcattctgactttgtttgctataacaatccatagagatgcttgggttgtgtattattgggatgatggaaaagggacaaagcctggttagcatccaagattttgcggaagcctgtttgattacgagtttgagatggtggaggaacttttgtacttcttgagcaggatgcctgttggagtcgagttaagtgtggaaagattccaaagatggtgtttttctaattaagtcctatgaaaaatgtctttatcttgaagtttccttaccttccctgctaaggacatttatgcttctttgcatgagaggcgacttggggaaaaattttaacaattgaccatctaatgaaaagagaaaagactttggtaaacaagtgttgcttatgcaaaaatcaacgagaatcaattgaccatattctcatcaattgtgagttgttttagaacctttagtctctggttttttgtttattgggtgctatggcaaaacagttggtatcaaggtttggagagtactaggagacgaagaagatgggggtacttttgacctttcgtaattatttttattaaaaaaaaaaaaaggctgatatagagagaggtttggtgagtgtggtaacatttcttctatacaggatttcatataacaacttggccagtccatttttatttgaggcaatatcttacaatataaataagatacatgatacaagaatatgataatacaaatagttttaactatgttttattgttcttaagaaaaatcaaattgaagtttattcttaaattaattattatattaatttttttaaatatactttaagattagaaatatttccataaacataaaatggagggaaagataaaataatcttttatatgaaatactacatttttgttgtcaaagaatattggggagttgacatttgaataatttgaatgttgacattaaaataatgccatgggtgaagaaaaacttgttttttaaatattagttttccttctttttatttttttggtgaagaaggaatgatgacaaacatagatttggagatgacagacaaaaatctgcatcaataaaacatacaaatatatgtgcctagtcaggaactaaaaatcatatccaaaaatgtaaaaagcttgtttttctggattttgtgatgaacatatgcattaaactcacatttttgtgttaaattaaacttttcaaaactttagtcttcaatgttttgacatggtatgatataatttaattctttaaatcttattatctttcacaaaatcttattgtctgtcagatattactttatatcttattatctaatgcatatttcataatgtaaaaaaacttctgatacaagaaaaggaaaataggaaaacaatacgttttacgacttacgactctgacagtaggtggtgttttggttgttatacctctggatactagggttttcaaaaaggagccttcttatcatattgtgatagactgatagatgcagatactcatcataggattttcataatgaagtaatttctgtaccatgattttgttcatgcagggcaagtaagctgggaagcaggaaactgaagaagc

SEQ ID NO: 13682 - DNA, 6784 bp, Vitis vinifera
  Intron number 2 from transcript GSVIVT01022494001 (locus G SVIVG01022494001) derived from phytozome v7.0 (chr-ID chr8 ; pos 3897250 to 3904033 reverse strand)
tggtatcggaaagtgttgtgcctcaaaagcctttggtgagttttaaacttgatatatgttttaaggattttcccttgtcaaaccctaaatacttaattataataaaattttagtttacgtcattgattggatattaggttggtaaataaaagtattgctgatcctgcagtctgatctgagtcttgaattgctagatcaaatatctttaaaaataattctctggattatttctttttgtatttgtttttatttgtgatgaaatgcagtgtttgagagaaaagaaaatctgagagaggattctggaaaatgaactattatttgtctcagaagggtcgtttggacagataacctgaaataattatgaaattggaaaaatagctctctttgtgatattttggagccatgaccctctttagacattttgacctcctttatttccctcgtaaaggaccaaaacttcattccaggttttatttccctcccattttagctactcatctctctctaaaaactcattttgttttgtccttgtgaagtttcttagcctcttcgtctgcattgtcaagccctgccatagctttatcaattcagttcgactgtttcttaccatcatagcttcatcttcatctcaagactcacaaatgattgattcttttgcatcctgagattcaagatagaggcaagtactcttatgcaagatttcttcatacaattatagtatgatctgaagtaaaacatacctggttattttgttggatttttagggtttttgttggcaaatgatgaacatgtcaaagattgatgttgtcctcttttatatattgtgatatggagtataaaagattggataaaagattgattcttttgtatctttagatatcaagatagaggtaaatactcttatgcaagatttctttgtacaaatataacatgatcggaagtgaaacatacttggttattttgttggatcttgagggggttttttttttccttattattattattgttattattattattattttttttttacagatgatgattgagtatgtaaaagattgatgtcctcttttatatattgtgatatggagtataaaacatgggatcggttttttgtatttttttttttttgtatattggataattgaacttgtaatttattaatcaatatcaactaatttttaatgaaaagtgaagtcacttgttttttaatattttatggatctcattaattttacaaaaaacttatggtaagttgtgtgaatatttttgtatgttgttcaactaagattaaattttatttacaaaatatataacaatttaagttttccatcacaattgatgcacaagaactacattgtggttaagttttatttatagagaacttaacctttgttaagttatcaatcataatggtcatttgaactatattatgattaagtttcagttacttaaagcttaactatagttaagttattagtcataatggtcatctgaacgatactaaggttaggttttaacaaggaacttaattaggattaaattttcattcaaaatgtgcatgcatctagactaaactatgattaagtttaccaaaaatcaccataatattccatagatgagatttgttgcttaccaacattaaaccttactatacaaataaaatttttcaaccccttttaggctttttgtttgcctctcgtaactcttttctcataattaataatgaagaataactctttttttttaataaaagagaaaatggaaatagagagagagagagagagagaggagaagatagaagaaaagggattaattgattaaacggaatgaatagatcccaaatttgtaaaactaatctctcccatttttgaacttgaagagtaattcatttttgacataaatacccttaaacattttcatcatttacatgtgtgttttaaaaaagggttatttttacaagaaaaaagtgagggcattcttgcccaaaatggatattttttgggtaaaaaaaagtgggaggttagatttgcaatttcatgtttattttgtcccttttaatcggttatcccaaaggaaaaggtgttgactatttacatcattcaattacttgttgtagccaatgataaagattagaagaaagaatagtgaggattccttttcgtttattgtagagcaaaaagtaagaaaaagaaaaaaaagaaactatgaaaaagaaggagattggtgttttggaggaaaactaaatataaaagggtattttttgtcaaaaatgtgtcacatatcaagatttaaaacgttggaggtcatttttacaaataagggtattatttgaacccttttatccaaataacccatcccaaaatcaccgattgatctctttctttatggctatttgtagttacagtgaattagttagaactcctagcaacttgatgacctcgcattgccattaaactatctattgctttattccttaacacacactctcaaacgaaagggtgagttagtaatagttagcgtatattatacaattgtgagttagtgtatattatacaattgtgagttagtgtatattatacaattgtgatttatacaactgtatattattttgtatagtagtctattattttgtataattgactatcctaaaatagctttgtgtatcctgtgtaaataggcttgagatatatggaaaaagtattcaacaatttatcaagttggtatcaaaactagagtaaggaatttccgctgctgcctagttgactctttttccatcctttttttcaccctcttcgttacaatatcatgtttggaaaaatagttttaagtgtttctaatatcaaaaagtcatccatggtgaccattcatgagactgcctttccaacaatttctattgagttggatggtgccaattatcgtgtatggtctcaaattttggagattcatattgctgttaggattgagccttagaaagtatgacatgatgtaacaaattgagattcatctataaatctatttatttattattcttggtttcctttaaattatcccatttgtaataattggttatttgtatatatacgccccacatcatttgcattgtacatgactttggtgtattagaagttgcacaaaagatccaagtcatgggttccttatagagtgatgagttgtctacaatcggttcatggatttttgggcaattcatctgagattgtagtgtgctacctcctaattggagggatgacttgtcttgactgtcggaatggttttcctatggtaagtgcactagtgcatgtgatgcgcataggaaaggacctatgatgaatgatgactgtcaactgtcatgatttaccaaaatactatattgcatggacttttaactttgagaggaaattgagtctgtgccaaagtcaataggagattttgatttatgggtgaaaccctaaagtggtcatatatccctatagattgggtcactattgatgaaggctggtgacaataagtattctcaatataggcataatgatatctcatggattgaaatagtgtgttatcttgggtgatccaaaggacatgtgatttagaagactatgaccataacatttcctttagtggaaatttgacatatgctccttgaagttagagtatgtcaattgatcacataaaaagtgagatgtgtaattcaaggattggagagacaatcttgataggtgataatactaccttgttagattacggacaccagttcatggggagtctgcatgtagtgaatagtagatcatggaccagagcattgtctcgttatttacataaggtactgaagtgtaattgattctctttagtgaaatgttgaatcaatttcagaattggattttgagggagccaatactcttatgggtcttagtggttctcactttgagctcatataccatgatgacacgatttatgagaattgaattgactcttggttcactcttgtgcataatggcatttaggtaattatgcaaggttgtataggggatagtgaataagttctttgaattgggctaattgattaattagatgacctcgtgtagttaattaatcaattaggactcattttgagttagattaagtgactcaaaccttggtgggctcaagtcacttaagctcagtaaggaaccttataaataccctcttagggactaggttttgcataaccttttgagagacaattgtcttccacctttagagagagagagcttaggattcctcccttccaaagctcacactttggagtgccaagattgtggttcaagtcattagatggaagatcttgggtgcacgagacttccgtattctttgttcttcattttcatcaagtggaattgatttgggaacatccaaattagaggtaaatttttctaatggcttttctctagttcctatcttgttaaaaattttgatttttgcttccattgcataggatctagaggcctagggtagcttttacatgcacctattcaatttagggtaagggaacaaagtaatccaaggttcccaacaattgatggtagaaagaagaagtgttatatcacaggaaggaaggttgcaccaacagaggatgacccaaactatgatgattgggaggctgaagatgctctagtcaagtcttagctcatcaattccatgattgacaagctgatgtcacactttgtgtagtatggaatggctaagaaggtttgggatgcggtcaataggagctatcttgatgtctttgactcttctcaagtatatgaactaatgaagaaatcctttgaatcacgccagggtggttgcctccttgcagaatactacaatgagttaaactcaatattcatggagtttgattattgaaggcccaatgatataacatgttgttggaaaatctaccagttggaaattctggcagattgtgtggcagactattgaatatttttccagtccatatgagctgtaataactgtatactcccaggattttttcctttcttagcattcttgacttttcttatttatctttgatagcatgatcgtaggcattatttcctaggctatttttatacagctattttgtatatattcatatgtaatcctataccaaaaaagagagcagaaagcatttcacaaaaaggttctagatctgaatgagaacatggtatcagagttagaattttctttgcctaatcactagcattccaatgtcctgtgccttgattgtcaggaatttttttcagatcatatcccattagtttctgaccttctgttagaaacgttgctttagattaggccttcattgcccctatttttttgaccttcatatcctttctttccctcataatgtcaaacacttcaaaggttgattcttcaatattgagccaaaccacaatccaacaatcaacaccacttgctgaattccagaatatagtaggatccttcaaactcaatggggtaaattatttagagtggtcacagttggtaaagacttatattaagggcaaagggaagtttagtcatctcagtggacctgttgtaaggatgatccaaggtttgtcttgtgggatgaagaagactctcaaatcatgttatggctttggaactctatgcaaccggagataagccgtacatgcatgttcctctcaacaactaaggaaatttgggagtctgtgtgtcatacctattctaaggtaagggatgcagcccaaatgtatgaactaaagacaaggattcacaacaccaaacaaggtattctttccgtaactgagtactgcaatgttattaaaagtctttggcttgaacttgattaatatcagaatttaagaatgaagtgcagcatagatgcagcaatgcatcaagagttcattgaacgagagagggtgtatgatttcttggcgggtttgaatgtggaattggatcaagtacgagtccaaattcttgggaaagagccactgccatctctaaatgaagcctttgcaatagttagaggagaagaaggaaggaaaaatataatgttagaaaagggaaacaccatggatagatctgctttagccatctcaaaaccaaatggaaatgaaggaagtgctgtgtctaatgctgcaaactctggtagaaacgaaaggaagaaaacaagcgagaaagactccttatggtgcagctattgcaagaaaaataggcacacaagggagacatgctggaagctccatggtaagcccctaaatttcttcaaggggaatgggggtaaaggggttaattctggctataaatcacaagccaatcttgttgaaattggaggaaaacagcaggaagaaagctttggccaagaaatggagctcaacatggaggaaattgacaaactcaaaagattcatttccaagctagaaaaacctgagagacatagtcattttgctcaaacaggtaagtattccttctccttgagtgcctctaaaattcagttttccagtccatggatcattgattcaagggcttcagaccatttgaccaattcttcaaaagtcttttctaattacattccatgcccgggaaatcaaaagatcaaaattgctgatgctaccttagtaactgtggttggttaaggtaatgtcttcttaacatcttctctgacattaagaaatgtcttacatgttccaaaactatcagtaaatttgctattcctcaaactactaaggacctaaattgctcagtcaactttacacaatctgaatgttattttcaggacgttcttacgaggaaagtgattaggc

SEQ ID NO: 13683 - DNA, 13836 bp, Vitis vinifera
  Intron number 13 from transcript GSVIVT01022631001 (locus GSVIVG01022631001) derived from phytozome v7.0 (chr-ID chr 2; pos 13778504 to 13792339 reverse strand)
gagcaacagactataagtattgccaaggtaaattacttgttctgactatattttgaaaatttattgaaagattctatttagatttgaatttgacttgttcataaggttttgagggttttaaggctggatttctacctagcaggaccctcttcatttttgcacattagaaataattttgaaatacaagatgctgaaaacaacagaggaaagttaaatttgtacttgaatctttactactttgtgcttggtatatctttactacaactacttgtgctatatagtttgaattgcccttaatttaagtcatcatctgagtgtgaaatggtgaatttgtttcacctttccagattcaacttctaagttgggtagattattaatgaaaatgggtgacacaaatttctgaaaattcatcagcaattcatattctttgtaaaaatgtccctaaggcctaggtgaaggtgatctcactgacatccatataaataggcatgtgaagtacagaaaattatttggttctagtagctaaatgatgaggacatcttgcacatcaaataattgatttcttaagaaaacaccatgcttttaagcttctcttggtactagtatcttgaaccctaggttcttagtctattactaggttttggtgcttggggattgaagaatttctgaactcctttattgatttattcggaacacgccatacacatatatacacaaatgactgaataagaaaatatctatctagcttgattctctcctaaaaaataggaaactgaatcctaaggaaatatcctaaatgatctctccttttttattcctaaaatactttcctaatttaaaaccctaactttgaatgccgaatttcaacactccccttcaagctggagaatatatatcatataatcccagcttgcaagttaagtcttcgaagttaggcctaggtaaagctttggtgaggatgtctgcggtttggtgcttggtaggaacgtagttcaatttaaccatctcattagtcaccttctctgtgatgaagtgtctgtcaatctcaacgtgcttggtcctgtcatgatgcacgggattctttgctatgcttatagctgcctgattatcacacatcatcagaatcggagatgaactcgtttgtcccagttcactaagaatcctttttatccaaatcccttcacaaattccctgtgctagagctctgtactcagcttctgcactacttctggctacaattgattgcttcttactcctccaggtaacaagatttccccagacaaaagaacagtatccagaagtggaccgcctgtcaatgatgtttcctgcccaattcgcatctgagtatacttcagtgtcacgattctctgtctttctgaagaatagacctttccctggtgtcatttttaaatatctaagaatcctgtagactgcttccatgtgttcctcagtggggctgtgcatgaattgacttacggcactcactgcaaagccaatatctggccgagtgtgtgagagataaatcaagtgcccgacgagtcgttgatatctccccctgtctaccggtgtactctctttctcgataccaagtttcttctgactatccataggagtatcaattggtttgcatccaagcataccggtctccttaagaaggtcgagtatgtattttctttgagagactacaattcccttccttgatctagccacttccataccaaagaaatatttcaaatttccaaggtctttaacttcaaactcttctgacaaatacttcttcaaattctgtaattcctccatatcattcccagatagaataatatcatcgacatagactatcaatatggccattttcccggcatgagacttcttgacaaatagagtatgatcagcctgaccttgtttgtagcccaacttcaagactgcctttgtgaatctatcaaaccaggctcggggagattgtttaaggccgtacaaggatttttggagtttgcaaacctgattctttgccttactttcttcgaaaccaggtggtatttccatgtagacttcctcttctaggtcaccatttagaaacacattttttatgtccagttgttgcaagcaccaatcttgattgacagccaatgagagaagaatcctgatagtgttcagttttgcaacaggagcaaaagtctcctgatagtctatcccataggattgtgtaaaccctctagctaccaaacgagccttgaatctctcgactgatccatctgctttgtattttatggtgaaaatccacttgcaccccacgggcctcttcccaaccggcaaatctgtgatagtccatgtcccattcttttcaagtgcatcaatctcatcttgtactgccttcttccattctgaaattttgaatgcctcttgtattgtgttgggaacctgagtatcatcaagagaagtagcaaatgctctgtaagatggtgatagcccttcatacgtaacataattcccaattggatgatctgtacatctcctaacacccttcctcaatgcaatcggcaaagtagaatcatcaatgctgggaattgacacctctccagccttatcctcacctatgttctcttcaggtagacttgaaatggagtcaatatattggccacatgttggctgtgatccgtgctctaattcatgtcttttcctcctcctgatgtatacttgtaagttctcattagcaagttgtggggctatcggttgaataggcgtgggagactggatggtcacgggagaaggaacatttgtgggctaggctggctggactaatgacgacatgggtgtggacaactcagtgggcgcggattgggaaggatttggtgactctgagtgagaaaaaggtacagcctcaagaagagacttccaaacttgatgttcattcatgctctccccctaaacatgagatttgggatagaagaagacatgttcaaagaaagagacgtccatggtggtgtaaaatcttttgttggttggagaatagcatttgtaccttttttgggttggagaataccctaggaaaatgcacttattggctcgaggagcaaatttgctacgattttgaggatacacatgaacgaatgccgtgcaaccaaatactttgagtggtaaatcagaagaggttgcacgggtatgagggaatttttttaagagaagttgacatggggattgaaaggtaagcactctagatggcatacggttaatcaaataggtagctgtgagaatggcttccccccataaatagtttggaacattagaggaaaatataaggcaccgggcaacctccaagagatgtctattcttgcgttcagccaccccattttgttgtggggtgtcaacgcaagaacttatgtggatgatgtcgtgattttgaagataggtactaagactactagtaaagtattcctttgcattatctgacttgaggacctgaattttggaattgaattgattttgaaccataagattgaaggtttgaaaaatgtgcccgacctctgacttttctttcataaggaaaacccatgttacccgtgtatgatcatcaacgaatgtcacaaaccatcgagtgccataaatattttttatccgtgagggaccccacacatcactatgtactaaagagaaaacagtcgaaggtttgtatgagatttgaggatatactgtttgagtatgctttgcaaactgacaaatttcacagtgataagatgctggatttttattgataaataatttgggaaacaattttgcaaggtaaacaaagctaggatgaccaaggcgatagtgtaacattataatctcactatctttattgaccttagaatttgacatagaattgaaagagtctaacagactttgagactgtatgcaacttgcttgagagacttggtttgagaatcagccacatgggaggaggtagagcccggaacacagttcagcactgccaatcatcttccccgatttcaagtcctgaaaaacacacgagtttggataaaatttagtaacacattggagatcacgggatcacgggccaatttgctaatggacaaaagattacaatccaagtttggaacatggaggacagagtcaagatacaattctttagtaagttttatggaacctgtcccaacaatttttgactttgaaccatcagcaatatggatggatgaatgaccattacttggcttgtaattttaaagaatggcaacatctcctgtcatgtgatcagaagcacttgtgtccactatccacggcttcattcctcctcgataagcagtgaaggctgtcccggtagtactgccactgccaacttagcttaatagtttctatagcatctccatctgctctttgttgaatggactcggctcgggaacagatgtgctctcagagttggcagccacgtgtgctctaccatctctgtcaaaccgtggctttggtttctaatcagccagtttgccatgaagcttccagcgagcctccttataatagcctagtttcttacaataatcacaccaaggcctatcccgtttctgacgatctccaccactactattaaatgaccgagcagcaagggcagaggcatccaatgttggggcaggttgctctttggatcccatcatcactttctttctactttcttcacgcctaacctctgaaaaagcctccctgagacttggcaggggtttaatgcccatgattcggccgctaacatcatccaattccctgtttagtcctaggaaaaacttgaacagtctcttttgttccacaatctgcctgtatgttgttgcatcatccgaacatttccatgagtgagtctcgaataagtcaagttgctgccaataccttgtgagtgtgttgtaatactgagtaactgattgctctccttggcggaagtcatgtagggctgattcaacctgaaaaagttctgaagtattttcagaacttgagtaagtttctttggctgcatcccatatatcctttgcagtcccaaacaacaagaaattttcacctatgtcattgttcatggaattgataagccatgacatgatcatgctgttttcaatcttccacttcctgaaacccggttctgtagtttctggcatgactgcttctctagtgaggtactcatcctttcctttaccgcaaataaacagtaacacatattgtgaccactgtaaatagttatggccatttaatttgtgtcctgtgatgagaataggagaggaatcactgccaccaaggtttggaatttcagaactgccccctgattctagtgccgtgacgctagatacttgtgatgatgtcattccgtattttgtcatggagatgaggaagacagtcgaatatggttgctggaaatagggaagagaagaaaactagagatacaggcctgagaacagggactgatggccggaatgagagatgaccagagagacttggccggaatgagtgatggccagagagagagatggtcggattgagagatggccaaagaggtttggctggaatgaatgatggcctgaataagaggcggccagaagggattagggttatagaaaactggctctgataccatgaagaatttctgaactcctttattgatttattcggtacacgccatacacatatatatacacaaatgactgaataagaaaatatctatctagcttgattctctcctaaaaaataggaaactgaatcctaaggaaatatcctaaatgatctctccttttttattcctaaaatactttcctaaattaaaaccctaactttgaatgccgaatttcaacaaggatgagtcttctactcctaccttttcttctcagatttcttctcctatggggttagtgcaaaaggatttctagaaggtgagggagataagctctagagcttgctatggcggatgaggtcccttgagaatgatcttgcaagatggcagatcaatggattttcttgagaatctagttcagggccatgtaattcaaggaagctggtccctaatgagaagcgttctcctcctttcatcaccgtttatttctctcttgtttgagttaccccttgattctcctaggagcagtagttgttagaagtttggttggaaatggttaaaaaggttccttgctatagtctaatagtaaatttgcgggattcaatagatttgtgggcacaccctttgatagttttgagaaagaaattatgaccttgattagaaaaataggggcaaaacacagaaagtcattcttaatataagctagaaagtgaaaagcaagaggctttaggtggaaacagagggaattgaaaaaattagtgttttgggaattacaagggcaatacatggaaagtagatcagaaggagatagagatggatcttcaacaccatgaaaataatgatgttgtcatggactatagggggtctaaataatctgtagaagatgaaaatggtcaagattatcatccagtcttagaagctggatttggtatgctttcaagagagcaaaatagatgatatgtttgggtgcagggatttttagtttgggaagctttaagggcaaggggagctttgaggaaagtgggtataattgttgaagaagtaattttcctaaacacttaagttagtaggattaagccacaatgtatgtcatgctccaccatctcccctcctttgtggcctatacccattatgggagtcacaaacaatagtagatgtagacaaatcacaaatttcagataaaataataagacagataaatagatggagagaggattcgaactcatgacttccaattaattacagctttggtatcatgttgaacaactaattttcctaaaagctcaagttagtaggattttaacccataatgtatttcgtgccccaacagttattttattttttttaatttttttttatcagagagcttttgagatggttgaggtgggagtaggagcaatggagcatttttattttcctaccgttttaccagttttgaggataatctgtgtgggtttttaggggcacctggattcgaagtgggacaaggaggatttctcaaaaacaactaggggatattatggggttgtgggaggatccttggtgtattaggaaagacttttatatagtgggatttccttaagaaaaaggacattgcatccatattttagcagcgatgaggcacttcatgaagtttttcagggattttagtttaatagatatgcctttttcaggagtagagtttgcatggagtgtaggggcaagaagggattcccattctcttgatatctttcttgtgattacagattgggagggtcatttcttcagtttggtctagagcgtgttgccaaggccaatctatgctgatacattgatttcattggatagtgatggggttacaatcgataagactgtgtttagttttaagattatgtggctaaaggtggatggtttaagggcttcgtgaagaactggtggaaaagctacaatatgactggatcattgagttttctttatctgacctagctgaaagctttgaaagaagatattaaagtttggcataaacgagtcttcagtaacatggcagttagcatagtagctacttaggagcagattggttatcggcagtgttgtcaagggcgatcacttgattcgcctaggccaccaggcaaagtgagaaaaataaaaaatgcctcttgaagacctaagcgaggcaacccctaggtcgttgctttaggataaagtttaaggtgtaatagcgattgcctttattcataaggctgaaaacttgaaaaataaaatattaaaaataaaatttggaaagttgaggtatggagaagctaaaaggttgataacaaagccctaataaaagggcaaaaaaaaaaaaggaataacaagatttagggcttaagaaaaagacgaggtagagggaagaagaaaagaaagttttttgttaccttttagcaagaagaagacaaggtggaaggaagaagatttcaacagctttgtggttcactttgacaaggttttctcctttttctcttctctataactcttcttatggcttttgttttttgttcttcacgatttgaagttttgaaatatgaagccaactttttttaaaagaaaaaaagtatgttatgactactgcaccttttaattgacttgtttttattttattttattctttgcaaagaaaaatattatctttgcttgtgttttgaagaatgaagactgccttcttttacacacttcaaagctattgatttttgtttttttattttattctctgctaagcaaaaacttgtctttgcttgtgatgtgaagactcacatgggcccttttttttatacatattttttactctatgttgtcactgcaatactgcacactatagagctgcctgtaatagtgtcactacatagagagatttgaccattttctactgccattgcacattgtagaaactcaataccttcctgaaaccaattttttctaagcctatcacagtgccactacatagtacacacactgtaaagatttaaccattttctactgccactgcacattgcagaaagccatactccaccttcccgagactcatcatttcaatgggtcccaccactttcaccacttataagttcttatcattgaaaatatatcattcaacggaccatgcttcttgcatgagaattttattatttgttataaaagttttttgtattttataacttttttacattgttgtcttattttccttatattttaaattttaaatttttagttcttttttttttttttaaccaaatttagcttttggaaatggtatcagaaaatggcacatcatcaaaaggttcaaacaaaaaagatccggcttggaaatataattttttgaaagattaaaaaatacaaattcagttgcatgtttattttgtgggaatgagacaaaggtggaatttttataccaaagcaacatcaaataggaaaaaagggaaatgttgcaaggtgtttaaaatgtccagaggaagtaagagaagagcttgagcagtatatgactaataaaaagaatgaaaaagacaactatagttcttttcttgaatttgatggcttagaaaacattgttgatattgatgaggaagaggaacttgaagaagtcaatttgaatggaaaaaatgtgattgataatagaagaagtggcatgggaagtaataagaagatgaagtcaacaacaaaaggtcccattgatgcttttgtgtctcaaaagctagaaaaagtagttcaactttggaaagagggaaagatcaaacaaagttctataaatgatgtgtttgataaaaagaaaagagaaagtgtatgtcaatacataggtcgattcttttatcaagcaaaaatatcatttaattgtgcaaatttagatagttttaaatggatggttaaagctattggacaatgtggtccacatatgaaacctccgagttattatgaattaagagttccaatccttcagaaagaagtggagtacacaaaaaatttattgaaagatcataatgttgcatggatgaagtatggagtttctattagtctaatgcgtggacaaatagaagaaatcaaaccttgatgaattttttggtaaattgcccaattggaacaatgtttatggagtccattgatgctagttcattcatgaaaactggggagaagacatttgaattattggacaagtttgtggagcgcattggggagaagaatgttgttcaagtaataactaacaatggatctaactatgtattggtaggcaagattttatttgatgaagttctttaggttttatttgtgccatttaaattgaaacattgtatcatgaatttaagatattattcatcatttttatttattatggtttttatcattttaactttatataggaaagttcctagaggcaaaatgaccatatttgtattggacaccttgtgcagctcattgcatagacctcattttagaggatgttaggaaacttcctacaattaagaggactttcactagagccatcacattgaatgggttcatctacaatcatgagggggtgctaaatatgatgagagagttcaccaagcaaagagaattggttaggttaggcatgactcgatttgcaacatgttttcttaccctacaaagtatccatatgcaaaagcgtaatttgagattgatgttcacttctgacatgtggttagctagtaaatgggcataggaagcaaagggaaaacaagtctcaaaagtagttttgatgccttcattttggaatcatgttgtctatattcttaaggtgatgggtcctcttgttaaagttcttcaacttgttgacaatgaaagaaaaccagccatggggtacatatatgaagctatggatagatgtaaagagactatcaaaaagtcatttaatgagaatgaggataaatacaaggagatcttctctattattggtaagagatgggaatgtcaactccatcatcccttgcaggcaacaagttgcttcttaaacttggaatttttctacgacaacccttgtatggagtttgatgaagaagtgacatcaagattatattcttgtatagatagattagtttctgatattgatgtgcaagataagatcattcatgagttgtcaacttataagaatgcggagggtctctttggtattccaatagccattagatcaaggaagacgctaactccaggtataaactataaagtgcttaaagaaagtttatatttctaaataagatattaaattacttattttgtgagctattagatcaaatattacttgctaggctactaattttttgtttccatttgaaacattatagctgaatggtggaaactatatggcaacacaaccccaaatttacaacaactagccataaagattcttagcttgacttgtagtgcatcgggttgtgaacgtaattgaagtgtgtttgagcatgtaagtatttaatactttgttgattacataatatataaatttataaaattagaaattttattagttaagtaacttaagttgttataactaatatagcttgtggtaacatttactaataaatgtttaaagattcataccaagaagaggaacaaattagagcaaaaacgactaaatgacttggtgtttgttaaatacaaccaagctcttaaagcacgatatgatagatgcaatgtcattgaccccatctcattagtagatattgacgaaagtaatgagtggttgattggaaaaataagtgaagaagacaccaccattcattcggaggatgacttggtttttggggatgatagcttgacatggggtgcagtgacaagtgcagcaggagtgggagatgcaaatatttccactagactttgagcaagatcaaagacaagtttaaagggggatttagtggctggtacttcataacctgattttgaagagaaagagagcaatttagaggacatcgaagaggatgataatgagatggagggataccaatctagtcttgatggaagtgatgacaattttaatttcaatgatgactacaacgatgatgcttaaagcttctttaggacgctcattatcttattttgtttcttatttttatttttggatgtttggaacagtagaatattcatatggacatgatgaatttctcgaaatagtatgacttttcttatgatgtggggtaaaaactttgaatgattattactattttcttaattttataaggcatcataggggatgaaaatttagtagtattgattattgaagaatacttacattggttgagtatagaataggtaaaatggtaaatatatttatactatttatcaccttattatagttaggcaatcgccttaattttcgccttttgtctcaagttaaaaggggtcttctcaccttggcattgtcttttgcctttgacaacactggttactagtacaataaggagagagttgggcctttggaagatgaggatttggaggctagaaagggtgctatggcgtattattattattgggcagacctaaaggtgacctcttggagacagaagtcttaggagtcatggctaaaggggggtgatagaaacactcaaattttccacaggatggctcaaaaccactttagaaggaatgattttggaaaattaacgataaatagggttggatatttgagaaggatgaatgaaagaatgggttgctagtttttccatcagttctcagattttggggattggaggcccaatattaaaaggtcttctttagagctttagaaaggttggttgtggagaagtgagatgaggctttttgggaagaagagttcttttatgctcttaatggtttgggaagtgatatggtccctgggcatgatgatttcacaatggcattctagcaatgtagttggtatgtaatttagcatgaggtggtgggtcttttgtttggaaaattttctaataaattctttcttgcctattaaaaaatatttgtgggttgaggtctaggagtaagagggaagcgatttgagatttccttcgaaagtgagtcttggatattgttattctctaacaaaccaaactggaacatattggtaggaaaactatttgaatcctattagagggttgaagtaaggaattgggtgaattgccctcctatgaggcttggattatttagatattttacttgcaaaagacatgtgagatggtgttaggctcttactcattttctgttatattttccttggattgtttagaggattattggttcaagcaccttataatccaaatagcttatctctaggatcgaacatctagatcaaattggaagacttatttggtttaacttactcttttggggaagcttggatcctcttagttaacttcatatgatgggctttgataacattgccattgcctgtagttttgttgatcctcccctcttaaggatgtctttgacttcatccaacttgcattgctgagggcaaccccatttgtgaaagatatttttatttcctacatttggaatttagaattccccacagtgtacaagaagcaatgggaagccctgtttcaaagcactgccctattctggtgacttctaaccaaattatttggagtttggtttccttacattttctaggcatgcagcttcactaccataggtttgaagattgagggagttgagagagacttaggttaattggtggaaaggctataaattcatgggcaaactgaagtttgttgaagctaagttgaaggttcggaataaaggcatttttaggaatttttggtgagagagaagcttcatccttagagatatcagaatgtggatcccttagaataccttctaagggatgacctttaagcccttagaggttctaggaaagtagagttgagaactcttgatgagagaggaggtatgttagaggcaagaatccacaaatgaatgtattaagggtttgctattgagagtatatggatttgtttcacctacactatagttatatgaaatccaatatatctcctttagtgttccaattccccttcaatggtttataagttggtgagttaatcaaaaccttctattgttatttttatcatatgtttactttgttattgttccgtttgtttaaactttttaaatagaaattcaactgcttttttctttgttcaccattacttattttgtgcccatgttctttttatgtgtagtgaagcataattcatgaatgacattctcttactaataattttcctttttcaggctggtcttgtgacaactcttaataccaggacaat

SEQ ID NO: 13684 - DNA, 2187 bp, Vitis vinifera
  Intron number 1 from transcript GSVIVT01024008001 (locus G SVIVG01024008001) derived from phytozome v7.0 (chr-ID chr3 ; pos 1771038 to 1773224)
gataacagagaacattctagcccagttacaagtaggttcaaaaaccctagatcatccctttttttttttcatctttgattgaaaaccctgtcatgaatcaactagggttaaaccttctttcaactaaaatttgttcggaactgcaaaattactcaaacgaaactgaaaactagttcagagaatagactttttcctagtaacagccatggtataagtactaaggagtccattgaaattcgtttggataacgagaaaatgtaggaagattgcaaatattgggccaaccccatccccctaaaacaacccaagctttcttttcttttactaggtttcccaaatgaaccgcttggttgttgagaaaaggtaggaaactgaaaaagaaatgttaatttttttgtttagataaggccgtccatctcttttcctgcatttcctcttcaaccaaacaaagggtaacagaaaatacaaatgaatcaatggcctaatatgaatgatcaaaagttgaaaagctcaaattttgaatcaaacccaaatccaaaaacactgaattgattcaaaacaacggacatattggaacaaactcttcaaaaatgtggtcctctccctctgtaatttctaggactttgtttggctgagcactattttaagtgcttttgaaattcaatgggaaaatcatatgcccctccattccagactaacccttcatgtgttccaacaaagatcaaaagaaaatgagactcagtcccaacaaaggaggcaatgtgaaatgcagaaatcagagcattgccaaaaacaatgaagcctacataaccttatgatattttttcataattaatgttatttagaaaattatttttaaaattatggaagactatgcctaactatttgttttggaaaataattatttatacaattaatgtcatgtacaacttaggaaatataggaaatatagaaaataaatctaactcatgtcaacttgggatgcatagaatatggttataactttagtgagttgagttgggttgataactaatttaagtctaacctgaatttaaaaaacaatccattctaatataaatgaacttgacctctaattcaagatactcaatccaatgttcttggttagaacccgattttaatttgggttgaaaaaacttaacccaaatccaactcaagtattaaaaaatgattgtttaaatatgtctcaatgttaagttgagttagaccaactcgatcgagttgcaccctcaaaacaagtgaaagtatgatcatagaatcaagatatatactaaaaatacaaaaatttaattagagtactaaaagggtacttaatgaaaaatatgactaattaaattatacggactacatatatatttaggtctcattactttatactaattacttttagtttcattttttgtatcctaattccatcatattgtattttcattcaatgatatactaattaatataatatgatgggattaggataaaaaaaatgagacttgacctagatttttttttcctatgtggtttcaagtttcaaccatgaagatgaaaatataaatatgtggtactatgactttgatatcttacaaatttttttgcttactaacattggaagatatatacaattgaagaagattcttttagagtagttttcagcatgattcaatgtaggagagtagttgagacatgaaagaatatataaccgaaacgaatgaaaaaactttgaagttagttagggttttgtacgccttcttagctcacacaatatgctccttccattattacttctcataatatcttttttatatgtccccctttttcttgtcttgcttacaaaactgcctcgctctctctcatgcatgcactacacttcacctaccaaagtaacaccccaaatgtaaaaaccaaattttttccttccctcagctcatttgctgagatggggttttcttggatggagtggatgttgcagttacctattgctatcagctagcccaagtttgtattgatctttgctttgtttttctcttctttgctttcttcttttgtttttcttactctaaaggattattcaaccttaatttacgttgttgggaagttttctagtagcttaaacttttttgggtaatggatagttaggcatgggattgtgtttaatgcaggttttttgaagtgggt

SEQ ID NO: 13685 - DNA, 3113 bp, Vitis vinifera
  Intron number 3 from transcript GSVIVT01007991001 (locus G SVIVG01007991001) derived from phytozome v7.0 (chr-ID chr1 7; pos 6854593 to 6857705 reverse strand)
ttcctctggtatatataatttcaattcacttcatgaaagtaatagaaatttacctttgcttattagttatatttttctcccaattgaggaattaagtagtttcagtctaaacaggttcctttagtaacatcatgggtctagaagttagaggacagtgaatgttcccatttggaccttttattataggtattcttactcatatttgatgtggctattgccagaaaccataagttaaccacgttgatccgatcctcttatcttagaaatcgaaggttagcttcgtgtttcatcgagtcagtcaatgtttcttttggtgccttttgtatactttgagtgttccctctttttcttgggcactcttcaatgcatctttaattgcctttaaaaaagggacagaattcttgaaggctgttgggaccagttcatctgttaaacacatgctttaatttttgatggctgttgtatattgactttttgtttattgtgataagcttttcttttcaaaaaagaagaatgcatacatctaggaaagcaaatgctttaattttatttttttatttttttattttgttataagactacaaaaatatgaggaatatttttgagctagatttgctcaccatgacaagagttaggttttctgaaccatctgtgctactcatttggtttccttgtaaaaaagttttagtctctctattacttggaagaaagcatctaatgtatcttttgaaacatcacaatctccatggaacctccataatggatcaattaccctttcttcaatctgccttcaatatgaattcctgatcattattgtcaagacaaaatgagtgcatttcgcagagccatgcatttgtccagcttattggtacagtaacactattatgcaatgactcatataggtttgtgctgttcggtttccataaatatcatacactgttcaatctaatgcttcctttgaaacgactccaaagctactttctgatttttccttcagcagtctgtcaagtatttttttttccctttttatttttggtagcctttttctgcattagtctgtcaagtatcaatttctacttagtttcactagaaggatgtagcctttatatttcatttgccttattctttcttgatttggttcttttgaccctgagattaagaagttttatattaaatatatgatattcatttaatcaacaataattcttgttgcctcagcaatattaatgagatacactttagtttccatgaatgtcactatattcttcaattttggatattctggggaatttaagaaaattttcccatggaaaaattgtctctcatccgactggcctatctattttaaaatgttcgtgttgcaaacaagcattccttgaaacacactcacacacaagaaacaaaaaaacaaaaactccaatgattttttgtcttctggattttctgggtttttccctcatccaatgagggaaggtggctttgtcaggaagaggaaggggaaagtctagaaaactaaagagcataatcaaaggatctgtaaaggggatggagctatccgtgttgagcatggaatctttttttctcaggtcattgtttcagtggtccagggatactataggagagaggaacttgtcttttttggctgtttttggatagcccattgttggcttgagtctgatcaaggctcttttccacctttgatccttccttttgtttctattatttccaggtgcactttatacatacacacatacatacatatatatatatatatatatatgtgtgtgtgtgtgtgtgtgtgtgtggatatatgtatatctatatattccataggtattaaagtttgtcccttcaggtcctataaaaaaaaataataataataaggtttgtcccttctggcatttttattatatacttgtttatttggcaaggagaaaaaaagatgctgagcttgcaggttagtaataggcagttctaatagaattttcctacactaagatcaaaaggcagtactaatagaagtatgtgaaaaacagataattttagagattttaccaaacagccaatgtgttttggagttaatggaaacttgtagctatagttgggacagatttgcttccactttttcaaaggttggactcctggttggtgcatgctacatcctaatgcaagaaattttcctatgcaagattttaattgcaccttctttatctaaatgcaaacagtagacttattaaaattttaagccttattgattttgggaatttatggttagctactgatggaataaaggaagctgtggcggaaatttacctagagaatttcatttggttcatatgttatttatctacaagtcaattgaacttattcaaaaactttggtcagacaattgaatgaagaggtttctggtaatcttcatgtgaacttgaataaagcttagaaaatgcagcttacttaaaataacttggttagacagtttaacaaaaaggctgttggtcatctactcaacgacaaataaaattgatgtgtatgaagaaaaatctaatgcaaatatataagaaattcaattctgtttcacttatttgagtcaggacctgtttttattcaacttttgatgtgatttttgattgtgaggggtacacttttgtaattaagaaacaagaaatcccttgcttgatgaatggttatgcttctcttgctttgtgactatccttaattatggtgggtggtttcttccagaccctagtttaagaatagatacctgctttaggtggtgtttgttttttagctgaatagaaaaagtcaaataccaaaaataacctgttaatatcatttaacataactaaattgaacatattgataataagttcactttagttatgttggatgatgttaacgggttagttttagcttaatagaaaaaaccaaatattttggctttttctattcagccaaaaaacaaacactaccttagtctctcaattggaagattagaggttccttgtgcaatgtgagtatctcacccttaaaatggatcttctaattagattttcatgtgatgtgcatcatatcctgcaggcaacagttaatcgatcaaaagggaatcggactga

SEQ ID NO: 13686 - DNA, 5321 bp, Vitis vinifera
  Intron number 7 from transcript GSVIVT01036086001 (locus G SVIVG01036086001) derived from phytozome v7.0 (chr-ID chr6 ; pos 20855110 to 20860430)
gccactacttgtggttaacattggagggcctacaagtaattattatcattcttttaaatatttaatttaacttactgctgatttgatcctagacattaacatatacctgatgtcagataattggttactaattgtatgatcatatcctttttatgttgcatggcacttttaaatgagcaacatatccacatgggtgcaaacatggttttgctcctcatcttgcatattggccaattaagatagtcattgtacaagttgataattgtcaaaataattatgtgtcatcaacaagcttgtggcaagttttttcccactcttcttgtaaaatatcttgcaaaagaataagattcttgaattccttaaattcaaaagaaattccaacaattcttattatacaatcataggattcttaatgtttgccctcaatcataataatgttttgccttaaataatgttacacttctttcagctctcctacaagttgttctaggattggctccacctatcacattctagattcatcattggagatttcttcctctctactaacatcttcaaattgcttcttaatgggagtttttggtgatccttctcgtcccaaggatgctaatatttcctctggttgcctaagtggtggaatttcctaaaatggatggagaatcctcttatgcccatagtgcataagtgtgtaagtgttctcacaagcatcatgttggaccccttcattaaaaagccacaatcttccatattcaatatgggcacctttcattggcaaaacatcacactatactaaaagatcaaaattattattaaaagtggatgttattagacaacaagaactcaccaaaatagttatatcatttacccatgctatttagggatttagatgttcctctatctttaaattaagcttctcaataagttcctttgaagctaaattggaactactacttctatcaataatcatagcgtataacctcccttggcaagcaactcaagttcaaaatatgctaatacatcgccaatcctcctcctcgtctactcttggtatatcaccaattgttgcataaaaaaattgtagccttcaactatggttgcataaatcaagtaatatcttcaagccaaaaactcactttgattccaaaagtaatgtaggaaaccttaggatggttgcttacaatcaaataggtgggttaggtttcaatattttagggtttaatgagaggaatgaggaataaaattttgtagcagcaggcaataataaaacaaaataaagagaaagaaagataaaaatgagaggcctcaaaatctcactaaggctttctaggaatctcataaaaaaaaaatatcaatagtctcaccattgagaattgcaaagtatgcaaaaggaaccaatattatttaatcactctatcttggtatcacttaaatttatttatacgtttcttgaagaaatctaaattctgctaggattctaagaacttgttatgactctaaattatatttctcctattataattctaataattgactactcctaatttaactccaaaaaatactaatcctaatttaatgtcaactaatagtaagtcacttaaagattatttattcctttccttccctttcttgagtagatcttggagatttttcctcataaatattagtttcttttgcatactttgcaattcttaatagtgagactccattgattttctacttggtgagattcctaaaaggccttagtgagattctatggtttctatttgtctttcttatctttctttttgtttattttgttttacttttcccttctgccataaaattttattccttgtttctattaataaatcttaaaagattgaaaccctagcccacctatttgattgtagccttgtaggcaaccatcctagggtttcctacatttgttttggtattagagagaaagttattggcttgaagattttacttgagttgaacaacttacacaaccatgattgaaggctataatttttttatgcaaccattggtgattataccaagtgaaaaaagaagaggattggcaatatactagcatcgtcctaacttgtattgcttgccaaaggagattatgcactatgattattgatagaggtggtagttccaatttagcttaaaaaaaccatgggttttttatgaaaggttccaatatatgatggctatgagaacacttgtgtgcaataagcataagaagattctttgtccaatgaaggaaatttaaccacttaagcaacatggaaaaattaacatccttcgaaccaaaagaaccatcaaagactcccacaagcaattcaaagctgcaagtaaggaggaagaaatcctcaatgatgaatctagaatgcaacgggcagtggtctatccaaaaaaagaatgcaatgggcagtggaaccaatcctagaacaacccatatgagtactcaaagaagtgcaacattatttaagacaaaatattattatgattggtggcaaacatgaagaatcctataatggtataatatgaattgctggaattttcttttgaatttaaggaattcaagaatctcattcttctacaagattgtttacaagaagagtctaggaagtaacttgctacaagcttgctgatgaatcaataatttcgagaactatcaacttgtttcagaacattggaaaatctttggaagtttggttcttgccttgcatgaacttgaataagttcaatagatcttgagatcctatcttatcatggtaaagaatcgacaaagaaagaaagggtggaaggcattgctcgggattttaattgattgtggaaaatcactaaaactcgaggttaagttttttttttccaagtccaagggaattgatgaggatgaatctccaagatctactaaagaaagggaagaaaaggaataaataaactttaagtgactttgtattagtcggtgttaaattaggattagtatttgttttagttaaattaggagtaactaattattagaatcataattggagaattggaattagtctcataataggttattagaatcctagtagaatttggatttcttagataagcttataactaaggctaactgatgtaagaccaagatagggtgattaaataatattagttccttctgcatactttgcaattctcaatggatgagactctttaattttttcttttctaggtgagattcttatagagccttgctcctctcttgaaaccctaaaacataaaaccctagcccacctatttgattgtagacaaccatcctagggttgtcctacatcaagggaactcaatcaatacctatgtttgagttaactgatcacctgccagcatgactctggcattcatgtgtgccagctgcttcaactttaaagggctgaatctccattttgcaatctttttcatgctctctcctcacattgcttcccagacaccaggaaatctcatttctatgcaagttttatcatatattttttttttaccaaaaagaaaaaaagaaggaaaaaaaaaagagagagatggtttttagtctcccaaagccagtgaatacatgataagtttcattcattcgtattccagcaacatctatgccaacatcatgaaaaatataaacgtttcactgatggaaatgggatatattgataaatagttttctttagctgttcttaaaattaactgttggtttaataatactgctaaagctcatctatgttagtttcagcagtttcccagtataaaattgaaatttgcagatggatcaggtgattgccaatatatatgatgaatacactcaacacacatcatttttaggggatagcttaccatgcttatcatacatacatattgcatttaataaaattcatcacagtttgatctagactattgattgttatagttgtattcaaccatgtcattatgcatatgatcatgtatctagttaacagtctgaacccctattagattttgaaacctgtagacatatcaatgcaacatggtttctccctgcttgtatgcatatctaggtccaggcagatggttgaattttgctttaaacagcttgttctaaaatatgagttttggtagttctctcagcttgtgtaaaattccttgtgattaaaaataagcttaaagaggaaataaatgggaacatctttctggtctctttatttcgcatgattttttttttccaattgagtaaggggctacagtcaaggtcttcaccagtaaggttaggatgagttcttgcgcttttccagaaggaatatctttacaggtcttaagggatttttttcaggtgccttatggaaatttttatctttggcaatttcttgtgtagttgtgttatatgtaaatgctaaagactaaagatctacaattaggagtaacactcaattaaactcaatgaagtctcattccaaaaggacaggtcaacaaaatcctgtttcatcattttgctttgggctgtatggttctgtcaaatcacaggtcttcgtgtcgttctcaccccttcaacctcttaggtgtacaggcagattgattgatgtattcactggaggaggtctggctggaaaattttgttaattggggatgcagttaccagaagtgggtgttccaagacttgtttatagattggaataccccaaacaatcccccagattcagttctattcttcttataaaaatctgaagaaaattttttccatgtttgtacagtctgttttctgtttattctgcacatgatcaaataagatccatctactcttatgtgtgttaattagattgaagaattcatttacattttctatgccatatttacctttgcctttgcctacttgatgtctttgatatatgcattatatgttgcatttctccctacaagatctattctctactccagttcccaaaagaccaagcaacattgaattcaggattctcattgaaatttaattggaccaaaatggtgcccaacttagatgtagacacttcaaacagaaggaagaatgaagaagtttgggtattccattttggtccaattaaatttgaatgagaattctgaattcaatgtttgtgacccttatctcagtttagtcccaagttaataatctaacagtcaaaataggtctgattttttggaacaattttgaataacatggttttttatggcattttatagagaactagaaataattatctgtcttccttcattcatgctgtttcaccttatattccaagtacaattgtctatctacatatgagtcatgtgccgcacaaattctcctttaggtcactgtcgat

SEQ ID NO: 13687 - DNA, 2720 bp, Vitis vinifera
  Intron number 19 from transcript GSVIVT01015571001 (locus GSVIVG01015571001) derived from phytozome v7.0 (chr-ID chr 11; pos 5055255 to 5057974 reverse strand)
agggtaaagattgacttcattcaaacttaatttttggttttttatttgcccctttttagggctttcctcactttcctggacctgcatatgattcttggttcttgaatattactggtgaactgctgtgcacttcttcttgtgtcgcaattttgttcccatcactgggtttccattttatgcatttgaaactggatcctcatctttttttctcttaattctggaatgcacgttcaactattatataaatagttgtattacataatggaatcaggagcaagttatgtgcacatccaagataaatattatagtgttctactatggatgtattcaagagatattctgacctgtccttgtcaatgaaaagctgaaatgaaaaaggtttcttccagaagggaagctgtgttccatgcattctactgtataaacatgtagaaactcattattgtttatgctacctgctgctatatagcgttatcaaaaatgagaaatgtcgagataggaactttatgagaaatgctgagggaaactggcaaggaatgtgaaaggattgagtttgagaatagtaagataagtgattgaaaaggaacattttatggatagtttgttctgtgtttcctaccatgttgtcctgctagtttctaaatcataccatgttgtttttctatctgtttcctgtattaggagaaacttctttattacaaacatattgttcaggaatccctccagaaggaaagtctgtattttgacatacatgattggtaaattttagtcatctttttaccctcttcagcaagattgtcaagtttcatcctatcaaaaaaaaaaagattgtcaagtttcagctttagaagaatttgcacgttcatattcctgttcagaagttttattgaacagttagtggcagcccttgaagtccttaaaatagatgctagattttatatcattattgtcatccaatgtccatggcaatatttgatcttctgttgttccaacgttctcagtgggactgtaagctgcaggcaggcaaggaaaattgttgcaacagtaatccacttgttatacatttttctttgaggaccttgcatttattcacaagatcttaatgggttcaactgtcttatggagggtattcttcacatcttttggagtaatattcctctaggttgagcccatgtgccaaggctacaccctcctatagtcttgattgctgtgtcatttagctgaaagagcattgtggtatctgatcatgccatcttcacaatcagaccaaggtacaggaaccactggaccacaagtatattcaccaaagtgaaggtttctcttgcagctgtgttgcttaaccagacattttacaccttttctgcagttagttttcaaaaaattgggagaaaatggatgaatttaatttctgtatcctagcaccataacttgctgcatatgattggtgtgtctagcccagtgcccagatagtaaccagtcactttacacctcttcagttagttggaaaaacatggtagaaaatggatgaatctaatttctgtatcctagcaccataacttgctgcttatgatttatgtgtctagcccagtacccagatagtactgtgtatgtgctttgctgctttaaatgaatctatattttatctgttgttcttctggaattagctcatatcttagcttcattttctttggcatatttcatgtgaactttttatgattgaaatagagatttttaactatttatgtttccaaagccatataaagaatcttatgaactgtcaacaatttttttttttaaattttatcagaatcaaaatatatatcgataatagtaaagttgaagagaaggatgagaggtccttcccacaaagtacaaaaccttatcaaagtaaaaccatactactgtacaaggagaagtaatgaactgtcaacaatattgctgattgtcaaaaaggggaaatcaacaatattgttgataaataggctgtgccaattgttgtcacttagtatacatctggtataaaattttgtatgtaaacgcctttaataagctacaatttctagtttaaagttgaatggaactgtgtgctgttcaattgtctttaaaaggcttcttgtaatgtgaatgtaaggtccataaacctgtcatcaattttttaccactttgtgatgtgtgaccaagagtaatttaatacatagtaactcagttaggacaacaccttctagtagtttgttaaaatgttaacaagtgatataaaaagggttatgtcagtatgttagattgtggatttctattgattcctcttggaatttacatcgatttttatgtttaagtctggtttagtaagagggttgggcatgtgccacactgaccacagtgaccaacatattgctgtgactagagatattcagtaaaaaccagtagtggctccaaaaaggggtgtattgttttacctgaaggatctgtgaacctgagagaggctaaagttactgtgattaggatatggtctgttgtactccatattttttacgtgcttacaatatgcattgcaagttcaattgatttgtcttgcatgtgatgctcctggaactaggattttgtgatgcttgagtgtttcaatttccttttaaactcatgtaactctaaggctagggctgccaccataattacttttccttacagtcctgacaaatttagtattatttcaggtttctaggtta

SEQ ID NO: 13688 - DNA, 4756 bp, Vitis vinifera
  Intron number 1 from transcript GSVIVT01003965001 (locus G SVIVG01003965001) derived from phytozome v7.0 (chr-ID chr1 4; pos 26350297 to 26355052 reverse strand)
agacagcagggccacacatatattcagattattgagtgtagcataaaaaggatacccaaaatgtgaagttacatcatcccctactccaaaatcaaggctctaattttgagaggaacacatgagagcacagtagcaagtgtcacccaaaatcattcctttccattcaatcctgcttttgaagcctcaaagatcatcatgggaaatggagtcagcttcaccaaagtgccttaacgttgattaataattaacaaccaacaatatgggctcatcacagtcaaagtctgaaaccccataaccagatgatctcctttttcatgggacattcaaatattgcagcagcaagcatatatttgacaagtgccccctatataaaataaaaaaaaattaatcagcagtactgaagcaatttggttcatgcacacaacacaaatatccaacatcgaatattcgccttaattatttgggttgcacacagccatcaactacgcaaacgtctttggggtcgtggaaaagtggagctcaatattcctcacaatgatcttgagaagtaattaattaagggtacgttctatttattttctttaaattttgaactaatttttacggaggttctggagacaacatacaagatgcaagtaagctgctatttataaatcttaagcacgcctgcttgggatatgattgtcctggggcagatctgctacaggagtaaatcgtcttccctcagctgcacctttgctttgaatatattaagcacgcctgcttcatatggatccgaatgaacttgacagcactaaatatggaatagttcagatgccttcaattaccatttatatctgtcaatattttattttcatgttaaaaaaaacaaaaacaaaaaaaccactgtcattcaataaaatgaaaagtagtaacatattggccttgtttaaaagcggttttttagaaccatttttgttaactttagaacaaaaaaatacgataataaaaaactattttttatttgttattcttaagaatagaaaacatgatgattttatataacattttttaattctttttaattgtttttatttgtttttataggactattttaaaaaataattatataagtatataaaataatttaaaataaaacattagatataaaaattatttttaaaaatatttaaaacatgtttaaaaaaattttaggttttcaaataaactcttattctataaaatcagagaataattttcaaaaactattttttaaaattgttttttaaaacgttcccaaacttggcttatactttctattttttatttttaaaattaaaaaaaaaattctatatgaaaataaaatatcttagatttacttatatcttgtatatgaaaagtaagtacaaatttatttgtatctttaaaaattttaacttttgagttaacaaaaaattttgacacttcaatttctttaaaaaaatttaatattattactcttttaaaataaacttgtatcttatatacaagttatataatttccttattttaaaaacaaaaaatggaaaatatattcattgctctttttaaagtaaacttgtatcttatagacaagttataatatttttaaattttaaaaacaaaaaataaaaaatatatccaaacgtctataagtgttcacttggatactttttatttttttatttttaaaattataaacttctatataaaattagaatattttgaacaaaaaatatatatttatcttatatctttaaattttgaaattttgaggtaataagaattttttataccttaaattttttaaataatttttaaaatcatttttttaatataaacttccaaaaattcttgtatcttattgaaaattacaattatttaaaaaaaaattttatttaaaaaaagcatggttaacatatacaaatggataagacagttggatatttttttttctatttttaaaaatagaaaataataataactcgatataaacttttaaaaactttttctttacatacccttatttttttatttaaaaaacaaaaaataaaataaatatatgtcggatatatttctagtttactatttttaaaaagtgttaatttcattcaaataccttctttattcttttcattttttattttcactcaactctttacttactcaaaataagaaagatgtataataaaattttaaacctataaaaactacatatatttagccaaaagctcaaaaaaatgaatgaaattaaccatttcaaaaatataaaatgataataactcatatatagaattttaaaatttgtatcgcattaaaaaaaattattactttaaattttaaaacttttaaaagtaacttttgagaatataaataaatttatatttttttttatatacaagagttattatataatattactatttttaattttaaaagtgtattaaaaacttcaaagttcaggttcaaaaattcgaagaagcttgtacggtttgggaagagactatttatatcaaagaggtctacgaaaaattctggaaaaacatcaacggttgctgtgaaagttggatctacattggatctcacctgaatcgctccatcccatcgaattgattgggtcatgtaggaacaaggttcaaatctaccggctaattgtaaatagccccagaactatagaacaaatgattatcccgcacctacatcgaggtggagaaaatggtttagtgtaatgaatggggcagtgagaggcagcgtaccacataagacacagtattgaagctttgtctattttgggaatggagatgagtaagtttttaatcaatattttatgagatgtttgaccattatcttaatgtggtgacgatggatggtgcactctcctattttagtggacacttcttttattttattaatcaagatgcaatatgggcccttaattcttgtagggtttttttaaaaaaaaaacataattttaaattttttttactcgtaaacgtgttgagtatagaaagtgaattcatcttatgaaaatataagtttgttgtaaaaataaaagaagtgataaaaaatattgtatttttatatttatttttaaaataattgtattttattttttttaaaaataaaatgagatttttatatacatctcttaaattagaacaaataaattataaatacaaaaatgattgcttaattatttaatatatttagttatagaaaattctatcctaatttaaaaatatgaagaaaatacaaaaaaaaaaaaaaaatcatcctttgtgatggtgggaaattataagcatcaaatccatataagaaattatttcatttataataataaaattcttggaaaaaatatataataaaggaaaattatatatgtaaattttatacaagaaattaattgcttaataattaaatatatgaaataatatgaaagtctttactacaaaagcaaattatatttattagaaaaagaaataaattaataataagaaatcttgttttgaaaatatggaaaatcattttggtaattcaggatcatattttcaccttttagtcaaatatcccatatgtgcacattcaacgattagattacgaggggccacatgaattgtctcaccgttagttagttcatgtggcaaatccaaaccagctcaaagtaaccgttaactgttgggctaaatgcattttatggaggctaataattgaaataaaaattaatttttaaaaataaatttaagaaaatatggttggatttttttttatttaatttttattttgttagagagagagagagagagaggtggttagtggttagacgtggaaagaccaaaaccaaagtggggcatgcctcatgccccgctgtcagcatctgtcctattttctcacagtccacaccccaaattcaccagattgccatctttacatcattacccaaatccgaacccactccacctgcactttcgaaatattcatccaaataaaaaatttatcatatatttataagaaaaataaaaaattcacttatttataaaaacaaaatgtatggaaatatgacgtggaatagatcaataatcgtggggagcagttaaccggatggttttaaccatgatagcacgttctaattgcatatgccaggtgccaccggccttgccacgtgtcatgtttaattctagaaaggaaagagataggctgtgacgtaccacaccttatccggctacattccttcgacctttgcggaaccttcactaatctgcttacgtggtgaagttcaaaggccgtaatcgcggtgggctccagggtcccaacttaaagccacgggacatggcgtcgtgaacattgcgaaccgctacacggaaggaataaattgctctgcgggaggagtatagggtaagcatttctattgcccaatcagatggcgctgcgtgtgagcttagtatgaggtggccagatttgattggggggaagaggggtgtacgagggaggatgggttttggaagagcacccaacggacactttaactaccgcatataaagcgagatgaatggccgaaatggccgaaacagcaaagagcaggcgtcgcagtggctctctctctttgtaacaacccatcaaagttgacaacaggcccgattttgtctctgtaactttcccaagagtgagaggtttggagtggagaggagacaaaaatagcagaaggggtagaagagaatcagatgaatgacaagaaacaagagagtggttctcagcgtcagca

SEQ ID NO: 13689 - DNA, 9577 bp, Vitis vinifera
  Intron number 12 from transcript GSVIVT01031676001 (locus GSVIVG01031676001) derived from phytozome v7.0 (chr-ID chr 5; pos 20061254 to 20070830)
tggtaggtatttttacttgtcatgtttcttcctgcatttttgttttattgatttcttttcaatcataaaatcagagttggttgcttatgtggaatgcaatatattcattggggttgcttgcaacgtcttttcctagcagaatgagattggcgagtgcctttttctagcttgatgctatccattttctatgcagtgtgacgtgtttcatgtgaattgggagtgtttttaacttgcattcgtatatgtggtttccaaaccataggagatggtcaacatacctactagtacgaatacaaagcattgagataaattacttgtaactggagcagaaaatgtacaaatttggtatcttgctgcaataacttcactattcttacctatcaaaaaaaataaaaaataaaaaaatccttcactattcttatagagcgtattaagcattatcacactaatgatgtcctaaattagtgatggtgacatactgactgcactttcttgctatggatgccatctagatacatggacaatataccatcataactgacttagacagtttgtctataaccatatgataaaaactgaacaaagaaaaaatgcaatcttagagacatttttttttaaaatttattaagttttaaatattgagtttcaagttcaattgttcgatggtttttttttaacgtaatagcattaaggaatgtattattagtatgagaagcatctgcttcataaaagcttgagaatcaaagagattggttaggaggtgttattgtataacaaccgttttttctatgggctgagataatcatgcatttttgtgtgatatgatgaagttgaaatggactgacattagtgatgccttagaggtcaggggtatttagaaaggaagctcaggaaatggtgaggctaagttgaatgtgtatgatgatcagttttgcaagttgggccataggacggggaacttattctgatatgtgagcttgtcaaggtaagggaaagaaagggtagagaagcaatcttatcactcctgttctaggcatggaatagatgaaattaattttttaaaaagggattttgtttaagaataaaatgttgttgaactgtcaatacccgattcatccttgaaaaccatattgcatgctaaatctgatgagatagtattagttcagacagtattttgtgaatgcataattattttaaatatattaacaatctctttattttttgggtgaaactgcatcgagggggaggattaagatttagtgaaggatattgaggttaaaagaagaatgaaatagttattgttagaatttattgttgctatgctagagtttattgccatattatggtaagggtattattgcaatctcctcttttttagcattaataatataaataggtggaaaggtataggaaagtgtacaagaccaagactaaaacctaaggccttgtttgggaactatttttaagaacagttttctgttttctagaataaaaaaactggaaaacacgtttggcaatcaaaaactgttttctgttttatgagagacggggtgtttttagagaacttttagttgtttttagttgattttacttgttttttgagagttgttttaaaaataattatacaaacatatataatgattaaaaataaagttgtggacataaaaattatttttaaaacatatttaaaaatattaaaaacaagttaaaagcattttaggttctcaaacagacttttgttttacaaaatattagggcctgtttggttgcggtttttgaaaactgttttggaaaacagtttttgagaacagtttttaaaaacagtttttaaaaacaatttttggtgtttttagaaaaaaaaattgtgtttgggaactgaattttggaaaacagtttttgttctcaaaaacaaaaaaaacatgtttggttgagttagtaaaaaagttttttagaacaagtaaaacaaaaaacatgtttgaaagatgtttttttttttccaattaataaagtgttttttttcaattaatagtatattctattaagatgagatgaaaagttttaaaaagaattaatttaatttttacaactaatttttacctgataagcttgtaaataaaataaataggacatgaaaataaatgcaagtaaggtgaagtttgaagatggtcacttttcaagggattctcaaggctgaagatgatgttatatttgtgttgaccaatatattttaccatccaatatgtttgaccaatagattttcactttatgtatgaattttttttttttttttaccacccattttatccatacaaatgaccctcatgtcccttaaaaatatctttgaccattcgaatattgagaaaagtctttacccaatattactaccctcactctctcgtctctcatcttcttcaaaactgagaaaaaaatcacctacaaaatcctttcaataataatcaactcgttttctttctcttccatgtccttaagcaattttttttttttgtttttcttgaacaaaacaactcaagaaaaatcaaaattgaggaatggaaaaaatcaggttttttttttggttttctttctcattccccacttttctcagtatccaaacaggaaaaataaaaaaactgacaacacggagaacaattgttctcttatggctttttttttttttgttttgttttgtaaatagtaaaaaaacaggcaaaacaacattttttttgttctctaaaaagtgccattttgagaacacggagaacaagaaaaacaaaaacaactttctcaaccaaacaagtttttagtgtttttttgttttcaagaacagaaaacagttcttgaaaacactaaccaaacaggcccttagagaacaattttcaaaaactattcttaaaaactatttttaagaactgttttaaaaaacagttaccaaacacggcctaaatatcttccatctgtttctttcttctttttttctccttttaaaacctagaatcacaattttataatttcaacttggtagattatgctcacatcataatgatatcatgctaatgtcatcatcccaatctaaaattttgcaaggttggatctactagttttttaggtaattatggtaatgttttaggacttattttgaagttgtttaattggattctgtgtgtgtatgatttttagaattttactccttattttggatttgaaatttggggttattttgatggatgtttttggttcaaattggtcctacgtggtatgcttgggcagaggatgattaaaatgctggctgttttttgctgattttttcatttgcatttcagtgtatttttttttgcttgagaggacccatggactatttttagactctttgaggatgtttgattgtgctttcttgtttattttttgataggcacctaaaaggagatgtagcatagtacacacgaagtatacaaaaaaaaagaaaagcttagtagcgactagggaaaagaataaaaagactcgtttccttattttaagctcaaccaatttatgaaatctaataatgacattgtatgatcctctatatataccctagcttaggtcccaaaagtaaacaaaaaaacagatttgattgcttggttggattgcccaacattgttaaatgcccttctgtttctctccttcctaagagtccacatcaaacataagggagtgatcctccatatattttttttttcctgttttttcctaacaaaagagccatgcaaacccaacaagtgctctctaaatgtagaatgtagaatgcataacccactccactccgaaaagagagaaaattagatgctgcaccattcttgctttggatcattgaagaagctagtggtctattgtttcctccgcacctttgcacaagtaacatctactagggaaagtctattccctccttttgaactagtcaagagtaaggattctacccgaagatgcttcctaggcgaaaaagctaaccttcaattgtgcccaagcccaacatacaatactagctagaaaaaggcactctatgacccctagatagggaagaatggagagatttaattgaaaacttgccacatttggatttattccacgttagtttgtcctttacttcccttttaattaccattaaatgtaatttttgaaagaaactctccacttcagtcatcttccaatcgttaaactgccttgagaaatgggggctctagtcacccccttccccttccaactcccaagcatttgccacccaaccctctttgttggaggccacgaaaagtaaattcggaaggacttcttccaaagtttgatccttgcaccataggtttttctataatttaacccttctcccattcccaattaaaaagtgagacctactttttatcgcctcccattcatgtctaatggctttccatatccccactcttattctcgtctatgaactttcctgttacaatttgttttcataagggattttgtagaaaatttccaattccacttaccaaaaaaatctttattaaggacataaaggttgcgtattttgagaccccatccttaattcccaagggcattagattctagttaactaaatgagaccttttgtcagcttccctattctacagcctaacatcgaggctaagtcctcctccacattagctactccctcgataggaatagtctctctcttctctagaattacttttaggctggagtttgctttaaaccacaaacgcccaactcaaataattcaactgatctggattgacatcatagaaaatcaaaatattgtcggcaaacaagagatgagacacttccaacaactccccatcctttctacccaccttaaaacctgtgatgaagcccttgctcttggccttagtaaacatttgactgagagcttccatagccaaaatgaacaagtaaggaaagaggatccccctgcctcaaccccctataattctggaagaaattggatagagtgccgttaatgagaatggagaaggttgctgtggaaatacgtcattttatgcacctttgcccaaaccccattttagacatgattgccaataagtaatcccaattaatatagtcataagccttttcaatatttatctttagaacaagattagacaagttgctctttaatcttgagtcaatggcttcactagcaataagaactgcatccagaatttgcttgccttttatgaaagcattttgaaaatttgaaatcacctttcccaccactttcttaggcctatttgctaacactttagctagcagcttttacaatccccctacaagactaataggtataaagtcttttaaatcctccaccccacccttttaagagtcaacaccaagaaagtggaacttaagcttctttggaaagtgacatgagtgaaaaactccctaaaaaagcccatggtcttaggcttaacaaggtcccaacaaagctgccaagaagtcatggtaaaatcatttggacttggagccttgtccccacattgaaaacttcctccttagaaaaaaggctcctctaagctcttggaactaagactccccaacacttcaaaacaagtccctaatgcttggtctgcaatctcctgacttggatagaagagcatgaaaagcactgcacaccctgtccttaatctcgtcaacctttgtcagagtagcacaattaactctcactttggtcatcaaatttcttctactacgagcattggccatcttatttatgcaccattaactccacaccctgtccttaatctcctcaatccccacttttgcaaacattgtttttgcaagagagcaatgtttctggggtttatgagttgaatgagaaaatttttgtgggatcagttatggtagtatcagccttttaccattgacttggagcaacagaagcaccactagaaggagttcatgattgcttcctcatcatctagttttggactttctgatctttgtggttttagggatcatattcttgttagcaaagactccacccattgctgctaatgcttattcttagctattcatgttctctttaggactatggctcctttggattcttctaccctaatctctagcatagcaataatgaactataatggtcactttcataaatcatttaatggaaagggcttgagaggcatgtgggtggttcttgggaaatagtccttccaaatgaattgtggcatagggaatgccttggtagtgccaagtagtcacaggcttgaaggagcttgtttccacgtgtatgtttgcttttccttgttgctgtatgacttgaagaatagaagctgagaaatacaaagacttgaattcagggctgtaaaacttaatttgggaaattcaattaggtaaaaattaaagaaacaacaggaagaagtatggactagaatctagaatcactctagtaagagttaggaatcattccttgtttaaggcctcaacttgtatgatatgtacatcactcatgataatcataaaatcatttatcctcattcatttgcttttcaaatgcatacaagcatagttgttaaaaacataggatacacgataaggtacatttttttattttattttatgaaaattgatacttatggtaattcatatcatatcttaagcttgtcttgtgatgcataacaatacaacaatatatactccaactatttttcataatatttaagaaaaatcaaagttatttatttattttttctcctagaagaattattgtattaattatttaaaatatgcagtaagattagaaattgatcataaagagcagagagaggtaagtaatcctaatatgaaaagatacattgttgtccaaagtcatattaggagttaagaaaatttattctcacaatgaatattggaagaatttttatttgaatgatttgaattttgacattgaaaatgatggtaattggtgaataaaaactttacttaatgtattagttttgaaaatataaaaagttgaactttggagatgacatataaagacatatatatcaacaacacatatagtactatcttttataaaattggttatatattattctatatttcatgcttcccatatatatgtacatatatgcatattttttctatttaatttttcactacatagaaacttacaacacatgatgtgatacagaacacaatacaaaaaaaataaaaaaatgatacacaatacattttacgagttaacaactttgcatattagtaaggccttttatggataggtagaattgtatgcttacattggaagactagaaaacattttaccacacccagttaattagtaaactcctaagacttaacaaactgatagatacttctttatattatcataaatatggtaactcctatataaacagtccaaaaactcatcaatatcatgatgtaaaataaaacttattgaagaactcactaaactctgtataatgccagtatccccttgttcccactaggttaaagttttggtctgcaaattatcattactttattgactgcttatacatcttgatcatggcactgttgctgtcagctctccagctaggtagaactttactttggtcagtgaagggcttaaggctagctaaagcatataaagaataggattattgaaataactttttgtttttttgcttcagcttgtttatagctgatgccaaaaccataattttaaagaggtaaatttgatgttacagaagtttcaagaaatatgaaatattttttctgcataagacaaaaatgagcttccatgtcaaaaactcttaataaaatttccaaaacaagtacaaaagttctaattgagcttaaaaagtttttttcctgttcataagtcaatccaaactatgcctaggtatgaaaagtggtttcctaataagttaagggaatccattgtatagtggtttatgggtccatcaggaagggtgttaaggagtttgtctaaggtattggctttgttaagggaaacatacatagactgtgggcttagttttgttttatgacctagtaggttaggctttttgttcttcaatttgggtgttactgtaaaattgaaaattgtagttctagttaatactgtagccttttaaattttaagtgaatgaaaatgaaaagtttatttgtactgtttgaaattttagtgttgagtttgattaaactatttgacatattaagtctgaaaattgattgatttacaattttttttcttatgctttcagttatttagtaatagtgatttacaaaattttattagtgcaataaatttttgtctttgtgtgtggtgttatatatatgtattcccattgtaagtggttttagcagctcccattataaatttatggaaaggagtcaagacagaaattgtagctaaaggggttcctgtaaaattgaaaattgtagtactagttactactgtagcctttcaaattttaaatatatgaaaatgaaaagtttatttgtattgtttgaaattttagtgttgagtttgattgaactatttgacatattaagtctgaattgattgatttacaattttttttcttatgctttcggttatttagtaatagtgatttacaaaattttagaagtgcaataaatttttttatttctttgtgtgtggtgttatatatatgtattcccatcgtaagtggttttagcagctcccattataaatttatggaaaggagtcaagacagaaattgtagctaaactacatttaaaaatccattttgagtgtttgatgtattcatgttctgatccagctataagacatttataatgtattgtaaatgctgattccattgtgatattcaattttttttgtttcttattttgtcacactttagagggactctatttactcactttcaattgctcatgtttatgcatcatgagagttcaaaatttcctttgtaagttaaactttaaggactatttatccactttcaattgattcaggtttttgcatcatgagattcctattgggaaatatatcgattaactagagagaacgaagataaaatattgtcgtgtgtataggaagcaaatactcttgaccaataaaaatatgaaaaaagcaatggcaggtaaaacgaagaaaatcattatttaccagatcccattcacatagctttgctatgaacaaacttttatttcccatcaaccatctggcccagagaatgttttataatttgaatcattcagctgatgaagaaaagtgattgacgtagagaaagaagacaacaatgtcattttaaaaatatagaacttcaaagttttagcatattgtgtttgaaatcttaggcatatctgaaattaagttttaccttatttttttagatgataaacaatttgcattatcaaattcactgaatgagtgagtgaagaccatttaatttcactttaaagtactttatttggtcaccagaaacacttaagtaactcataatgagttcattttagctagctgccatatggagtttcttgctgatgataatgaatgattcacggtattgcaggtctcttgtttacctacctaggcttatatctg

SEQ ID NO: 13690 - DNA, 3032 bp, Vitis vinifera
  Intron number 5 from transcript GSVIVT01036517001 (locus G SVIVG01036517001) derived from phytozome v7.0 (chr-ID chr1 4; pos 22966255 to 22969286)
ctcccagtaagagcacattagcactacattgttctttagaaaattcttgatggattctatataatggagattttgtgttcctcaatttcaattattattgatattcattactggaagcattctctttgatatgtatcatatttattctctattgatcttgttttactaagttggtgtttcttgaggacctgaatgtgccttccaaattagagctttttattttcatttttctctaagtctaaaatttcgcatggtcttatgactatagtattcaattgaaagagagaaaaggaaaaagaaaaagttttgattgtaaagaagacactaacaaagtagtcatcagaaaaattctatggaattccctcatatgtgctatacaacacatacatcacatgtttggctagtataaaatactcatacagtctgttatccctgagaggtagctcagttggtccgaccttgggtttgctccccaatggtcaccagttcgagttccctcagggccactggaggtttacctggtcgttaacttcagagtcccgtgggattagtccaggtgtgcgtaaactggcccggacattcacggttataaaaaaataaaaaataaaaattgttggtgatcttatagatattgcctttttttttttttttggtgtttttggtgagttttcttgtttatgagtgaaaagttcttgatgtgatttgggtattaacattcttattttgaagatggtaggaagtggggatctttttgcaggctttgtgaaattaaaatgcaggtcaacttcaatttcaaattctcaaaatttcagtctgattcttacattttataattttattttattttttagatggaattgttttttaacataattttcagagcttctaaaatatgttgtaatgcaagaaaagaccagacttgttcctaaattgaattaagccctggcaaggaatgtttaacattgttttatccttgtgagcaacagaaaatgttttcttctgaatttttcattaaatatgcttattctaaaaagttttagggatgggagctttatctaggctttgaaatttaaaatgcatgtcaaggtttcactgttcagttttagattttctaaatttcattctaattttctaaaccttttaaactttgttttattttattttagtcaaagtattgtacatttctcctacataacttttagtacttgtgcaaattttggattttaaaattgcttcaatactgacaaggatatttttgatgctgaaattgacatagaccttagcacgaaatgttaagcatttcttacatatcacaaaaaaaaaaaagaaagagatgtccagcatttcttatctgccacagacagaaacatgtttttttttttttttccttctggatattttctttagtccttacccgtattgcaaatgatgcatctgcttcaaatatgcatgctgtggtgacttggttgatttatgtcagaactaggttcatcttacacagctaaatagtgggtttagttaggactctatgaggaagcaaatccctctgaagcagggatgcaagggaacgcctttgtaattagtgaatagaaagaactcaattgaaaccccatttcatatttggttgacaacaggcacaagacggtctaaccctgcctaggccatcaatgatatctatataaaggaataaattgtacaccaaggaataaagtcttagcaggagatacttcaattctaattttgtatgctttcattcataaaaatcatatgtcatcactctatcgagtacatacaagaggaagaataagggcctgtttatcacatcctcttagcagatgggaaaggacttgcacaccctgaacatggagaaaaaaacagatcacaaactgcaagctggctgacaatggatgagaataaagtcatctgactccttcctctgtttgcaagtgcgcacagagaacagctgttaacaagagttcaaacccattttgtaagctgattggtcttaagaaccttctttcttattacctcctaagcaaaaaggctaaccctacatgaagcctgaagctaactttaagtggagccatagaatagcataccccctccgctggaaacaagcaagagggctcccaagtcccaaacttaagtatttgcagaaagacttttgccatgaaacaaccattctcagagatcctccatggtaatctatcatcacaaccctcacaaaggacaattgggtgaatatgctgcaaaaaggactctgtggaattacaactctcaatcctgataaaatttcttctgataaatctttcgtcatccatacaatctaccattctttgcctgcttggaaactgaagtgcattatgataggacataatattctgataaaaaaaatagtaaggcataatctgtgaacccatttcttacagcttataaagatgcaaatgtaactgtctgggaggctaaaatgtgtgttatttaacttacaaaatgaagatggtttttgatgattctgtgaacccatttcgtcactcctttttatttatttatttttattttgttatttatttatttatttgtttgtttttgttcgtttgcaatctgtcatcttatggcagagattcttaaagtcattttgatctcttttctgcttaaaacattacttcatttgaattcaattgcttttcattcctttgttacatttgaaaaattgtaaaacaatatactgtataaatagtttgattttagatagaaaatagtttgatttttgttccttaataaattctgtgtagttcttgttccacttaactctctcttgcttaaattttgctaatgaatatgttctctttagtttattgaacaatttcctttatttttcttcttgtcaatcctatcagatggacaggtttctcctcctttgctttaaatgctgttctctatacataataatattctcatttcttgtagagaaggtttattgtttggttcatattataggaatctgacttgaagaagataagagaagctaaaat

SEQ ID NO: 13691 - DNA, 8629 bp, Vitis vinifera
  Intron number 1 from transcript GSVIVT01007587001 (locus G SVIVG01007587001) derived from phytozome v7.0 (chr-ID chr1 7; pos 11606618 to 11615246)
atcacttatttggccactgaaaaatcttcacccatgtctagagtggttccattttgggatttttttcttatgggacacagcctctgctacatttcccccaatggttcttatctcacgaccaaactacctggaaatccaaaacttctgcaacctgagcatcacactaaactttggcaggagatctttcaatataagaaaactgttacatccatcaaaacccaagaagattgaagcaggggaggatatcaggtaacgataaaaaatgggttgtgtctcgaaagctgagtttgagtcattttgcattggtaaattattctcggaatttctgttcatcttgcatttcagttccagcctttaattgggtttcctctccggaattttgctgaagatgatctgtaagacctgagatgcagggtactgctgggagcatagaagttgacctccaaactagctcatgttcaatggagaagcaagttggaaagcttggtcaacaaggtgttggatgtttgcgatgtgtgccatcattattaaaaccaatactaggcgagtgcatagctgcctttacttgcagctcatatgtattatagtttaaaatcgtctgtttgcttggggtccaagcccaccaattctatatcttctctgaaacttctgctttacccatcagggttggagctctttcccttcctctgttctgcgtttactcaaaagggtttgttgcattttcacctttgcgagagtatcaatactaatgcagttttcgcattgagatgatggcattttgatgtttcaaccattctacattttgcagctctagtcttaattatatcttaaaaagttggtcatcaatctcaacaagctcaaggacaacgagtcggagaaatgactgacaacagcaacatggaaggaattcaagatgacgtcaaggatccatattctccaccaagaaaaaggataaagaccgatgatgaagccagtgcaagccaagaaaatgctgtgaacttctctggatccttagttcccactgcactcaaatacaagatccatgcccatgaaggtggctgcagctccattttattcccatttaattctcaaaatttgatcagtgggggaaaggacaacacgataaagatatgggacacaagcactggggcacttaccagccttcttcaaggcttccaaggctcagtttatgatcttgccatcagctctgacaacagcttccttgctgcagctctcacatcccgaaaattgtgtgtatgggaattgaatactggtcaaattcgccagactctcacaggccacagccaaaaggtttgtgctgtggatgtgggcaaggtccttagccgctatatagttagtgctgggagtgatcaaatgataaaagtatgggacttgcagcaagactatcctgtctgttctcgatatatctccagtgcttgcaatgctataagcttttcctcggatgaaaccacaatttgttcaggccatgccaatggaaaggtcatattcagcaaagtcaatagattttggatgaatcatagcagtgaagttgaggctcatacacagtctgtgacttcaatctgcccacttcaaaatgggagtctcatactgagcagtggaagggataattggcacaatttgattgatacccggacaatgcaaatctgcagtaaattcagaaccaggtgcagcagagtggcttctaattggagccgggtgtgtgtcagttctgatgacaattatgcagttgtgggctcagctgatggatcagtctatgtgtggtctatgcagatgggaagaatggtgaatgctctgaaggggcatactgctcctgttctcgcttgttcatggagcggtatggggatgccactggcctctactgatagtgatggaactatttgtatttggtcttgagatgagattttggaaagcattcagaacaaaaagactgaaaaaaaaaaaaaaaaaacaaagaattgaattaatggttattacttttatgcttttagcccggataaattaagatcagactgcaattccttcaaaattctttcttctgaattccagcaaaatgtcatcccagaactgccacttatcatgagtagtgccatttagccatgagagcatggggacatgaggaatgttcttcatgcccatgatagcattttgtgtatatttcaattttcctctgataatggttgattctgatatctcacagctgcactacctggaacttcaaagctcaaagcagtgaccattcccatggacgcttcccctcaacttcagctgccttagcatatcagcatgatcttttcacaaatcaaatgatgtatttgacatcatccttggtgtaagtcattttgcatctctaaatcactcctgttttcctgcatttgaattccagattgtcaaatggatttattaacagtgggttaacagaaagaacttttcttctctctgaatgatgctcaagatgatctttggtggtcaaatttagagggtacatgccctatttggacccatgatgcagggtactccagaaagcataagtgggtgccagaagctgacctccaaactggccccacattcattgaagaagcaacttgggaagcttggtcaacaacgtgttgcgggtgtacacaataattattcaaaccaatggtggaagagtggatagctggcttatttgcttggggaccaagtttaccatttcctcttcttcttcaatatcctttgatttgattcttagaccgaaaggcaagtggcaacagcagcatggaaggaattcaagatgaaaccaaggatccatcttctccactgagaaaaaaaaaaaaaaaacctactcttccctttgggctgggtgaaaagactacttgttcaatttgatattttggagatatgatacctcctcaaataccatagaatcctaggttgtcaaataaataaataaataaataaaaaaccaattaggactcaatagcaaaattcaaaacgtgaattgactttaagataacaaaaataggctttattttttttatggtctttaatttaaaactcactcaaaaagccaaaattaaaaatatcaagtaagaaaaattaagataacatataatttcatatgtaaacgatcgaatccttagatgtcttatgaggtgttaaaaaaatggttaaaataattgaataagtggattactatgactataacccttgacaaattcattaaaggcgaaattgatttatttgatgttatggatttttggttatggagggaccatttcatttttgtaggtggtcctatctattgctctttccttgtgcttatatcactttaagaggttgatttacatgtataacccttgtaactttatgattgtctatgaatttactaggtcctagttggaaggttgcaattttttaattttctcggttttttaactaggaaattttagttgttggtgttaaatagatggtttgtagacttttgttactctttatgttattttcaaattattaaatatcatgttgtgttaatttaaacttgttcaatttgtttcattaggaccttgtaatgcaatcacactctttgtttcaattgctatttttgtttaggtattttaatttatctattaggtcaatttggttaattctaaggatttcataattggacattgaacccattttatattatgggagttgtcgatgtattaggcgttactttgcctggcaatattcatggtgataccacaaaaaatatcttattttaagatgatgatgacatagacattttaagcttttaatccaacttaaggtaaagaagtttattcaatggtcattactatccgttttttatccctaatctttgaggttactttttctaataagtgttgattacatttctttatgttatttgtaacattaacaagtttatgagtgagtgttcttgagtagtcagcccatcacactttgtttctaggaaatatatgctaggaaggatcttaaatttgagactttatgcactaaaaataaatcttaaatgtgttagaagttattaatatatttagttactatattagaattatatatttagttactatatatttatttagttactatattagaatcattttctttctttttagaagtaagggtaaattagtctttattttttttattaagtttatttaaattctaatgatgttgtacatattttcaagagaattgataataagaaatcctagatttccttttctttctttttctctcttcgaatttatttttggattttaatatggtatcaatgtaaaattgatttttaatgagacttttgatttgtgatatcatggaagagagtttaatttcatacactgattttcatatgtgtttgatttggaatccttttttcgtcgtatttgatcgtaggatattgtaatgggtggttgcattgttcttctcctgtttgaacctagtatttgatttcatattcatttccttctatttatatttgctttcttttgtttggtggttattcatcatgacccaaatgattccgttcaaactattagtgtgagattggatgaaaaaaaaattattcgtgttggggttatgtgataaaattttttttaaggggcaaaaagatgtgaggttatattattggcactctacgcaaacctatgaatgaaaatgatgaaaaatatgaagaacaattagatatttgcgaagtaagcaatttaaaaattattattgggattgacaactctgttgataattagatggacatacaattggccaagtatgaaacaaccaaatgagatttgtaaacatttgaaaagattgtatgaaactaccaaggagatatgggaatatttggaaagattgtatacgcaattgaattctttatttatttgttagatattaatctaaattctttgtctctatttgttgaatatgaatctaaattttatctctctctttgttggatatgaatccaaattttgtttttcttattttgtcatgccccaaaacccactcgtatgatgaccatttcacacctcaagcccgaatgctcaaagtggaacaatataaacattcatattgtaactgaaaattaccaattaccaaattcctgttcagaatagtaaaataaatgcattctaaaatattcagatatcgtttttaaaaactaacacatcaattaaagtgttattgtccaaataactccaaactaaaataattcaaatgggaattaaattttaatatctaaacaatgtccaaaataaagtttgaaccaaaattctaacaaagaaaaattccctagtttagccatcactccttgtccgaactgaaagtacttgaaaaagtatcaatgaagggtatgaacttaaagcccaataagaaacatcaatatagtttcatgaatcaaacattttcaataaaactttcttatatccatttcaaaacaatttcatattaaaaccaaataaaatacattaaaaatatctttactctagttattgaataacaaatggtgtccaattaggtgagacttcacaaataagtgactagtttcaaatttgttcaatttaaggtgaacaaaaccaaatgtcaacaattataatctattgactagggtcataaaatcaactattatatctcattgactagggtcatataatatcaactattataacccgttgattagaattgaaaatgttaacaattataacccgttgactagaatcatagaaactagagtcaaatactttattttattaattcaaacttataaaacaaaatatcatatctacataattttcatttttcataaacaaagaaaatgatcaaacattttttccatgaaaaaacatatatttgatttatgcatagaaataaaaataatatttttagacatttcaaaatataatataaaaagaaaattatttatttttacaaaatctacactaatttccctttcattagataagcactcaaaaacattagaaaattaatcccaaagaatctactcctcttctaacataacattaaaagaaaaaaaaatcatctattactattaactatttatctaaaattatatatttgaaaatcctaataatttcctatgttatgtcacttgtattatttttaacttaatcaataacaatttcatttgtgagtttctaaattcttataaagttggtttctttccaaaatttatttccaagattctattaatttattattattattttcttttctcaaactcttaacctccatactcacaaatttgatgtatttttcatatccgaaactatattatatatatatatatatatatatatatatagatctattcatttgagtaatcaaaatttgtcaatctccattaataaatcaaattatgttaataaatttttaatctttttaacctagaaattaattaattgaaccctaataaaaaataaagatcctgcaacgaatttttttaagtattcaatactatttaacgaataaaaaaaatgtaatttaagagttaaaatcttacctagaaaactgatcttacctagaaaactgatctttaaccttaaatctcaaattcttcagtcctaccttgccctacactctttgatctttctgatatttgtgtaagagggttttctaaataaataaaaaatagaaaaaatctaatttatacctaaggcttctaaaagagaaaagacttttatatccttattaatttaatttaattaattaattaattaattttaatttatgattttacccttggttttggggtattacatattcttctatgctgatggatatgaatgtaatccaaattctgtttgtctttccttcttctatgattttgtgtcttcttttgtctctcttccttaatcttttcttgatagttttatgtcgatttctatctctatttcctttatggttttaattttgtgtgtgtgtgtttttttttttttttttttactatttcttcttcttcttttctcattctttgatagttttagttttatgtcttctattacttcttctcttggagcatatacctttctattctaactattttttcttcctcgagcataaactttttctattcttgttgagtctcataatgtctttaaatctgaacttattcgtattgatcatttcttaaatgatacaaatagttttgatgcaaatattgatactttggtttttgattgtcatgctccttcctttccttctatagctactcaaacaccttctaagattgtggattctcctctcccatgttcttctcaatgtctttcaagttatgattgaggaactttatgctttgcattagattaatacttgacatttggtacttcaattaaatagtacaaaacttaactggttactaaaagaatttctcaacaatataattgcaaaattgtttaccaagtcacacccacttccacaatttcggtttttggttgacaaactatcgatgtttcttacaatcgcattatgagttttgtgagaaaatgttagacgttattaatatatttagttactatattaatattatatattaagttactatagccctgacctgtaaatggacctttatgagcctctaaaatatcttttagcccatgaccaatgccctaaggcacgtaagttcaaagccagactgactactccaagagcactcatccataaactgttaatggtatggacgaatctgttccttcatccaaatgtgtaaaagattctagccgcacttaaaagctgaataccgaaaaatacaatatttttgttacttgaccaaccatcaggagaagcaaatacaacggggtacattaatcagtaagattgatgaagtagcaattaatgcaaaaacagccaattagtttatttacttactatatcaaaattattttatttcttttttagaatcttttggggatttcaacaaaatgatcatctttgtccttggatgatagctcaagatcaacatcataaaaactttatattcccttcgaaggttctaccctaatttataattttatttatttattctcaaatttaataacaaaaattttaaaaaataaaggtataatttcaacctttctaaacaaagagtttaaaatgggaaatcgacatctgcttaaattttattggatctaaagcttggaaagaaaaaaagaaaaaaagaaaaaaagaaaaaaagaaaaaccctaaaagcacccttacatatatgaattgtcaaatcaatgagaattgtttgattgaacggattgaattcgtttagttaagtttgtttgttgtaacacatgcctcttttaaagattcatcaagtggaattctgttttatttccaaattttaaataaaattgaaaattagtaagcagtccatgaactcaaaacattttcctcctgtgtagcatattcctttcgcagcggatgcatcaaatcgacgtgtcttagtatctgtgggcagttttaaatattttgttgacagccctgtgacgtgatcatttttgtttataaaataaatctattattattaataattatgattataatattattaattttccggacttctttaaaagccctctccgcaccctcgaatctgcttgtgaacgaa

SEQ ID NO: 13692 - DNA, 12761 bp, Vitis vinifera
  Intron number 1 from transcript GSVIVT01005906001 (locus G SVIVG01005906001) derived from phytozome v7.0 (chr-ID chr1 6_random; pos 720651 to 733411 reverse strand)
acacaaacttttgatcaaactttgccctgcatcatgtttggccctcgaacccatatttcacctaattgatttggtggaagaggtttcaatgtatctatgctaactatttggggttcatctttttttcttttggtagatcattctcttttttgcttttttttctctttgttcctttttggttttcaagttacaaatcatttaatcaaagaaatgataaccaaaaatttttcccacaagtgtaagattgtgcgattattctcacaagccagttcatacttcctgtctccacacctgggtcggtaatctttcagtcggaaagggtagcttatatccggaatattcccacaagaagagtgacagagatgatgattcagcttggctttgcaagttgttgggagtaacagaagtagaaaaatgtctgcaaaaccggcaaataagagcctcctcaacatagctggagatggtctctttcctctccgtctcgctcttttattagactatagattaagaacaatcagttctgcttttcgttataaatgttcggtttgggtccaaaaaatggttgaggtaaagtatcacctcttacccactgggagaaagtgctaaaaaacattgactggacacatcaaccgccccacaatgttggcgtctttgcagtcaactaatagaaagggatttctccacttacattatctagttcttccatacaggatttcttcacttcctcagataatttgcttgcatcctttgcctctaaagcacgtagctttaccttaaagaaaggccccataaaagtggataaaatttctaaatgattatttataaaattttaattttctataatgctgacttttcaactttgtgacctttatagtcagtcaggcaagatagaaccagaacaattaagttgtgctcttccaaaaatacgtaccttgtcaacttttctgcataattcatacttgagaaattcatggtgtcatgctctatcacatccaactacctcattgcatttttgtaattgcaaaataatcaattgttgtcaagaaaattaacttagtggttccttattttaaaagtcacatctagtcattaaaaattaggtaaaaaagaggtgaaatataacttagggagtttattgatcctacaaattttcaaagaatggttgcaagtgattttcaaaaaatctatgcaagtgaataacttagatgattttatagatcctacaaattttcaaagaatggttggcagtttgcattgtttgactaatataaaactagatattaaatatggacttgggcttataagtagatctagggattctcaatgttagtcacacttacagttaggaaaatagatcttatgatacattaaaggttatgtatttaatcttagtttagaagttttctcttgatcatcaaggaaacaatagatgattaatgttttgtcaacagcaaaaacgaaatatattgtagctactaatggtgctaattaagtagtatagttgcattcaatgctttttgatttaaagtatactcaagaagtatctataaagatttcgtgggatgataaatcaacattaataacattgaccaaaaaatccagtttttcatgaaagaagtaaacacattgacattacatcatgtactatattcatgaattgatgaaagacaaattatgtttgaggtttgttcttttcaaaattaaattgcagatgtctttacaaaatcaatcaaagtgaaaacaacataagagtcctaatgaaatcaagatttattttattaatatttgagttgtttttgttgtttaggatttgtaatcctagttctattagaagttgagtttctattagaattagattttttatgattgttcatatatatatgtatgaaattaagtggtataaggtaatattttcatataatcatttgttttctttttatattttctatcccttttgtgtgtgataaatcgttcatgtgctagaagctttttttttgcttataatttatagtgacttaatcaatatgaattttcaagtaaggatcctctgtgtcaatgttaacattaaatggaggtttacccttgcatttggagaacttgattcttttgtatttagaaatgtgctataagctagatgtgaaagaggaatcaaggtgtgaacttaatggtggatttttgtggaaaagttttatataagaggaaaggaacaaaccaatttcttttcttttttattttcttttatgttttacttgattgactataaaggtggtcaatgttgaaaaatgaagcattgtggaggaaaaatagatcatgtatgagaggacggacatgtcaagtttttttttttttttttgtcttgcttgacttactacaaaggtaaccaattttgaaaaatgaagcattgtgggacaatacatatatctagacaggtcatgccattattaatggacagttcaggatgtttgaaagatcaataaacattggaatctaccaagcaatgtagaaaaaaaaattgactaggcctcttcctcttgtacataatacacttttccacaaaaatccacagttgagaagtccacaccttccctttatcacatcaagctcattgcacatttctaaggagagaggaatgaagtcctccaaaggcaaagaaaatcttccatttagtgctaaggaaattaactcaatgggttcttattttaaaattcagtcaacagaaattaacattggactacatatgaattattgaaggagtatgatccttgcagcataccatttgaaaattctgaatttttatgtacttttaaaaattttacactaagaatgaattattgagagatacttgggggtgtattatcctaggctaaaagagctcaatgatatattttgtaaatctacttacagagatttagaagccatactaatgagttgtaccatgcatctagaatatcccatctgtcaatacaagaggagcaaaatctattaaattatccaaaagtcaaggcaacatcttcacatcttcatagtaatatggtgttgtttattatttctctattccttagaaaaaatattatgacattttttttattatgttttcatttaccaaaacttcttcatgtggatagataaagatcacaataaatttaaaataaaatatatataaattatactctaggagaccagaagagactagggatatagattaaaagcaagattaacatagcttcaattgaaattggaagctttatatttttacatatgaaaaataaactttatatattgatctcaacttggtaattttttctttatttttcaagataatttatttttttttacaagaaaataccaatatgagatattttgtgcaatatttttacctaaacaaatagaaattaaataaaataagaatcttattattttcaagaatataaactatagattgaatatcttaattaaatgatacttgtcaagttatcgagagttcatagaacaaattaactagttaaggatttccagttggttttattagatgtaattgaataaatgtaatggtcagacaaaaaaaaaaaaaaggaattttgcttttgataaaaggtgttatagcaaattctaattaaccgacaacaaatttgtagcatcatgaaccttcaataattccaatgactttttgtttacatgtggtccattatatacatgtgaagtcattgtaatgtgtggtccattgtcttacatatggcccaatgttaatttatagtgatggaatctatatatatgacttttcaaatgaagaccccctagtcaatcttggcattgaattgaggtttgtccttacatttggaggatttgattcctttgcctttagatttgtgcaatgagctagatgtgatagatggaaggaggtgagaacttcttaatggtggatttttttgtggaaaagtagataaatacatataggaggaaaggagcaagtcagtttttgttgtgtcttgcttcactattcaacattggcaacccttatagtctaccaagtaggtggaataagaaattagcttgaccctaaaaatccacggatgagaaattcacaccttccttctatcacattaagctcattgcatatttctaaagagaaagaaatgatgtcctccaaatgtaaggacaaatttccatttattaccaagactcaattgggttcttactttcaaagtcaatttaatcaatatgggttcttattttcaatatagaaattcttgaaggagcatgatcctttgttgaaggccatttgaatattttgaaaattttttactctaaaaattttacactcagaatgaataataatacgacttttgacttgatagcatgatttattcttacatggagtggaaaactaatatttgagaaacaaaagcatccattaatctcaagaccatgaaatgatgcaatcaaattgtccatggatgttattgcaaccattgaagaaacttaagctatactaatatacttctctaaaaaaaagtatttatatttctgtagattttcttttgggttattagaaatactagaaaagaaagcaaataaagtaaagacaaatcaaaatttcctttacaaaggaaatcatatataataatagtgctaataatacaatttatacaattttcaaaatttttaatctttatgtaaaagagaaaagaaaagaaaagaaaagaaaagaaaagaaatatatttatattatttttcactttttttttctttcatcttttcacattatttttttggtcacattttctctgaaacttctataatataaataattaaaagccttaaggcttatatatcctattgtcaacaattaaaagcctcaattcttaagcaacactgctcatctccagagtttttccactgtttctcacccactttacacacactagatttgaaattttgaaatttatccaataaattatgacatgctattgaatctataacggaaaatcttgttaaaaacagaacaattttgttttttccccaaagatagactgctagacttcttgctgaaatttggtaaaataagctacccttttgctagtcaaaggtgatccacaaagctttggggagctgaactgaactaggttgagactaatcatatatttttgcttatactacagaaaacattatgaagaagataaatcaattatgtgagagagaacttttgaaacatattttaagttgagcctcaaaatgaatattgtagtaaaattgctggtacatgataatagtaaaattataaacctacattgatgaaggattactacatcatatttaaattgcacacttctaaaaattgaaaaagacaggatgacatctttcattcaatttctgagatgactgttaactcttgttgaaggtatcttttagatgtgcttgcatttgtttttgttggagtagtgcaagtgaaaggattgggaggcgtggataaattatgttctccttctaacatttgaaccacaagcttcatagaaggacgatccgttgggaaccattgaatacaccaaagtccaataattgtcaatttttttactatttgagtatctccttcttcatcaattcgaatttgcagctcttcaccttgatctagatgattataaatccattctgggaagtaaacttggctagtgttatccacagtaacatcaatattcttccttcctcctaccatttcaagtaatagcattccatagctaaaaacatctgacttgtaagacacatttcctaaattcctggataacatctctggagcaatatagcccatggtccccctagctgtagtcatagaaactgcactttgttccttggaacataatttggcgaggccaaaatcagctatttttggattaaaattgtgatcaagtaaaatattatgaggtttgatatcaaaatggaggattctttgatcacaaccttggtgaagatattcaattcctttggcaatacctaaagcaatatcttgaagctttttccaaccaagtgaatggtttttaattgttcttgaaaatatgaacttctctagcgactcatttggcaagaactcataaataagagctcgtctaaatccatcagcacagaagccaactaagcgaacaacattcacatggtggattctacccatggttcccacttcattaagaaactcctccccatttccattggtgttgttcaggatcttgactgcaacatgaacttcatcagacagctttcccttatacactgttccataacctccttcacccaatttatcttggaagtggtttgtgatcttcttaatatcagcataagagtatcttgtaggcttgagagctatgtaatcttccaaaaacttttcaatctttatttgattgtttctttctaatttcttccagctatatacacgatggagtgcaacggttccaataataagaagaatggaaccaagggttatacctgcataaagagaaaaatatcttttgctagtaaatgaaagggaaaaatatgcaagttgtgaaaccatcatctctctattttctcatgacagataaagcatgagcaaataaaaattacctgtaaccattggtttttttgatgcacctgcaaaagatgtaaaattctcaattacttgtggcgataatttctatcttattaaaaaaggaaagatatctcatgggtttaattttctccatctcctagattttaagtcttgtatggttcctttgttggggtttctttgagatgtttatctttttccaaaacataaatgaggagttttagatcgcactccattttttttttcttcataacatcaaaataaaaaactgatattccttgtattatgctaaacacttccatagattaaactagggacccaatcagctaacatgtacatatatacttgcttgaaagatgaataaaagctggacatggatgaaggagagtacctttgacacattgggtttcaggttccttgctattactcttcttccatctgcacttcccaccttctgcttcacagcttttgcacattggtttgtcccaattcagaggaaaaatattgtcttgcataagtatatgatctggaagtgaaacattgtgaatcttgcggcaagaggatagttcgaagtcgatggaatatgacgaataaacagcataaacctggtaggcaggggcactgaggcaagggactgggtaaaagtaatctgaataagctgttttagttgaagtacaattgagtaggctgaagtgtccttgactttcttcttgcaattggaaaggagagacgtgtaaactgaggtttgaaaactgtgttagacggcaatcatctgtgtcatgaacttgaatttcttgagatttgtaatttattttcttcaccaatagtttcactgagtgtgagagatttagcatggtctgatgcttctccgtgcacgatagctcaaacccagggaatccacagtgggctggctggtggtctctaagccagaacgggaaacggatggctggaccattggggctgcaccttgataccttgcactcatcgacctctgcaaagattccaacaaacaggaagcaagaaagagagaggaccagtttcaaggaagtacacatctttagagtttcggatactgctcctgaacctcctgtgcagtttagaacttaaggctttcgttgcttgtgttatcctattacttcaaaattcaatgttctttcctcttgtacattgctatcattgacttcgacttttcaacaaggaggccaaaaatttccatgtggcactaagctgaggaaaaaacccatgaatttcccaaggatccatcagattaaatgggatcgttttccacggtatttcattcttattattgttggattgacttgagacttttcaacaaggattcattaagttaaatttccatggaactaagctgaggaaggaaaccatgaatttccgctcattttgatttcatgaatctcgtagcattttattatattaaagtatgagctctgcctcccacaatcagaaaatttaggctgtctttaatcatcctggaaaatttcttcactcttttaagaaaacaattccaccgttgggaagagatccttcacgaacatcttggacgacctattaattcgcgttatattcactgcttttttcaaggaagaacagatacttgtttaattgcgtgcttttactgatttcactttggattcttgtggaagaactagataatgtatacgaggcagtgaagcggctgcatgtcttctcatcctgttgtacctaattaatatattaatattaacatattatattatattaatatttgatttattgaaggagtaaatattagtttatttttctatagcattgactgtcattgtcaatatgaaatatgaggatgattgggtacaccaacttgcccacagtgtttgattttctatgtataatgttttgtagttagtcaagcatggtgagctatttaattacaaactgagccactccactttcacaagacatgcatggccacatagttgtgaaagcaagaggtccttgcaagttgctacccattaaataggctaagtacaagggattattgacaataatttttggtaaaacaaattatgtcatgaatctgccggtattctcagtggaagtctttttctttgaaaccaccagcaggtgaagacagcggggtattaagagttaactaatcatgtgggtgatgagatttattgaggaatataattttatcaaaattttccacggtatttcattctttgattacattattgttggattgacttgagacttttcaacaaggaaaaatattgtcttgcataagtatatgatatggaagtgaaacattgtgaatcttgcggcaagaggatagttcgaagtcgatggaatatgacgaataaacagcataaacctggtaggcaggggcactgaggcaagggactgggtaaaagtaatctgaataagctgttttagttgaagtacaattgagtaggctgaagtgtccttgactttcttcttgcaattggaaaggagagacgtgtaaactgaggtttgaaatctgtgttagacggcaatcatccgtgtcatgaacttgaatttcttgagatttgtaatttattttcttcaccaatagcttcactgagtatgagaggtttagcatggtctgatgcttctccgtgcacgatagctcaaacccggggaatccacagtgggctggctggtggtctgttagccagaacgggaaacggatggctggaccactggggctgcaccttgataccttgcactcatcgacctctgcaaagattccaacaaacaggaagcaagaaagaaagaggaacagtctcaaggaactacacatctttagagcttgggatactgctcctgaacctctggtgcagttcagaacttaatgctttggttgtttgtcttatcctcttaagatatgttaaaaagcaaaagaaaaagaacataaattatcccgttactttaaaattcaatgctattacatgattccccattaccattctggacttccttcacggtttcctcttgtacattgctatcattgactttgacttttcaacaaggaggccataaatttccatgtggcgctaagctgaggaaagaacccatgaatttcccgaagatccatcagattaaatgggatcattttccacggtatttcattctttgattacattattgttggattgacttgagacttttcaacaaggattcattaagttaaatttccatggacctaagctgaggaaggaaaccatgaatttccgttcattttgatttcatgaatctcgtagcattttattagatttaagtatcagaaaaatttaggctgtctttaatcatcctggaaaatttcttcactcttttaagaaaacagttccactgttgggaagagatccttcacgaacatcttgactgacctattaattcgcgttatattcactgcttttttcaaggaagaacagatacttgtttaattgcgtgcttttactgatttcactttggattcttgtggaagaactagataatgtatacgaggcagtgaagcggctgcatgtcttctcatcctgttgtacctaattaatatattaatattaacatattatattatattaatatttgatttattgaaggagtaaatattagtttatttttctatagcattgaccgtcattgtcaatatgaaatatgaggatgattgggtacaccaacttgcccacagtgtttgattttctatgtataatgttttgtagttagtcaagcatagtgagctatttaattacaaattgagccactccactttcacaagacatgcatggccacatagttgtgaaagcaagaggtccttgcaagttgctacccattaaataggctaagtacaagggattgttgacaataatttttggtaaaacaaattatgtcatgaatctgccggtattctcagtggaagtctttttctttgaaaccaccagcaggtgaagacagcggggtattaagagttaactaatcatgtgggtgatgagatttattgaggaatataattttatcaaaattttcctttgatttaagagagattattaaaatgtaaaccatataaataatgggtatttttctaccaatcatctcctacaagtaccctaaagatcttgaatgggtatttttctacactggtttttccctccacaatcctttctcacgtctctttagccatgatgccttcattcctccttataaataatggtttcaatgaaagcttaaagcttatagtttgtccagaataattattgtttcacctacatgttggactattattcatgttaatatttgttttctttttttttatgacaaagatggagacgtatgaagtataataccttgtaatttttttctatttgcatcctaaaaaaaaatacaaatgaaatttttttttttttatatttttttttcaaaaaaggcttcaatctgatgccttgtaattttttttatttgcatcctaattaaaaaaaacaaattaattttctttattttttaattattttatatgttttttttaaaaggcttcaattgacaacttttgttcaaatgcaaaagttgccctttattcgaaatttccttaaacattgcattaaaacagaaattttcttactaaaatgactactgaatttcagttcccttcttaaccaagaaaaacaactcccttttactgatgataattgctgcagattggttatattttattgttactaattgattgaaccaatagggattggggtttgaattgcacttcacgccactacataagtctttttaaaggaacctcacacaactaaatttgatatcaaaagtaaacccaaagatgaattaagatcaagtttgaaattttaaaaagaattaaaaaaatgacaaagaaaaaaacaaaacttatattaggtataagtatatataactgatttttatgaatttttgaacctccaagctagtgtaacaggatttatcttatctatacaactttctccatggaatattaggtatcaatcactgaatttatcagccattgtggtataaatcttatcatcttttttagatagtgattatgaaaatgaatgactattgccggttaacctttcaaacttgactggtttagcctattgatccttgttggcttaataaggaaagaaattgatgcatgtatcattttttagataagggactgcaacttagagccatgagagatcattcttttttttggtttgtgattatatatctttctctacgtgcctatctttagagaaattaaaataatttagatcaagtgatttttaaacaattttttttttcttttttgagtttcaattagttttaatttctatctttgtggaatttgcttctacatttttggtgtaatctaactcggtatcttttacattttccaatatggaaaaggatgtctttaattaactaatgtagggccgtccaaaatctgattttgatttaatggacttaaatttcaacaaggaagctgaggaaataacccatgcatttcctaagaatccatcaaaattaaatgggatcattttccatggtatttcattcattgattacattagtgttggactgacttgagacttctcaacaaggattcattgagttaattaatttccatggaacaaagctgaggaaggaaaacatgaatttccattctctggcattatagcttgatgtgttcactttgatttcattaatctcgtagcattttattagattaaagtatgagttctgcctccaacaatcagaaaatttaggctgtctttaatcatcctggaaaatttcttcactcttttaagaaaacagttccactgttgactgacctattaatacgtgttatattcattgcttttttcaaggaagaacagatacttgtttaattgtgtgctttgactgattccactttggattctcgtggaagaaccagagaatgtatatgaggcagtgaagaggctgagtgtcttctcatcctgttgtacttagctgactaagaaggcaccggtcaattctctttggcaccgtctccaagtgggcaagaattgatatgtcacctaaccattgaatgttggacccagactgaccaattataaggcgttgcagaacagattgtttttaatttgaagtccaataaaagagcagaaaagagagaaaaagaaaa

SEQ ID NO: 13693 - DNA, 3496 bp, Vitis vinifera
  Intron number 3 from transcript GSVIVT01024982001 (locus G SVIVG01024982001) derived from phytozome v7.0 (chr-ID chr6 ; pos 5522942 to 5526437 reverse strand)
gtcaggttcagatgctgagatgggacaaaacagaggactagtgaatggcagtgggcatggagtgccagtgctgttttcatgcatgtgtggacaatcttcccactgaatgattatgcctgcaacttttttttttttcctacttttacttattttttgtgttcctcagattggtgattgaaatttatgttctaggaaggagaataaactgtcatttccatttcataggattccccgctttcttttttcctctctagtttgtagtagtactacatttcagggaacaccatgtgaactctgttttccctttcttttattcacttcaaatatcctacttcccagccaaaagcatcaaatcaagcttaaactttttgatgcccaattctaactaactgcaatgttttagttttttaacgagaacatagattatcggagatgctttatgcggccagtattaagtaatcaatttttcttaaaatttaaggtaacgagcttatcgaaaactttttctagattatgtctcgggtttggtaaagatctcccattttgatctagtaggacgggtagagaatttctagtagtagccttgtctaatttatttatttttaatattttttagtttttaaaaagtttagactgtaagacactagttgactgtcaaacttatatagcattactccctactagcaaacatcacggcacgagggttgaaagtaatgcgatcatcgatttttctgcagttctgcactattgactgggacaaatttgaccagtgcggtgcagatgagcacatgaagactgactccctacaattaattttattgatttattggatggagaggtgccacaaactgattatttccgcaaaccaaggctcttaaaaccatcaaagaatgggtcgttttcatggggctaacaccctaacatcctaacaccactcagcttcttcctaatggccgaaaaaaatgtggcccatcctccttcagttacgaggcacttgtggtaggtcatcttctaagattttgtctgcttttgattcataaaataaaccatacactcatgaactgtccgtgatcgggtgctcttttggcgtcgtacgtaagggacacgttaccaaattggtgtgattttcaaaacttgtggttgaattcaaagggtggaaattttgtggatgttttctttattaaggattaaggataaaagatgacccattcatgtagatattttggtctacatttccataaaataagcccctcaaatggttttaactaattgataggataaattatgctttgggttgctgataagtttgggcatcattttgacttatcaaacaacatgacaactcctatactttactaattttggtatatttttaatacggtatggtatgacaagagaaaagtgatttttaaaagtacttatcattttagatacttaaatcaaaatggaatggttgaagcatacaggtctctcatataaattattttgaatatatatgctagcgatttttaaaaatattttaagtattttgaaaatttttattttttttaaatattaaaaaagttaagaaaacgttttctaaaatcattgtaaaacagattcttagagtgcgtttggtaatgattataaaaaatatttttaatacttgaaaaatgaaaatttttaagtgttataaatattaaaaacacttattagaatcactagagttaaaaccaaagaataagggtttaaatgcaacagccttaaaaccctatttgaatgagttgttttgaaagataaaagacatttttcttaaagttgcaaaatccttatttacatagggttggtcttaaataaagtgggtatacggtatacttgtgatacataatagcttaaaattcaattttttttattaaaattaaaattgaaaaagttgtagtaaatgaggttgacagccatgcactataaaaagttcatcaagaaagactggaaaatttggaatgaaaagtaaaataaaaaatggtcaaagaaattatagaatttttttatttgaatgcatgttaaaaagtgaaagaaaaaaaaatcaaaattttcatctgtttgataacattttgaaaaatagttttcaaaacatcaatctttctagggaataatactcatatacaaaaaacaattaatagaaaatttcttaaaatattttctatattttcaattaatacttagaacccttcaaaaaagtttcgagaaattttaattaatccatactttttctaaagttatgtttggctctcaaaagttttcaaaaaaatataaagaaaaataattcaaaatcaataaataattttatatatttctttaaatttatttcacttgttttattttattatataaatattaaataaatttaaaatacataaaattttaaataattttaattatatttaatttttttatatttattttaagaaatattaaacaagattttttttttatatattttttctcgattttccctcttcaagtaaatttatccattctctaatcgccaaccatcaaagaacaactcatgaaaataatgttattctttccactttttcattatattatttttaaataatgataaaatatgtattaaatacaaagatttttatgttacctaatctcggagatggaagaaagatatgataagagtggcaaaaagaacaataccactccagctcattgtacggatatgcatgccattcacacaaagcagccgcgtcaatccctatttttattaatttaataatattggtttggttaaaaacaacttcatagattagagcgtgacgagacccctgaccgtgggtaggaagtttggagtatgcgagaaacaatagttcaaatatgaacttgagatgcaggtggcagcatgaaatgtgggaagctggaagcaggcgacatgtccaaacgtgccgacgtcataggaggagcccctatagataggattagacttttaaactgtgccatacccccccatagctgatggccctccatgctccagatggtgggtctcccactatcataattgactaatatattaacaaacactgcaccccagatatgatggccccccaccctatacacacctacttctccacgacttttctcccatttatggccccattttgtctttcactttccacctggcctcagctcgtgcattcacacatactacacattttcttctccgaaatttgttggaattgcaagtatttttctaaataattttccaagatttgataaggaaaacaacggagatgtgaacacttgacaaccaacacccaaacatgcttttctttggaaggtactttattggtccgtttgacaagaaataaagataaaacaaataatacatgtcaatctcacactccatgatgtcttgtttttctttatatatatatttttttattttttagaaaaaagaaagagatgaaaggcagggtggagtggagtggaacggtcaaaccccagagaa

SEQ ID NO: 13694 - DNA, 4865 bp, Vitis vinifera
  Intron number 17 from transcript GSVIVT01013853001 (locus GSVIVG01013853001) derived from phytozome v7.0 (chr-ID chr 16; pos 5257854 to 5262718 reverse strand)
aagagtctgtcacattgactaccattcatcaggttttcttttcctttgattaaatagctgcttgttattttatttccatggattttcctatttgttgacagatccatacaggctgtacagcctatacacattgattttctgattaatggggctgatttgtttcctaaatcagtttgattcgattccagttgtagtgtaatattctttagttgtagtttccttgtatagcttcaattatatcctgaaaatttgcctataatttagctgatttttttgtatatatacaccttgcattctaaggaatgaatacaataaaaattcagtcagtttaattttccacatcatatcagagccctaagcttgttcagtatcgtttttggccttaattgccataaaaagtattgcggccttcattgctggcagaaaagtttctcagccttattgctagagattcttcatcattctcttttgttcaacctggtttttgattaattcctctatccgctctgttcaaaatgtctgtaacctttgaaatggcccttgggaccaaaatcaaagctgatctgttctcaacagccacccaacattcagccagagaataccagaacctgcaagccttgtttaggctcaatggtcgcaattacttagtgtggtcgcaaattgtgaggagctctcttaagggcaaaggaaatttaggtcacctaataggctctgtgccccatgaagatgatcctaaatttgttgcttgggatgtagaggattcaatgattatgtcttggtttttgaatttagtgtaatcggaagttagtgggatgtgtatgttcttcataacagtgagggagatttggggggttgttagacaaacctattccaaaatacaagatgcttctcagatttatgagataaagaccaaaattacagtcaccaagcaaggtagtttatccattattgagtacttaaatatgatgaaaaggttgtggcttgaattagattattatgcaacgatgatgcaacaatgacacaaaaattttttgaaagagaggaattttgaatttcttcttggttttaatgtggaatatgataagtaagggtccaagttcttggtagggaatcactgccatcattgaatgaggttttctcaatcataagaaggaaagagaattgtgatgcttaattatccaaccatggagggatcaactcttgccactacaaaaccaaattctggcccatctaattcaggaagtagagctacaatggaaggtggaaagagtgatcaaccaaggccattgagcaataaggacaacctttagtgtaattattgcaaaaaaccaagggatactaaggataattgttggaaacttcatgcgaaaccacagtcctttggtagaaacaatggcaattgcaatgctatagcgacgtgcacaggccaacaatgcttattctgaagattgttcatactaggagaattggagcagtaattgtctctctttgactcatctttcagagaaatttcattcaataaagccgagatttcactacttcactttcatttatgacatcctttgttttctgtgttaaaaacaatgttccctttgttatttaagagtatggatgctaatcattttcattgtggagtgtatcaattggccaaacactatcgtgctccttttcccttgagtaatatcttctacttcttttactttaactcacatggatgtgtagggtgcttgcattcctaatattaatggggctcgttggtttgtttctcttattgatgattgttctagaattacatggatattccttctaaaaataaatgtgatgtgagttttgtgtttctagtgttttagaaaatgattagtactcaatttggagttcggattaaaagcataagtctagtaatagaagggagtattttaaccaaatcttgttgccctttcttcaaaaagaagggattgtccatgaatcttttgatgtgatttttgtgtttccggtgttgcataaatgattagtactcaatttggagtttagattaaaagcatacgattgaaaatggaagagagtattttaaccaaatcttgtcaccctttcttaaaaaagaagggattgtccaccagtcttgttgtattgacaccccataacaatatggggttgctgaaagaaaaaaccatcatctccttgaaataactcgagccttattattccagaaagattttccaaaggattttgaggggaagcaattctaattgcaacacacttaatcaattgactaccccctagaacattaggcaacaaaactctggttgctatttttttcttttttataggtttttccttcaatttcatggtttatgtcaaattcctccaaagatatttggttgtccttgttttgtacatagtcatgccaatcattgtagtaagttggatccctaggctcttaagtgtatttttgttgactatttcccaactaaaaagggatataaatgttaccatccaaccttgaaaaaattatttgtatccatggatgtcgcttttgcaaaaaattagactttcattcctacccttcatcttcagggggagttagtactcaaagacaaaggggatttatatttgttccttgatctacctacttttcaagataccaatagcaacctagaacccatagtaccaagtcctttagttgttgttcccgttggtggccctccaccaatcgccaattctccttccaaaaaaaaccattgacttacctcctagaaatgagggagagagggttgatgacacactaccatcatgagtttattgaagaaggagattgttaccttttgatttgatgcaagcccaatactccaaaccaccaacacgtattgaaatttacccttatttttctccaccatcttctaagaaacaaagtgaccacattcaaaaagtgcctaccattgatttactagtctttgaggatttgtctgtacctattgctctcgagaaaggaatcagaaaatgtacccaacatcccatatccaacatcattttcctttaataaccccatcatattgaggctttctttcctaattaaatcttgagaaaatccctcaaacaggccaagaggcacttaggaatgagaattggaagaaagctatgaatgaggagatgagggctctcgagaaaaaccaaacttgggagattgttgagcttcttaagagaaaaaggccaattgagtgtaaatgggtatttacaataacatataaggctaacgggactttggaaaggtataaagctagattagtagtcaagggatatactcaaacctatggagcagatttcctagggatcgaccttcatccttgtagtaaaatgagtacaattggtgtgttattatctttggtagctaatcttggttggcctttgtagtagtttgatgttaaaaatgcttttctgcacagtgacttagaagaaaggtatatatggaggcttctctaggatttgataaagcttttaagaacaacaatatgtgtaggttaaaaaaagtgttatatgggttaaagcaatctcctggagtgtggtttgggggatttgctaaagttgtggttgatatgagatttcaacaaagctaaggagatcacgctttttatgtcaaacactcatcatttggcaaagtaacaactttgatagtctacgtggatgatataattgtgataggtgatgatcttcaagaaatagataatcttagaaggtggctacctaaagaattcaagatcaagaatttgggaagactaaagtattttttgggtgttaaagttgctcactcaaaaggtggaatcttcatcttgcaacaaaaatatatccttgatcttcttaaggagacaaggatgctttgttataggcttgctcatgtccccatataaccaaatcgtaagcttagagaagtcaagatacaatagtggattgtgatagatatcaatgtcgagtgggtaaactgatttatttatgtcttacaaagctaggtataacctatgaagtgagtgtggtgagccaattgatgccttatctgaaggaggttcatctagaagctatcaacagaatccttcgttatctgaagttcaccttgggaaaagaaattatatatgaaaagaaatgaattgtttagtttaggggtttatttggatgcaaattgggcagactctttagttgatagaagaccaatatcttaatattatatgttcctatggggaatttggtgacatggagaagtgccatggcacatgggaattgtgagtgagttattgtggttgaaggttatacgtgaagatctcatacatctcaacaattaggcaactagtagatattctaagggcttggctaacaaatcatttcaagagattgctagcaagctgggaatggacaatatttgcttcccaacttgagggggagtgttgacagatccatacaggttgtaaagcctatacacattgattgacagattaaagggactgatttgtttcctaaatcaatttgatttgattctagttgtatagtgtaatatttcttagttgtagtttcctttcacttgaatttcttattgtaaagggatgggaagggtttgtgggaggttctaggttcaagccccaatgaggacaaaaatttacctataaaaaaaattgctggaatttccctataatttacctgatttttcgtatatatacaccttgcattctaaggaatgaatactataaaaaaccagtccttttaattttccatgctattggttatgaaagttgccttgaattaattttgttttgtttacttggagtttccttttatttccatgtgcagtcaaagggcttagagtgggatactgtttttatagt

SEQ ID NO: 13695 - DNA, 5950 bp, Vitis vinifera
  Intron number 2 from transcript GSVIVT01027558001 (locus G SVIVG01027558001) derived from phytozome v7.0 (chr-ID chr1 5; pos 15598493 to 15604442)
ggttttcagtacgaaaagcccaacccctccgggttgttcctatcaaaccgtgatttatcttcggctaaggatcaactcagagaaatttgaaaaatctcacatggatcattatatcatgaagtaatttcaagcttgcctaagctttgctctctgtctcaccactggttttgtttattcctcaaataaagacagttctgttgaaataataattcgtcttaacagaattttaggaatttgagaaacattaaagtttcttatgttaaataggacttgtagttaagtatcaattgaagtcataatacaagtatgattaatttattataataacaaaaatattattaatacccaattatatgagctccaactcgagccataagattgaggaaggtgaaaggtcaaatcaaagctaaaatactaggtaatatgcaaaataacaaaaaaagtttcagttttattgaagttatataaataataacttaattcatctttaactcctaaaattcacaagtaagaattttgataattgatgtattaagacacatgtcttatttatgtctcatgatttatggatctaatgaatgatggttataaacaacgatgaaaatattggtaattatggatatatcggtacttcgatttatgaatacaacggtggatattttgaaaagaaaatatcaatagacctaaaatagatcaaaattcacgaaaatgtaaaaaaaaaccttataaaaatataattaaaagtataataaacattttaaagttattttattaaagaattagatatacgtaggatatgatttattatatttaataataatattgtatgtatcgataaaaaatatatattttataaatgtacatttattattaaattatattaaatattatttcataataatattgtgatatttaattataatatgtctaattttaaaatatatttaatattaaaattatgatccatttaatttaattatattaggaaatataaaataaatgataatacatgtacaatgttttaatatttacttaatctattaatgatattaaaaatactatgaaaaaaattatgatgataatttttatattttttataatcaattaaatgagatttttttatttaatttgttttctaaaatattcttttaatattttatttatatactgacttttaatatgcatatgtttggtacattgatatttacaaagggcatagttgccctaatggtagacatatgttatagtatgaggttcagtccccttacttgcaaacaattggaagatattttttgagctgcaaaaaattaaaggcaaatcactttgactaggggcccgtccgctttgactgggggagggagcctgaagcatggcgtgcaaaaaaaattaaaggtaagggcaagctttgacaaattggagcatttttccccccgaaatattgctaaaaaatcgatgttaaattgccgaaataatggcgattttctgccatgacaactgattaattggaaaaatcggcgatttatcgcctctaatcaatatatcaacgattttttgacgatatttactgaattttttcatcttcgatatatcaacatgatatattatgttgaagccttccgatacatgatatatcggtgatatatcacgatatttttatccatggttacaatacaatgatcgattcaaaagagtttgaggcactatcaaaggagtagaaatattagaaagtgctctaccaggtagtacatgaattcatatttaagaaaatcttagaggtagatataataaaatagtcatgagctactctataaaaattatataaagttaatgattgagccaagtgaatgaggttgcatacgttaagagatgaattcgagtctttctgcatgaatgactttaaattaatctatgactattttgattggggacaaaccattgaaaactagatgtaggttaatgacaagaagcttgatgaacacaaattgtagaaaaagttatacaatctttaaatgcaaaattcgactatgtcgttgcaaagattgaagaaggaaaaacctatttactctcacagttgaagggttgatgagttcattgtatttgcatgaacaatgaatgaataaaagaattgactctactaatttggaaaaagtctagtagaattgaacatctacaagatgacgtaatagccaacaaagcggcaaaggttgtgatcaaggtagaggtagaggaggatacaacaactttaacaatagagatggaggtggtgacaaaaattattctaaaggtagaggcaacattcctaggcctaaaaacaagtcacacatataatgttttagatgcaaaaggtatgaacattataagttagaatgtcgaacgaaattgcaaagtgaataagcaaagtaagcaaacatcgttgaggtaaagtagaatttagtattggttttcaatgtagcaacatcaaatgtagaccacaaagatgtttggtaccttgatacaacatacaacaatctcatgtgtagtaagaaataattattttcacaattagatgacttagttaaaggcaaatttaattttggaaacaaatccaaagtttcgatcatggccaaaggtaatattaaaatacgtcctaaagatggtattcatgctagtatagcaaatgtattttttgctccaaatcttttttagaatttgttaagcataagacaattaataaaaaatgacatcttaatatctctaatagagtttacatccatagtgataaaaataagaagatgattgcaaacgtatagatgacaaagaatatgatatttcctatatttcttcaagcaaaaacttaattcattttgaaggcaataatgaaagataacaattggctttgacatctttgttttagtcatctcaatttttgttagtcgaacttattggtgcacaagagtatggtcaaaagattaacaatgactgatgttctagatcatgtttgtgaagggtttctacttaggaaataacataagaactcttgtctaattggaagatccaaaagagctaaacaacctttggagttggtgcatacaaatatatgtgatcttggtaaggtctcttggtcacaacaaatatattttgtcctttataatgattttataagaaaacttaaatttatttgttaaaagaaaatttgagacttttaataagtttaaagaattcaatttttgttgaaagacagattagttgcaatattaagatattaaaattggatagaggagaagtattcacttctaatgaattttataattattgcaaaagttagggtatttggtgacagctgacaactaactatattaacaaaatgatatagctgaaaggaagaataaaaccgctgtggagataataagaggcatgttcaaggccaacacacttctaaaagctttttagatagaagttgttaaatgtgcagtgttcttgtcaaataggtgtcttacaaaagcagcatttgaaagaacacttgaggaaactgaagtggtcataggccacaaggaacaaaccaaaaaatgaatgaataaaccaaaattcatattcctcgagaaggtatggaagttgacataattcgaggcaatatgaaaggtaaatgtataataaatcctaaattcaatattataattataataaatatactcattatgcttatgaatgtagaagttccactaacatgtgaaaagacaatttaactatgttgaaaagaaagattaaaaagaataaaatcatgttcaattttatttttctaaatttctctattttttttttaaagaaattggtgaaaaacaatttctgttattctttatttcactttatttttaaaaactgaaaacaataacaaaataatattatgaattttaaaatagaaaattgttttttaattacatgaccaaacaaactcttatttatcaaacaagttatataggtccacataaatttgatccaaacaagattacgctcaatcctaacttaggagaaatgtgtcaagtttgagccatattggcaatattgactaacaaaatttgatacaagaattaagggtataaattgagcttatgagcctgaagcccagtctaagcttacccgaacattttgggtcatgagccatcttgccatcccaagtataagggttgtaaattgggcaagtgaagctgaaggccagtctaagcctgcctgagaattttgggtcatagcatggctcacacaacctgattggttccttgaagtccaagtccaagtactaatgtagatcgtgggctaggacttaactcagacaagcccaaacttagctgtttacatgcctgatgtcattcaacgtccacctcgaatatcatatgcaacagcgcctactccagccttcactaaaaggaaggttcccacttcagaagccaatagaattatatggattttccaccctgattggttgctgagaaaacataggaaaacaaattgtgatcagcagaaaatttgttttctatgcttcctcataaatatgaccttacaagctctcgaagtagagaagcacaaacattgacatatgaaataagtgacggaccataaatttttgttattggaataatgataaaaataatatattatattcaccatctataaattataaagtgattaatgatattcattattatttaaaaaattaggtaattttaaatattagttatgataatgttttaaattaagtaaataaaatattgagaacattgaaaaaatattttaaatttgtataaaaattatcaagatcattttaaaaaaattacaaaaatagtaagaaaactcattagaaaatttcaataattttagtaaattttatagcaaaaaaaattaattttttaaaggaatttaataaattccgtaatagattttaaataattttaaataaatatgaaatgacaacattaccctttacttactcctttttaacccaaccctaattttcttcatattgtgcaccttttagcttttggccaccccacttcctatttattttttatttttccaacttttgactaagagaggataattgagaaaaaaaaatgtgggtagactatacccgcctctttattttgaaagtagaaagaaaagagaagaaaagaagaaaaaaattaattaaagttcggtcaaaaggtgggaaggtgagaaaagaagaaggttaagatttgaataagtgaattaaaatattgtaaaaattaggttgatgtgtccaacattaatgctctatgcaaaataaatttagaaaatggttgcgggaaaaatgaagaaaaataaaatgaaaaggaagaaaaaaagtatgaatattggaaaagatgaaaaaatttcatttattttttaattttagtcaaattgtaaaatattattagtacttgatggtacgtgtaattttttatgccacggaaggcaggaaaatttttacaattgcttgcaaataaaggagcctagagaggtgaaagtgagggcccgaggggagagagttttagcttccttctttcattttttcattgcatcttttttaagagagtggggggggggggagcccgactgcatgagacgtgcaacagcaggagaaggtgatggccggccatgcttgctgacgagaggagcagtagagctagtagtggctggctgagcaaaaagagggggaagaggctgctgtggagggggggtccagggaggttttcggagttagaggaagaagcttggagtcctgttggttttgctggaaaaaaaaaaaacttcctcaggtatggtttctgcaggcttattgatgtttttttggctgttatctctcttccatatctcttgttgatgtttgaatattcgtttgcttggggtggataatgaaggccacctgttgttggttgagatatgatcttaagctcatgtttttgaggttgttaatcttaat

SEQ ID NO: 13696 - DNA, 3692 bp, Vitis vinifera
  Intron number 2 from transcript GSVIVT01019144001 (locus G SVIVG01019144001) derived from phytozome v7.0 (chr-ID chr4 ; pos 16245581 to 16249272)
aggtatacttagaaacaatgttacgtaatttttcctaggacttttactacttaatacttgttatttgagtctaggatttaggcgccttccagattaggaatttccaagaaaataccaaaaaaaaaagagagagagagagagagaagaaaatggcattgaatgaaagttttataagcctaataaacattcattttcttaggctatgcttggttttcggaaaatttgaggtaaaatgcgaggaaaagaaaatagagagaaaaagtaaaaggataaaaaatgtgaagaaaaataaaaatagatttaaagttaataaattattttatatgctacttcaaactcatttgacataatttcccttttccatgtaaaaattaaataatttaaaaatgcataaatcttgagtgcaatttaagagaagaatgaaaatttcttgttatttctattgagaaaaaataggaagatagacgcctgattatatacgactatgtgttacgtatcaaaaaaaaataaaaatacaactatatgttgaattctagctacaaaataggaactaacaaaatctacaactaacttcccttaaactagggacaaactattttaaaatacaaataagtaaaactaaattatcctaactatttttgcactaaagtagatcttctgtcatcttcaacacttctcctcaagctagttcaaagatatctatcattccttgcttgttaattaagcaattaaacatccctttatgaagtctcttggacagaacatttactaattgttctttagtaggtacctaaggcatgcagatcagtccagcttctggcttctccttgacaaagtaacgactcacttcaacatgcttagttctatcatgttgaactggattatgagctatgttaataattgccttgttatcacaatagagtttcattttaggtcttcaagcaatttctttaaccaaagaagttcacaaataccatgagtagttgctctgaacttagcttcaacactgcttcttgcaataacagattgtttcttactcctccaagtcactaggtttccttttacaaaagaatggtaatctaaagtagatctcttatctgttatgctactagcccaaaactaacatcagtgtaggcttcaattttaaggctattgttacttttaaacattaaggcttttcttggactcccttttaggtacttaagaaccccacaggctacctcaaggtgttgttcatttggagaatgcatgaattggctcacaacactcactaaataagctatatctggtcgagtatgagagtgatatatcagttttcccacaagcttctgatagcgttctttgttagcacgcttactcccttttagtaaccctaattttcaagtagaatcaattggaatcttggctagtttacatcctagcaatccaatttctatgagcaaatctattatatacttcctttgtgacacgaaaattccttcttttgatctagcaaactccattcccaagaagtactgcaaggttcccaaatccttaatctcaaattctttagctaaaaaattattcaatctctctaattcagctagattatctctagtaaggatgatatcatctatgcgcattcttagtataacaagcttgccatcactagaatgattgtagaaaagagtctgatctacatggctttgtttgtactcgtgacttctaatagacttagcaaatctgtcaaaccgctctttgtgactattttggtccataaagtgattttttcagcctatacaacttttcacttctaaatcttctttcaaaacttggaggttaggtcatataaacttcttcctcttgatcttctataatctgttgaagaaactagattgcaaacaagtcactggtctttggaaagaaccaagtctgataccatgaatatagctcaagagaagaatgaaaaaattcttaatattttcattaagaaaaaataggaatacaaatgcctatttatgtacaactatgtgctaaattctagctataaaattggaattaacaaactctacatctaacttcctatgaacttgggggggaaacttttttaaaatacaaataaataaaactgaattatcataactatttcttcactaaagtagaataaaactaattcctaaacttttagaagttctaacaaatttctaactagttttaattatattttattttctttcatatttttcatagagaaatcaaatatgagaaaatcatttccttagttttttttttcttttccttgctactttttgggaaccaaatatacctgaaagtactaagaaaagggaaaaaaaaaagttaagggaaatggttctcatgtttggatatcatgaaaaaggtaaggaaaataaaaatattacgaaaaagagaagggaagatgctaaaaggtttttgtccacatttcctttaaataaagttgaggaaagcttagggaaagtgcatttctcaacaatttaattttcttttcttcaacttttccatcaacatccaaataagagaaaaattttgtaagtttttcttatcattctcttttctttaggtttcctttctatttccttttcctcaaacttttcagaaacctaacatagcctttgtctttgtctctctcgctgttgcatatttctagacaagatgatgggaggatttcttttttctctttgaaaaagaatttattcttgtaagacaaagtgaagaaatatatatgaccaagtatataaaggcatgaaattgtactacataaagaaaagaaaatcatgtatacttatttaaatatcggttatagaagctaggttgggccactaaaaaggttgtcactttcgcttagggtctgaatgttgggttgatagatataaattattaatcaatcaccactaacttgtttgagacttgacaatcatggaccaaatgttctaatcataaattattcaagcagattcacacacagttggaatgatgcatcccaaacttcgaaaaaatatcatgtatgtaaatcacttaaagtaaatattaaaaaaagttccgctatccgcatatacgatttatttgttggccattttagacctattgaggatcctctagttttacatatacaaagatgaagccccatgaaagttaatgggtgacttcctcattgtagattctcgaaatatacatacatatatgtatcagtgtggagaacttactgtgcacatccaatctgtattgagttagtcaatgggatatggttattatatggtaataatcagtttttgattaccaggtcaaaagttactatcctctttatgtttttggtccaattgtgggttacctgactagatttttgccagttgcacttacccacagaactctcaagctacctacatgaaatcggaatgtcctaaaataccaaacaattctacctgtgtttttcagctccttaggatatatatatgacaatatcctgagaggatgtggtaacaatcatcaaaacctaagtgtcttcaactttttaagtacttgggaggcatgttattcttgtttctttttgtaaatcttcttatacaatctcatttggttatcttaatatgtcattggttcttgttttctgtttacgttaattttgttcattatctttcttgcctttcagactgagttagccagaaaattctttaagg

SEQ ID NO: 13697 - DNA, 998 bp, Vitis vinifera
  Intron number 3 from transcript GSVIVT01009611001 (locus G SVIVG01009611001) derived from phytozome v7.0 (chr-ID chr1 8; pos 9885979 to 9886976)
gagccaactgggtcatactggacaagtaattaaacataaaagtattattacttgtttctaatctattaatttgatcagttagtcttcactttttctccttctgattgtcacctgtagaaaggtttcaaatggaagattaaccgtttaggcatggatcatttccatgccattttttcattttattcccaccattttctagttcatatcattatgagttcacagtatacagcaagtatagcaaatatgaaatggttacaggatttattcaatttattattagctgatgtttgtagttcattgtctttatgttgtttgccatatctccttaatgaatagagattggctatattgcaaaatgtttttgtatttgtacatgcaacatatttctagtatgtatgtgtgttaagggaaagtaccaaagatgagtaatccttttgggtgaatccgatttgggtaaatttttgcttgtcatttcttccatattttccatagttggctgaggatcaaagcaatccagctgtctagaaacgtatattgacttcaatgtctattaattctgcaatctttacatagtgaaacaaaataaaaatttagcaaaactagagtctttgttcagatggatcatagtcatgaaacatgagtaaatgaaacaaaataaaatcccacagcaggtatcccactgaaaaacaaaaaaggcttctcgtattggaaatgctccattaccttttgcagttgttgctatcctattttagttggtttcagattggtatttattgaggtatgtattgcattcttagtcattttacctatacacagaactagttattattcaatgacaatgtgaattgtagtatggagttttagtttcttagccttttaggtcatgctgaaccttatgtttctcattacataattagaaaaattaataggagtacataaccaccatggattctgttatatgctgagacaggaaactgaagcaagaactgaagcattgc

SEQ ID NO: 13698 - DNA, 3606 bp, Vitis vinifera
  Intron number 1 from transcript GSVIVT01003452001 (locus G SVIVG01003452001) derived from phytozome v7.0 (chr-ID chrU n; pos 10278493 to 10282098 reverse strand)
tttccttgttctgcagatgtttagttcaagctttgacatgcaattgcttgacaaagagagagagcacacttgttagcattcatgtgaggtaacatgactgtgtactggtgtgctctctctcgctgtcatacaatcttctcatcaaggatgccttacatttttaccttatttctgagtgttggacctcataccataccaactagcaggtggttcttttttctttccctgtagctgtaataaatgggttcttctaactggaaatatgcagtatttggtgcaacaaagaacaccatttaaggtttggttttccattggtggattcagtaagtcggtttttcaattctttgttattcagtcaatcatacgcaatgttcctgttatagaacttcctgacatgccaaaaggctgtacttttgctaaagttagattcttgaagtggaatgcagtaaaataaggtctttggtcattatggtgcgatatggccgacacaaaggctggcaaattatttgagttttcctttgccaaagtgtcaaaactaatctgttatttatacattgctttgaactttgcattaacagaattcacttgcatatccttgtattaagacatggttccatatctcccctcgccaaagttggtgatgatcagtttcagctaaaacttgaactatggtttgtgtatatgttggagatgttaggagcaagcttgaaatatcgtgctagttgttggcaacaatatgacacaacaatgtgaatgtgtgaaagaaaaaaatgcatgataactgaggaatctttaacttgcatttttcaaaaaatattggttgtgagatgggagagatggaaagaaggttgcaaaggcacacaattagaaggggtttttgatgatttcatggtttggtaggtatcaaagggagacatctttatagctaaatcctattactcacccctatctgtagactcaatgtgttcccttgaggcattgtgtggaacccttgtgtcctcaaggagggttggctttttggcttgggaaccttcatagggaagaattaactttggatcagctaaaagggaggggttggaatcagaaaatcatatccaccttcactgtcccaaagcaaagcttatttttgctcaaggcaagttccaaggtagattgatattggattggtattgtgtaatatacacaatacactagttataaagcttaagaacttttaaaattaataatgaaaattttagaaaaataatgaccactgctaccttgccttctattgtttttgttccaattttgaggcctcccatgaagctttcagcacatatcataaatgtgacgtgatcagtgacaatgatcacaacacagcttatctttttcatcacttctatacctcggtcctccaaaaacaacagcttcaggtttgtgaacagaaagtgcttaatattccagcattttattccctgtggttgattgagaatttgactttttcatcaacaattggagtcttctttcttctttattttttcctgattgtggcaaagagttttcttatggacaggattggctccttccccaaaactccactttttgttgatcaagttccggattcaaaccttctaaaaattcagtgaccttatccttctcttgaattgtcttaaacaacacactatcttccacatttttccattcataatcttagtacgaattcaactcttaccaaattctattcatgtttaatacaattgtgtatcttagcttcaaagtcaagtagctttgcttggcatcatgagctaagcttggggtagggttaagttagcaacttaaagaatcttgggttgtctcagtgttgcacgtgagcttaagaaatacctaagttcgtgacatgaagctgagttagttgtaggagaaaatgtaaggaaatgaccccaaatacctaatttgtggaagaaaagcttaatgccttcgaaattttcaatggggggtgtacacaagaaaatgtaagacttggagatcaatgagaacacgatcaatgagggggttaaaaaccagatcctaactttaatgaattattgaatgatgaaagctgctaatacatctcatcctccttccaatgatgatggtgatgatcaggactatttttgaggaggtatggatcacttctgtgatcatgctgatgggggagaagccaagtggaagaattaatgatgaagttgaaggagaggaaactgaagagcagggtagagaagagtctgagcctacatagaagaatgctgttgagcaaattaatgagaaagctgagcagagggatgaggaaatcactgctgaaactgagaaagatgctgccatggaaactgatccaccaattgaaagggagattgaggaaattaatactgaaaatgctgagaaagaaattgcttctgaaggacctgaacaaattagaaaatcctaaagcaattgagattggtgaatctgtctaagaaaatattgttgagatgaatagggaagcaacagaatcagtaggaagggatgcagcaaggatagagagaaatatttctggcaaaacattgttgatccttgattcttgctttaggagaagagaccttgacactctctttgaacctgagtagcatcttattcacttcctaagactaaatgcagtttatttggagtctttcacaactgttaaaagtctaactcagcagcttaaaaccaagaagtagtgtgcaaagtgtatgtgagagagaactatagaacccttaagtgttcaagaactatcccttactccttacacaccccaacacagcttcatttatatggaatagaagttgctaataagctaacttggactttgcttatcaatgaggttagaaaaatctaaggtgaggccttgattctccaagaaaacacccctaactactgcctagaacaataaagtaactgaaacttaagatttaactctactaacaacaggaaaatggctcaaacaaaaagatccactaaagtagcaattaaaacaaacaaaagatatgcaagaaacaaactgaaaacaagctgaaagtgaactaaagatggagcaaactaaaaacaatcatgaaggggatgatattcctaagacctgttacttttcttttttttttttttctggatttctttttttttttttttttttttgtgttttcagtttgaatttttgttggtggtagatctaggagtcagagttcatggttttcaattcaccggatttattttggttttagtttttatgatttttttttttttttgggcatttgtgtgttgtctttagttctattgaagtgcatgcttgagtctactttaccgtgtttggttgtggagaagatggagggaaggaaaggaaaagaaagaaaaagtttgattgcatatgagtggtttttcattggttggaacccaaaaggaaatgaatcttttcatagttgaggggactgcatctatttcgcttggttgatgtttggtttgctttttgtgaaactaaaacggaataaaacatctaatttaacattttattttcatgcgttttacttagtgctctcagcaaccaaacagagggttagggtttcccaggtattattttaa

SEQ ID NO: 13699 - DNA, 2176 bp, Vitis vinifera
  Intron number 1 from transcript GSVIVT01012199001 (locus G SVIVG01012199001) derived from phytozome v7.0 (chr-ID chr1 ; pos 599342 to 601517)
aggcctattcttctcacctcaagcgatctgggaaggtaccattcattgcttcgcttttgttagttttggtcggatttgatgtctaagatctttcctttttccgtcaaaatgttatttttccacttttaaataggtttagtaagcagtagcatggtgattgtttgaaattggaggtttacagttgtttgtcatggtccgagagatcattgttttgtagaatggatttatttgatcaaaatgggtggatggatggaatgcttgattgggttgtttatgtagttgcgggcctataatgacttttgtgtatgggttgattggatttgagtgtgtatacccttataattgtttgggttgtttatgtagttgctggcatataatgagttttcttttcctatgaagaagtatgggttgattggatttgagcgtgtatgcccttataattgttttccaaggcaatgcttctgagggtttagacaagggtgggatgggagcatgttggttgttgtggcattagccgcttgatgaagaaattttgatgaccctttggatgtgtctatggaatgaagattaggggtgtgcgatggtaaacattctggcctatgcactaggcggggtgtggaatatgatggctaatgcttttaccaattgactgagatggaatggagcctggcaccattcttcatgtacccttgacatgggtaccagtagcaacattttagcctgcgtaggtgccatacattgggcttgtaactctctcaagtcatcgagagattggtccaagtggacatttgttgggttggggttgcaatgcagtggcatggcgcagggtgatgcctgagaaatcaaagggacagttagcagacagctgcagttgcaaaagtggcaagatagactcgaacaatctccactagggataggtgcaacatgatccatacatttcttgctcttttctaaagcaaaacaaatacaatcaactattagttttggaactgccctttctactttattataggcttttgatacaactcttttgcaaaagcaacagtttgaggatggccatttctgaaggctgatcatatagattctggtgagaattacagatgtgtggaaacagcctggtagttgtcggtgtagcctatgaataggtgacaacaagccatggcaaaagcagagaagccttcatccagattttgtgttgcttttgtatctaggtattgaattggaagattgaggatgtttagttgtactgtgtgtgcgtgtgtgtgtgttgtgcaggggcagatccaccttgtgcccagctggggcaaatccccccctgaaatttgggaaaaaagtatgtaagaggagggacttgatcctttcacctaagattttgagttgtaatggacaactttcattagggtatacaaacatttggatgttattttgccccctgaaacaaatttcatatcatgctccctctaagtttcttttctagctctgccactggtgttgtgaatacagatggttagcttgctgacttcttgggaaggttaatcaattaaataagaaaacatagggaagtcgtatcattttgtaacagagcatgcttcgaccttcaaggatctctagtgagaacactttagactcactgaagtttacaagcaggagtgttctgtctccacaggtttcaccgaagtttacaaatgcctatgaattccagaacttcaaagaaaataaagaaaggaataagctttgttccacttgattgcatttggttggcttatccaacttattgactaaaattgttttgttccaacagctgggactctattcgagtaacattctgtacattcaaaattctatagacttccatcttaaaaatggttattggcatattaaatgctaatggtttatttgtactggatctataatgatatcatcattttctttctttgaaagtggaaggatatatttgaagtcaatactattcaaagataagttacttggttaaaatggatgaggaatcatgaaaatgctgtatacatgttaaattttacaatgtagttctttgggagtatgatgcttcatttaccattcaattttgccaaccatcctctttattgcttcattattatgcctaaccaactgcctttgagcagatagagcttcctcactggactgatattgtgaagac

SEQ ID NO: 13700 - DNA, 8354 bp, Vitis vinifera
  Intron number 13 from transcript GSVIVT01021607001 (locus GSVIVG01021607001) derived from phytozome v7.0 (chr-ID chr 10; pos 7956014 to 7964367)
tctctagcaacaagggagaaacttttgacagacaggtatccatattttctattaagctctcagaacatacacatggctggctattcatttttccttgattgtgcatgcaggtttcttggaatgtttttatcaaggatttccatgttttgcattttaaatagttctttatgttattagattatgtagtatcatttccttgatggaaaaattatgccttgttctgtattacctacgtttatttgattatgtggcagctgatatggcagacacctatctgaccaactgatgtggttcatacatagttttaagtttgggtttgttatcagtggtgtgttaaacctgttggaatttttactgaaaaataaaatatcaatttgtttaaattttcttatataaagtattgaaaactttagtactgaattgtaagtattggatattgaaagtgcttgagtttacaaaagtaaaaggcctgtttatatcatctaaggcttaagtgttggatttgatttgactgtttcacaatgtaaggacaaacttataattcatacaattcaaagagactagtttttcatttttcaaatggtcaaattgaatccacactagttttttacaattttgtaataaataaaatgtgcattttcactattttttttcacaaatttttattatatagtttaaatttgattatggtttggaatatattaaaatatcgtgcttcattttatttagtgaaaatgcatttgtttgatataaagctcacaattttgtacacattttctaatcaaagacatttaaaaattttaatttgtgtgataaatcatatttgggctcaaaagttcatgcgtggccccatatccattataggaggcaaagatagacaaataaatagatgaggggaagacttgaattatagacctctatgccatttggcaattttgttagggttttgtgaaaagggaggtgatgggttttttttatttggggagttccatgatttgaggtcctttgagaggagttcaaatgctcacaattttatacatattttttaatggaagatatctaaatttttaatttgtgtgatatattaatcatttttaggcttagaagttcatgtgtggccccatatccgttgtaggagatagagatagacaaataaatagatgaggggaggacttgaattagaggccttcgtgaccttttgatagttttgttggattttgtgaaaaggaaggtaatgggttttttttttttttgatagagctccatgatttagggtcctttgagacgagtttaaatgccatgttcatagtttttgttccaaaaaaaagggggtgcagaagacttgaggactttcgaccaattagcttggtaggaggtttatacaaactattagggcatcaaaggaggggtttattgaaagcttctcagctaggggaaaagatggtgtggggatggaggtctcctatttgttattggtggatgataccctcattctttggtatgctagtaaggagaatttagagtacaagttgggtttttatgtggtttgaggcaatatcaatactaaagatcaacctggagaaaagtgtgttgattcctattggggtggtctcaaacatggaggaactttgaggaaagaattcagagaaggcttgcttgttgaagagacaatatctatcaaaatgtggaagacagactttaataaagtactttgtccaacttgtcaatttatttcgtatccatttttgttatcttgaagagggtggctattagactgaaaaagattcaaagagattttctttggagacagggtgctttggaacataagccgttatgagtaaaaaattggtctattgtttgcatggaaaattagaaagggggtttgggcataaaaaatttatccatccttaataaggcttttatgggaaaatggtgttggagatttgtgagtgaaaggaatcctctttgaaaatgggtaattatagatgattgcgggtggtgtactagagaggcgagagaggattatagagtggggatgtggaagacaatcgggggtggttgggaagctttcaaggatggaataggttttaagatgggttttgggaatagggtgacattctggaaggacaagtggcatggggacatgcctttgagagagtcttgctcagaatgctatagtctcttcaaaaaaggcttgggtggttaaatatgagatgatgatagtgggagccctaggtttgtaggacagtgagatgactgagaaattagaggaggtagaagtcttttttgggaggttgcatgagcattccatgagtatgaatgctgaagataatttggtgtggttagttataaagaatggtagcttcttagttaagtccttctattcttctttgttaaacaatattttcaaaggcgattttgaggcgtcccttagggtgaggcgggtctaaaacgcattgagctgttgtgaaaaaaatgtctctcaaaactggaaaccatacctcgcataggttggtgccaccattgccattgaagtcgactctttctttagtggcaacttttctttagcgtgctcccttcatcatctctacaacttcgtgtcacctatacccctttcctcttgtctctcaaatctcacttcttcaattcttgtctttttccttttgtcttacgaccacttacatgcatgcatacatacatacatacatacatacatattttagatatatatatatatatatatatatatatatatatatatatatatatatatatatatatatatatgtttttttacatatgtatatgcatacatacatattacatatgtatgttttttttttcaccaccacacgtcctttcttcgattttacttttaatgtaatttaatttaattttcattttgtttttctaaatcctattctatttttgaaaaaaggaatatctttgaaataaaatattattagagttcacttattctttaacataattttattaggtttttatagttttaatttaatttttgaccaaattaatgaaattgattaatttgattttaattaatttgttttttatgtttttatttaagttgaaatattttaatcttatatgtttgactttatttgttattttatgactttcttatgattttttgtgaagtgtgaaattattagtatggttattttattgctctaactaacttgttatttatttttaaatatttattaattttacaatgagggtcttgaaaggcttatgcatcaacgctttgaggcttatgccttgccttgtaaatacaaaaacgcctcaccttatgcttttgcctttaaaaactttgttgtcaaataggaggacaaagttgtttgcttatgatacagtacgaaattcctggatgccatcaagaattagcttctttgctttgaaagcaatttatggttggattataactttggatcaactcaaaaggaggggttggaagatttctaataaatgctactagtgcaaagaagcaaaaatggttgaccatatccttcattgttcgaaagtaggctttttgtggcagataatttatgctctttttggtgtgcagtaggtgatgccttctttagttagggggtgttcttttgagctgacaagagtttttttttgtaggaaataagaagaagaaaaaggtttggaaggttgttttgttgtgcttgttttgtgccatttagagtgggggaagtaagagagcttttaataattgtgaaatcattttttttttgataggtaaacaaaatcatattatacaaagaaacgtcaaaaaaagcgtttcaaagtagataagatgtatacaaagaaacatcttaaggcaacacaaaaacaaagagggacaccaataacaacccccttagcccaaacctaatcactccacaaagtctacaaaggaaagaggactaggaattatgtacaacttgcaccatgcccaaagattacaaatgaaggagaatttaaacccttgaatcgaccgcccctcattatcaaatgccctactatttctttccttctaaacagtctaaaaaaggcataaaggaacaaaaaaaccatgtcatcctaacaaagcctttctaattgaggaggggagcacccatgatatactaaaaaatgagaatagaagatgccataaaactcttgttctattacaataaaggagaatgcaatcaactgatcttagcatgcaaaacaaggacctaaaataaataggcaagttagatagagtgcaacaaattagggtaaatctccccctacttagaaatatgctacctttcccaaagaggcaacctttttcaaagcctctcctccacgttgtcccaaattgccacaaacttaaaatgagcacccagaaggaggcccaaataagtgggatgggagcgccctaaccttgtagccaaactcgtgatccaactcccctatattctttaccctcctcattgggattagcttgctcttatccaaattgaccctcaaccccaaaatggtctcaaaccatataagcacccaactcaagtaagtcaactggtctagggaaggctcacaaaagactaatgtatcattgagaaacaataaatgagatatgtccacccccctttttcctcttcttctcacttgccacctcggcaggaaacctccaatcttggccctcttaagcaaacaactgagggcctccatgacaatcacaaaaagataaggagaaagagggttcccttgtctcaaccccctaaagctctgaaatcatagactaagaaattaaacattccttattgtatatcttttgggattaggttagagtgtctattagggattatcccttgttgatagattttgtggattgattaggctctatgtagggcatttttttaggccttttgtttgctttgtatacatcgtttatgctttcttgctttttctttcgtcgacaacacaatctttacttattgacaaaaaatgacttgtttcaactgaggaggccctacaaagttctcatgtcgaatcataaccgatcatcactttattcattgtcccaccgattagcacttcagcaaaaattgctttgctaatccaatcttgataggttcctcctagaggcacaagagaaataatggttatctcctttaagggctttggaagccttccaaaagagaagactttatggtaggtggtggtattgttcttgatatggtttatatggttagagaggaatgtaaggattttcaaggataaatggagatctatggatgccatttgggttttgatttacttctaatagtttcctttgggcctcgatcacccagcttttttacagatattcctttgtttcttttaatgttggcttggacaaatgtttgcttcttatataggttgaggaagaaagttgtgattggttagttgcccccttcaataggtttaataaagttgaactttgatggatctttcttgggtaactttgatcaaatgggtgtgattagagatcactttggtacagtgttgagagctttctcttcgcaggcaggtgtggggttggctattgaggtagaaattttggcattgtctaagggtttttttttgcaggcaaaagcttttggcctctccaccttaactatagagggagattctactattgttatatctaaggtcatcaataaggaaagaagttaatgaaaatttgacaattggatgcgcaaaatcttagatgttactcaaacatgaactacttactaattatgatttaaaaaacttaaatcggcaaagcttatctttttcttccttttcgtacttttcatgaataaaccttgaaggcttatccttattaaccttaatactgttaaggctagtaatcaatatctacaatggttctagtagaatttaaagttggttatcaaataggtctgcaggaggtgagggtaaagccccatagaaatgagtcctggaggataccacatatataatcggagatgatgtgagttcagtgggactgggaaaaacaagtcatgttgggggtctgactgcctggggaaggtcatgtctctcctttaaagtagttggactaggttgtgaagagctccttgctttgtgatattttcacatgttaaagatctacctttatttgggtcttcctttgggaaggaatccaactgcttgtggattctgggatccagtgattaagagaatctctaggagattagacgggtggcaaaaagcttacttatctttcggcggtaggataactctcctacactcatgtctatcccatatccctagctactttctttctctgtttaagattcctgcttcagtggctgcaaaagttgagaggatgcaaaggaactttctttggtcaggggttggggaaggcaaaagagaccatcttgttagttgggatgctgtgtgtaagtcgagggtaaaagggggtttggggattgggaagattcctttaaggaatcgtgctcttttagggaaatggttgtggaggtatcctagggagagcacaactctatgacatcaagtcattcttagcatatacaggacacactcaaatggttgggatgccaacactttagtcaggtggtcacatcgttgtccttggaaggccattgcacaagtctttcaggatttttccaagtatactcggttggtcgtaggaaatggggaaagaattcgcttttgggaagatttgtggtggggggaccaaatcttcaaagaccaatatccaagactatttagagtagtaatggataaaagtgttcccatatattcaattcttggtttggctcgccctttctcatggaactttaatttctgtcgtgatctaaccgattatgagatagaagatctagaacacctcatgcgctctattgattgtatgaatttatccacctctgcttcagatgcgagatcttggtccttattgtcttcaggactgtttacagtcaagtccttctttacagccttgtcccaaacgcctgattcatctccttttttcccttctaagtttgtatggaaatctcaagtttccttcaaagttaagacctttgtttggcttgtggcacacaagaaggtaaataccaatgacttgctacaattgaggagaccccacaaagctcttagccctgacatttgtaagttgtgtatggggcaaggagaatcagtagatcatctattccttcattgttctgtgacgttggggttgtggcacagactatttcagctagccaagatggattgggtccctccgagaaacatttcagacatgatgttcatcaattataaaggttttgacaagtccaagagagggttggttttgtggcaaaatgcatgcataactttaatttgggttgtgtagtgggaaagaaatgctaggatatttgaggacaaagctaggaattcagagaatctttgggactccattcatttcatcacttcgttttgggctttttgctcagcaggttttaagggcattccccttaacgttttacaactagattggctagcagtgtgtagttccaatgagacggtgtagtgtcatgttattttcttgtgttgtttagttttaattctggcgggaggacttctcatcctccttatgtactattttatcttatcaatatattcatgcgtggtttcctatcaaaaaaaataaaaaaaaagatctacctcactgttatgtatttcctcagcatttagactggctttagcacttctccctcaagttgtagtgtatataattaatatagttatcacttttgtcatgtaaaagtagaccatgccagtgtagtgggagaaacaagtcatgtttttgtcctgactgcctggggaaggtaatttgtctctggttggactaggtcatgaagagcttgttgctttgtgctgtttatacatggttttaaagatcgacataactgttatgtatttctacagcatttagactggctttaccacttggctctgatgttgcagtgtgtgtataattaatgtagttactacttttattaaatattagaacttaataaacttcttttttttacttagagtgaccacatcatctccttgttttttgaaaaaaataaagcctttcaagtgtggtttattttgtaggtgaagcttcattgtgattacctataccatgttagtttgaatttggaaatttgatatttgaatgtttcatgtaataaaactcagtgtcatgtaaagtttcattgttaagaaatagaaataaaaaattgttatgcagaaattatttattttagtttttgctattagtggataactgtactctttatgcaggctactaactgctacaattgcttggcctttaccgg

SEQ ID NO: 13701 - DNA, 203 bp, Vitis vinifera
  Intron number 1 from transcript GSVIVT01028163001 (locus G SVIVG01028163001) derived from phytozome v7.0 (chr-ID chr7 ; pos 4326112 to 4326314 reverse strand)
ctgaaacaccaggcacacctaaggtgagtgtactgattttttcccttctaattatggagctacacatgctagtttgtcattcaaagaatgagtttattgcaaatatatatgtctgcatcttttgaatctaaaattttggtttgatttggtctatgaaactattgacagcgatcccaccgcactggggaacaggatcggacatt

SEQ ID NO: 13702 - DNA, 8486 bp, Vitis vinifera
  Intron number 3 from transcript GSVIVT01037531001 (locus G SVIVG01037531001) derived from phytozome v7.0 (chr-ID chr6 ; pos 12020721 to 12029206 reverse strand)
agacaaactcactgggagtaaaaataaccaaaaaggttagttcattttactagccccattggcttcgctctctctctctctctctctctctctctctctctctctctctctctcatttttttggttctctatggcatggaacattgcaatggctatattattaagtcctgtgacatatgtattgtgtgtatccaggcttttgttctaggtcttgcttgcttactgaaaatttcattcaaattgtggttttaaatttcattcaaaatgaaatgttttgagattaaatatcaaggttgaaagcatcgtctgcaatatgagttggtacttttatgttaatggatttatgttccatccataagaagtatatgataatatgcctattaaataaaaaatgcattcagccatatgacatatgatatggtaagctgattttctagctgctgaagacttttatcattttgttttctctgtgtaattcattttaggtgtcctccttaatagtgagagaggccttgatggaaaggtcttcatttgtatccaaaatttcttataggataaggaaatcaagttcaatgagcagatctaaaccaggttttaagtgttccatttatacctaaaactattattgacttgagtggttattgattagtgaatttttcctcttttagaagttcatgattctcaatttgtcaatcatagaagtttcttttgctatagtggccagatttcacatttaataattcattgtaaatggtcctctcagaagaccatttaatgatgtatcctcatttttatatttccttttgtataactatgttagaagaacttttctatcgtcatttagtatcgaaaccagtacaggcttacttttacttccgtttttatggtttaacttgcttcataatattcaaaacgggagaagaaaaatttccacctttcattacatgttgcctgtaaccaactgtactgatgataaggtagattaaatggtccaaatgcttcctttaccgagcttctctctgtgtaagcttccaaggtcagacctatgactttatgggtttctatgagtttgagcatacaaattcttctaaaatgattagaagtgaaataaaggtttgagctccatttcacttttgcttttatttttaaatttgtatgatggatatggatattaaggttaaattaaatacttaaattgaatttgagatatgtttaaaccctgaatatttttctgtggtcaatttgtgttaacatctggtcatttctgaaggtagtaaagtgatgtatgttactgtctcccttagctctgatggcatagctcaattgtaggtgcttttgcttaggaatgtaagctcccagttggagtctaaggcttacttgatacattgtccttgggaatagggcttaatatttgttgtttttcaccattcctgcaaagtcaggttagtgggttactgtgtttcagaaagaaaaattttagtggcctctcagtattgccctgtgacgcctaatttagtaatttaaaacctgggttgtaatttggacccaaaagtaagcgatttttggttcaccattctaattgtctgagtccaattgcacattctctcatggaataaatataataaaagaaaaggtatcaaaataaaggatctggaaacttaataaaagtataaataattttctggtatctttaaggaaaaaatttaatcatattacataacaattaatttggaaaagcaatgtttaaatatgtgttaaatccataacttgttcaatcatattctcctttatttatatctgtttatgtagaaagaatgaagagtcaactaccaaattatcctccatcatgtggtgtcccaatttttttggccttcctcttctttgccttcagtatttgttgggtgaggcctttttggtgggtatggtagttttgctggggaaaggaagtggaaggtttgaaaaactgtgcctttgtgctgctgattgggaacaagtggaattagctcatttttgaagggttgtgtattagagtttagattataagatttttgcattaagtctttgtcttttggcctttttctattagtgttccttttgtttttctgttttttctttttgggtgtgctatgaatgcttcctttatagtgttgcttagtatactataaaaaaacccttctccaaggcattttttaacaactattatgatggagaatagcaatggattttggcatgaattgaagatgaattaataacagtatccgtctaataacaactcaagcttaagccaaattatgctttgaatcagtacatctatcaaattggcatccttctcctgtctatttcaaattgatgagttattgggcattttgtaatgagtgcattgacgtttcttgatgatctgaccccctataatgtgaattacttttgtattctaaattttgtaataagttgttttaagtagccatattgatacctagactcttaaatttcatttttaatagacaacaaaagcatgaattgagcaatgccaaaaagagggggtgcatcctatgtatattggctatatacccaaaacatctcaaaacaagcaccaaacattaaccagtttagcctacaaaaaccaggtaactagaaatagcatctaagaaatccaaaatagaggggttttccatttcctcatgggaccactctaaaagtgatttaatgaagaaccccttcaatctttgatctaagagctcttcatctttgaaagtccttcagttatgctctttccaaatactccaaacaagcaaatcaaagtcaagtgccaaactattctttgcttcttatctagctccttaaatttccattcagggagaagatttcacaccaaggctagaaacacccaaatccagccaaaggttgctaacaaaaagtccgaagcactcgtcttatcacaataaatcaaaacgtaatcaactgattcttcgttttctttacaaaggatgcatctattaaccatgggccatctcttcttcattaatgtatcggtagttaagactctaaacaacttcccaaacaaaaaaccatgttctaagtggagcataggatcctcaaatctctttagttgggaatactaaattattctctgcacttagggatttataaaatgacttgacactgaatttcccctcctatcttctttccatagtgaagtgtcctctccttcttgcactttcaacgggtaaataagctctagaaaatgggttacctcttgtatctcccaatcttggaagggtcttctaaattgaaactcccacttgccacctccacctcctctatcccatggatctgcaactatagcattttttagagaggctattatgaaaagcacagggaatgtgcttttcaacttaaactctcttgcccacccgtcccatcaaaatctaggatgcctaccatttcagatttggatagttaatctgaaactaaactgttcccaaccttttgtaatttctttccaaatgctcatatcaaaagaatccctcactcctctagttgtccaacgcccctccatctccttgaattttccatgaatgatcttcctccaaaggctctctcactcaaaagaaaagctccacaaccatttgccaagcaaggcttgattaagaccctccaatcttctttgacccatccccttgtacttgttatcctttcaaacatttgaccaatttaccatacggatctttcttctttctcttggatctccccacaaaaaatctttttgaattctctctaatataattctcatttttttgggaattgcaaagagggacataaaatagatagggaggttttatgaggccccaaggggtaaatcaagataagaagtaggaagtctccttactttacaccctaaaagagaagctactcttaaatttcatcaaaaagcatttgtgatcatcctcatttttacttttgatatgaatgattggtttttcaattgatttgagtttttggttgcaaccactataggaggagaggagtttgatggaacttggatttttatgaggacgttttgagataatatgaaaaagaaacaagtttttactaggaaataagatgagaaaagataggatgattcaagatccatggacataattttgttaatcttaaaataacaaaatttaaagagataatgaaataaaacagaaataataaagtaaaaaatctgaaatgttccccccacccccaaaaaaaaaaaaaaaattggagaaataatatggcaatttttaattacatttcctgcgtacttttgaatgatataactttaatagcgaaaactggtattatggatgcaaaaagaattatagaattaaataaattatcctgatggctcatttaagctggttgttgatgtggtttgaagccatatcaggtttgaggattaatttggataagagcgagatttttccggttgggagagtagagaatttggaggctttggctcttgaggttggctgtaaagtgggaaggcggccaaattcttacttggggatcccgttgggggcgaatcacaaatccgtggctgtttgggatggggtggaagagagatttcggagaaggcttgccttgtggaaaaggaattatatctccaaaggcggtagaattaccctaattcgtagtactttgtcaagtatgcccatatacttgatgtctttacttcgaatgccaagagtggttagtttaagattggaaaaaattcgaagggattttttgtgggggggaggtgctttggagaggaagcctcatctagtaaattgggattccgtgtgctcggacataaggaagggtggcttgggagttagacgtttgtctactctcaatagagcccttttatgcaagtgaaactggcggtttgcgaatgaaagggaggctctttggaggcaagtcattagtaggaagttcggggaggaagaagggggctggtatactagagtaggtagggaggggtttggagtaggcttgtggaaggaaataaggaaggaagaagctctcttgcaaaacaaagttgtcttttctgtggggaatggtagaagggtgaaattttggaatgataattggtgtgggaatttctctcttagtaattcgtttccctctttgtatgcctttgcttcatttaaagaggcttggttagtggtgttatgggatcattcgggagatgaaggggtttggaatcctagcttctctaggtcctttaatgactgggaggtggagggggtggagagattacttctgacaatccggggtaggaggcttaatcctcttgtggaagatagaatgctatggaaagagactaaagatgagattttctcagttaagtccctctatagttcgctagcttcaagaagagatgttcaattcccttatagtaatatttggagtacttgtgtgcctaccaaagtgagcttctttgcttgggaagcttattgggggaaggtgctatccttggatcaacttaaaaagaggggtcggtctctagctaacagatgctttctttgtggtatggaagaagagtcaattgatcatattcttatccagtgctctaaggcaagagggttatgggagttattgtttgctctgtttggtgttacttgggtcctcccttcttcggttagagatactcttagtggttggagtggctttaagttgggcaagaagcgtaggaaggtgtggaatgcaaccccgttgtgcattttttgggcggtttggaaggaaagaaacaggatagcttttgataatgaagagttatcaattcataggttgaagaattcttttgtttgtaatctttggctgtggactaaatcggttgtaaatgatggtcctattcctttgatcaatttttttgattggctaggcgctagttgagagctggtattgtatttctttctctttttgtgcctattggcgcctcttgtatacatcctgtatgcttgggtcagcctcaaggcgcccttttctaatatatttttgttgtgtgtttgcctatcaaaaaaaataatataaaagttcattgtaagtattcatacttgagattatttttagccaatttcccgtattctaaaatgtaggaatttgaaagatcagacaatagtcacatacttgtactaacttgtatgtgaacccaagtaatgtagagtaggcatgcattaatgtctaggaattttaaatatttgtatacttatataatgagactaacgttagtggagtttgacaatggcgagcctagtgtgcaagcagcagtagtggcatcctgagggcctaactcattaacaatggagctttctatggaggaagattggccgttctgttaagatttttgcttttgtgcaatggaggaagatgctggcttgggtactcttggaggaacttgttggtttggagtggagatgaaaacttttgaaatctagttggagttagtaaaaggtaaggtgatagggaagattgtgtagaggggcagagggttttcctcttggatcaggtttggggagaggggttttgctgggcttctagaggggggtggaagattgctataaagggaagtttggggagtctttcaaaagggtgtggaatgaaagtggaaggggctacaaactggagttgtgcagcagcaaagctggaaggtttttgctttgttcagcttggagcgcataggaaataaggttctcctttgtttttctagagggaaaagagttcctagggggttggaagatccttgccaccaagctaaggagggtttgttacttagcctaggcctttggaggctcataaggaggttgctgggtgctgggaggaatatgaaaaaaagggaggaggtgctcttataaaccatgcttcttttgcagaggtgctgaacaaaggcaagagggaggtgggcaagacagtgtggattgatagcgatacagaggaggttttgcgcaacttagggtctctcaagaagtgtttggtggggagaggggatgctctttcgagctgtttttcggttttaaacttgctgaattcttgggcttgacattcttaggggattgaaaggtgagctaaatctgtgtttgttggtagaatctctcattttatttgagtttgaagatgggtccctgacttctagaaagtgtagtgggtgaaggggccctttgcgtctacttgggctagtcctttgcaaatggctctcgttcgtctgaaggaagccttggtgggctagccaagtgtgggctgtgccttttaaactttctaaagggccggccaaacggtttgtcctccatccctttttatgagagcctgggcaagaagacccaagtgggaacttatcaaaagaaaaaaaagacccaaatgggtacttcaagacctccttaaggtggagttcattttggctctttagagctcttcgatgatctacttctaaaggtggcgacttagggaccgatagagtgggttttaggagttcatgaagccctcttggaagaagtgactcacacccccttggcacgcccccccccaaccacacacacacacacacgcaccattctcctcctcctcactctctagttggattgctcaactgtggcaacgggccagtttgcctatcaagggtggagtttgtcttccttgtgtttgggttctcagccattaaggatgttgctttaggatggaaggttgttggagctaacgaggagtgcagaaaagggtcttacggggagggatttagtggttagggatgaagaggtggaggattttagggccatggaggctagtaacgattcagtaggggaggtggttttttccgaaagccttccctgtttccaagttcagtagctttttggggatgctagtggtgggttttgaaaaggaaattacctccctcctgaggaaaatggaggcaagaaaagggtgtggggtgaggatctcaaggggaaagaggaaaatgttttcggcttcccatgttgagagggaaattcgtaatttagaatgcttggttaattacaatagctctcctctctcagttagggaaaaggggaggagctgtggggttcaatctctcctattatgaggtcatttcttgtttctcagtttggttgtgggctatgtatggcagaagtgcccagcggtgttttctcttctttcctggtctttaggttgtaggggtttagttgctttggatgattggtatttgcgcttctttttttctcccttgcttgcctattggcctttactatatacttcgtgtgtactttgttgcgctattttctatgctcttttaatatattctctctatttacttatcataaaaaaagtacttatatgatgtgactaaatttattacactttcaatattttcctcatttgacctgtgattactgatgtttccaggtttccaagtctttagactatcttgcctgtctatagatttctttatcccatatctcacagtggatgttgattttttcaggaca

SEQ ID NO: 13703 - DNA, 5674 bp, Vitis vinifera
  Intron number 1 from transcript GSVIVT01012192001 (locus G SVIVG01012192001) derived from phytozome v7.0 (chr-ID chr1 ; pos 673506 to 679179 reverse strand)
cttttagggttttgatgcttccatagataacacttccattaggttttattaaaaatataactcaaagtattttttgtagtaagatacatgatttaaaaaaaaaaagagagaaaattaatatttttgatcctaataaaaggatatattttttatacatgataaaaaaaaattaagtattttcttctaactagaagttatagagaacaaaattgttaattaacatttttgtacgattttataaaatttatgtaaccaaaatttataataaacatgtagataatatttaaatattatataaaaaaatattttgtatatcaaattataaaaaataggtaattgattaataattttttttgatctcttatagccaaaagttacttaaagttattggtagaaatacctgcatatgaaagtgaaattttatattgcacgaagacgtgatatttatgtttaatatcttgtattagagatgatattgtattagagatgatattttggaatatcttatattttggttgtttgatatacaatagatttttttatatgatataataattgagaataattttaatctttattttccaatatttagagtaaaatatgtttatccttcatataaacagttgggtgttttggatagcataaatacttacattttgaaaattccacatagtatctttttatttttttatataagatttcaatttttaaatattctaaaaagcatgtgcttataccaaaaaaaagtttgaaattatgtgttgaaaatattgaaaattatattaaaaaaattagttttcctaacacatcatttattaattatgatgtgatattcttttttatagatcttgtttataaaaaatatggacataaatattttatttatatagatagactttaaagtctagtttacatattaccatatttattttttccttatttaaatctaaaagatatttattcaaatatgaaaggatttcgttttgaacattaacatttcataagatgttgtacatgaatatctatgttgacatattttataatttttagaaatttgatattaatataatattattattttgattttatggtataaatttaaggaaatcttcttaattctaatatgcatattttaatttcatgtttgatgaaaaataaaaattttgtttttatatattttaaatatataaaaacttgtataaatatgtataaagtatatatttgatttatgattgaattttctaaagatatttttgaaattttttattatataattgttttgaatatatgtgaaatagataatttgatcgtatgatcaataatttgattttatatgtcaattttctttaaaacgtttgtttttggggattgaaatttttttaattatataaaataatgtatattattgcatgtttccacatatggtgtttttactaatgtaataattttattatccaataataattttgaaattacaataagttcaactattgttttaaatatattttgttttatctttgcatatacatttagatatattttgggcatttcaattaaaaagtatgagacatcgacaaatggcaagatgttttatatcatgatacattcttttgaaattttgatctataaattaatttttgctcattgacttatatcataataacaattgaataagacattattgatctattgttacaattaatttgattattaaaatactttttagttatttcatgcaaaaattgcttcacatttacgaaattaaatatgtgagctatttaaaaaatatataactttaaataatctttttcatatttgttttgttgtgctagatatgttctcattacttttacacaatttattaagttaggtcttcatcaataattggtatttttatgttgattttaactcttcctctataataagatttattcaaccctagaagagggaggtctttataactaatcattttgatgaaaatcttgttataataattatataacattataacaactatgttaatattatatcagacaataaaacttgattaaaagcttcaaaagaacttatactatatcactaatagtacttgattctatgtgaataacattttatactaatctagaaaaatcttacaagactaacatggttctccgggataaacattgatgcattaattcactataaagtcgtatgaacttacattataaaaccaaaagtttttatctagtgattagtctacctatacacttaaaatgtaaaatgataatgctatgcatattatcattttaatgagacaattttctcgtcattagggggagaaaaactgatttcagaagaatgacgtgaaactattttgaatgcattgactttgactcatcttaatcctcatactaatcaatgtgaattgaaagtttaaaaagttattatttgcaaggacttgcaaatcaattatcaaaggtatttgtcgatgcaaagaaagtgatgatcgaaatcatttatagtaactgtgaatattctagaacggattgatgtcactaaaagaaaattaaataatgagtgtaaggcacacttgaaacaagatagactattagataaaaagattcaattttccttgaagagacacaaatgaaaaaaatagcccgcgaagagactcaaataaaacaactagtccttgaagagacatatattgaataagtaacctcataagagacatatattacacaattaacttctattaaggtacaaatacctaataatgatgagatcttaattagttatttacattaaaaaaaaagaattaaattacctttattatagacaatatattctctttctaaatggtcattgacgttagaagaaatgataataaccttgaaccatagagtgtagaagaatgtcaacataaaaacgattgaccaaaatgaaaagaatctatctagaaataattagattagaaaaatgagaagtatttgaatctatagttcacatgcctgaagttgtcaaacttgttgaatataaatgggtatttgtaagaaagtgcaatgagaaaaatgaaatcatggaatataaagtgactcatagctcaaggtttcttatagaggcctattgttaaccattagagaattcattacaatagttataatttcctatttttattgtaattccctaattctaggatcgtttcttttttttttttttttgtaattccctaattttaggattatttcctatttttgtgtcttggataacccacgacaatgcccatttttgtgtatatatatatttattcttaatcaatggaaaagttaagccattgtttctcaataattctctctctaattccaacattaactaagaggaaatatactttcttatgattcatttgtatagcagtctcaaatggtttgaatatgcatctcatggatgttgttactacatatttatatggatatatatatatatatatataaatccatgaagcaactaattcgaaacattataacatatgttcaattaagttacaaagatccttatatgaattaagtaatccaaaggtatgtcatataattacctcggtgaatatttaattagggaatgatcaatatattatcttatttgtctattcatattcattaagaaatcaacaattggatttgcaattattatagtatatgtggaatatttgaatcttgttggaactcttgacctcacaagaataattgactatttgaaaagtaaatttgaaataaaagatcttgaaaaaaataaaattttgtcttagtctacaaatcatatacctttcaaataaaatgttagttaattattaatatatacaaagaaagtcttaaagcactttcttataaataaatcatatccactaagtctccaataattgcttgttcacttaaagtaaacgaagacttatttcatcctacagaggacaatgaagaacagcttggtctaaaagtaccttatcttggtgcaattgggccattgatgtatttggtaaattatataaaataagatatatcaattttttttatgaagttactagaaaaagacattggagtccaaaggaaaggagtaagtacttgctactagctcgtatactaattttccagttttctaatgattctatacaagtagataataatagttacttttttaattcatgaagcaagaaacaagttggaaatatgtgtggttgagatttataatcctatatatttgagagtcatgcaaactatctcccattaaagataattcgaaatactatatgaaaatgaaattgtatgcattggacaaattaaaaaatgatgcattaagggtgatagaattaaacatatatcgctcaagttcttttacattcattagctctagaacaatagtgaaattgcaatttaataagaaacatcaagtaacaatttagtagactcattcacaagggcattgtcaactatagtactcaagaagttcactagaatgtgctaactcaaatatctccataagctaccaaaaaacatataatcatgtcaatatgaggggattaaattaataagaatattattgtgttgtaccatttctattttttttttttgtcgaggatttgtgccaatgaattttactaacaagatttttaacgaaggctttttctataagatttttccagacaaattttaataaggcattttctaagagtgattgtcattcaaggggaatgtttttaataaggcattttctaagagtgattcgggaaagttataaatatttatgataatttatgaatgataacattattaccatatttgtacttttatcatattggtattatcttttatgggtttatgaattaataaataaagagctaacaattaaacaattattttttctccccattcttttattttacaatatcaaatatgtttttaaaattgaaattcttttcttaaataaagtgttgttttcaaaaaaagtttctaaagaaacttttacataagagtaaattaataataatcatcatatcatatgcaaattctttggttcattttaaatgctgctggagctgttaccaatgatatctgttattattctaattactctattttgaaatacgtacgaggttggtatattgtacttgttattattattattattttatagaaaatcaccgcttttagacttttagccttgcgctagagtcaaaaaaagaaactatcaactattctcgagaatgtagattctcaagaaaatgatgagtgaaacgggagtcagctgattggatgggtagtgttaataaaacaaggattcagattgaaaacacggaaacagctataaaagaagaaagcaatgggctttagagtaaagcaagctgacgcccaaaagcaaagctgcctctgcctcaccctttgtttattcgtctctgtatgaagtatgaactcgtaccagtgtgaatccaagacttgatatttcccagcgcccaccaccaccactatcactaccgttatcgccaccatcttttttgttttttttcctcaaccactcatctcgctttgtcccaccactcatttcttgtcttccaatctcaatctactctttctataaatcatattaagcgctctgagcaccacaatttgtagatctctttctctctgatccgagtgcagaaagcaat

SEQ ID NO: 13704 - DNA, 12011 bp, Vitis vinifera
  Intron number 5 from transcript GSVIVT01023807001 (locus G SVIVG01023807001) derived from phytozome v7.0 (chr-ID chr3 ; pos 3312364 to 3324374 reverse strand)
gcagtccactaatctaatcatttccttgacaaggaagggtgcttgaaggtttatgtgcaataacttatatgccatgaccaataatttatgattgaaaacatctacctgattttctttttcctctcgaaattaagtagtgttcttttgtgatagttcccaactaaaaggtctctaagggctcaagtggcatgctgtagagagggagagagagagagagagatggagcagccactcatctttcatagttagcaacatgattgactatatatgcattctagggattgaatccttgctgatcagttgaagttcctctcaattaatttaaccagtcacggcctatatatggtttaatggcatgtgcattctcaaagtttttgagtattcacagggcatttctccaatacaagcaaatcaaccccttactctattagaatatttctcttgaaagcactaaaagtcaggagaccactgccacctatacaaacatctcacaatacaagagataccattttcaccggcctcctttatggtgtgtgttagcagtatatgcttatcacatagggttttaatgtgattcgatcaatcatacttgtaggggacctctccccctagtgacacgtggcgcacatttctatccggattagctccatccggatttcccccaaaaggacacgtggcgcgcttcccttatctggacttcctcagggagaggcacacggcactagcaaacatcacatccggacgaccgacatatcctatccggatatgtttgtccggatcgttgactaaaagtaagcaagtcttactacatcattccgacatcctgccacggcccactatccgccgcctgcagagcgaaaggacagggttggtggcaagtcacctcccacgatccgccgcctgcagagcgaaaggacaggaacgatggcaagtcacctcccacgatctctgacagccgcccgtagggtgatgatgaccctgccaccacctagaggcatcatgacgagccaaaaagtctttccatcattaaagagggaggacgagcttctgacactatataaaggaaccttcacataaggaagaaggtaagcttgctatacctagtaaaaggccaactgattaatctctccatccatggctgacaaaaccatcggagggtgtgtccggaccctcgtccgggcatcttttgtaggtgacgactgaaccaggaatctatattggttgagattgtgcgtccatccatttggcaactacgtggatcaccagggacacgaggcctcaacattggagccgtctgtgggaatcatttcgctgattcagtcaccggcaaagatggccacaccttccagaagtcgctcgtctgttagggaagaggaagataattctgaatggcgtcgagccatcgaaagaagacagttggcaagcgagcgacaactgcaagctttcctccaggagacagtaagattaagggaagaaaatgttgtgttgcgcatacaagcttcattgacagggcctccccgtcgtcagcattcaagaggccaggtagcaaactcaaggcctgacccagagtcaatataccctggggcagtaggagcaatccctgaaacatgcaacgttaggccacatgagccacacacgcccatgcaccgagctccccatgaggaaagctcagactctactcatttctcagcaaaaagacaacacgataaaaaaccccagttgtcagactcaatgcacgcgagactaggcccacaggagcctgggaggccaaggccgccagtagccacaacctggggagcgcaccctgaccctatggtcacccctatggtgcagaacgttctcccgtaccgtgaccatatggtcacccctatggtgcagaacgttcaactgcacctaacaatacgacaagctgggagaaacctcccaaacgagccacccattggctccattagcaaaatgctagacgacatgctctccacgcctttctgctctcatattattcattatgagcccccaaggggattcctcgtgtctaaattctccacgtacgatgggtccaacgaccccttcgaccatatcatgcactatcgtcaactcatgactctcgatatagaaaacgacgcgctgctatgcaaagtatttcccgtcagcctacaagtgcaggccctctcatggtttcaccgcctacctcccaactctatcgataatttcagggacctatcagaagccttcgtgggataatacttgtgctccgctcgacataagcaaaacatcagcactctaaaaaacataaaaatgcaagataacgagtccttaagggagttcgtaaagcggtttggtcaagtcgtgctataggtagaggcttgcagcatggacgttgtcctgcagatcttcaaacgaagcatctgtccaggcaccccatttttcgaatcacttgctaagaagcctcctacgacgatggacgacttgttccgacgtgcaagtaaatattcaatgctcgaagatgacgtgcgagcagccacccagcaagtcttggttgccggacaggcatccagaaggggtgcggaaagaagtgccaaacttccgaaccggccaaggtcgtccgatcgaaggcaggaagggccaagtcgctcggaaatgccacccctcacacccctttccatatcctatgagaagcttctcctatgatccaagacatgtccgatttcaggtggcctagacccctcggaacggacccatccaaaagggatcatagtaaaacatgtgccttccataaggaacatggtcacacaacggaggcgtgcaggtgcctccaccatttggtcgaaaggctcataaaggctggacatttaaagcaatacctccactcagatgccagaggtggagatgcttcccgaaatcacaactctggaacctctagggccccagccgcccccaaagccgttataaactatattaacggaggcccattcgacgaggagtatgactccaaacgaaaaagacagaggttgttgcgggcagcatcggtgcgtgagcgtgtcaactccatccggcttgggataactggggggaggggctcaccccatagatgggacaatcattttcccaccagtagaccccacacggatattacagccgcaccgcgacgccctcatcctgtccctagagatgggagacttcgacgtgagacgcatcatagttgacccgggcagctcggccgatcttgtacaagcatcggtcgttagccacatggggcacagtctcacaggcctcgaaaatcctgggcgaatcttgtccggattcaacggggcgtcaactacttccttgggagatattgtactgccggtccaagctggcccaatcactctcaacgtacaattttcggtggtataagatttatcaccctataatgtcatcttggggcacgcatggctgcactacatgaaagccatcccctctacgtatcatcaaatggtaagcttccttaccaaagatgggcaaatcgacctatacggcagccagttagccgctcgccaatgctaccagatagcacgagaagcagggaccagctaggaggatacacccctccctgagtccaaccatgcacttgaccaatagcaattattgagtccgacggacaaagatcccccggtagcgaatcccttgcagacgatccaaatttcggaaaaaagaactcactttacatatatcagttccctcttgacacttgaagaaacccggaacattcagaacgccctccgataaaaccatgacgtcttcgcatgggcacattctgatatgaagggaattcatccctccattgtctctcatagacttaacgtcttgcccacagcaagacccgtccgacagaggattagacgttttcacccggacaggaaaaagattatccaggataagattgacaagttgctggaagctggattcatcagagaagtggagtacccggactggttggtaaatgtagtggtggtacctaaaaaggaaggcaaatggcgggtgtgcgtcgactacaccaacctcaataatgcatgcccaaaagacagtttccctttgccaaggatagatcaaattgtggactccactgctgggcaagggatgctctccttcttggacaccttctccggataccaccaaatccccatgtccccgactgatgataaaaagacagccttcataacgccacacagtctttattgctacaaagtcatgtcattcggactcaaaaacgctggcgccacttatcagagactgatgacgaagatcttcaaacctctggtcggccgtacagtagaggtatatattgacgatatcgtggttaaaagcaaaacccgggaggaacatgtcctccacttgcaagaagtcttccacctcttaaggaagtatggtatgaagttgaatctttctaaatgcgcctttggcgtaagtgttggcaaattcttaggatttatggtcagccaaagggggatagaggtcagcccggaccaagtcaaggcagtcatggaaacaccaccccccaggaacaaaaaggaattacagtgcctcacaggcaagctcgtcgcgctaaggcgttttatagcccgcttcactgatgaactgcgacccttcttcttggcaatacgaaaagctggagcaaacagatggacagactactgtcaaaacgcttttgaaaaaattaaacattgcctcatgcaaccgcccatcctgagcagtcccctccctgaagaaaaactgtatatgtatctggctgtatcggagtaggcaattagcgttgttctattccgctgcccctcacctaaggagtagaaacctatctactacgtcagcagagcattggcggactaaaaaccagatattcaaagatggagctaacggccttagcgcttcgaagtgccgcccagaagctccgcccttatttccaagcccacccagtggtcgtgctaactgaccagcctcttgtaacattctgcacaaaccggacttaaccggaagaatgcttcaatgggccatagagttgagtgaatatggaatcgagttccaacccaggttgtccatgaaaggacaagtgatggatgacttcgtgctggaatactcccgaaagcctatccagcacaaggaaccaagtgaaaaagagtggtggactttgtgggtcgatggagcctcccgggcatcaggatcctgagtagggctcctattgcagtccccaacaggagaacatctggagtaatccatccggctggggttccccgcctctaacaatgaagcgaagtatgaggccattctatccggattagacctcgccttggctctatccgtctccaagctccgggtctatagtgattcccaactcgtgataaggcacgttcagaaggaatatgaagctaaggatgcgcgcatggcgcgatatctgactaaagtaagggacaccttacaacgattcaccgaatggacaatcgaaaaaattagacgaactgaaaatgaacgcattgacgccctagcaggcatagctgtttccctccccatcaaagaagccatattattgcctgtgcatttgcaaaccaatccttccgtcacggaagcctccacttgcaataccattgaggcaagccaagcagacagccaaggctggatggaagtcatcataaagtacctctgggcaggcactctgcccgaagagcccaagtaggcacacaagatccgggtgcaagccgcacgtttcaccctgattgaggggcacttgtacaagcgctcctttacaggtccctatctcaggtgcctaaaccactcagaggccctgtatgtgttagctaaattgcacgagggagtatgtggaaaccattctggaggacgatctctggcgcacagggcccattcgcaacggtattactggcccacgatgaaaaaggatgcggcagcctacgtcaaaaaatgtgacaaatgtcaaacgcatgcccccataccacatgtgtcgtcgaagacgttgaatccaatttcaggcccctggccctttgcgcagtggggcatggacatagtaagacccctaccaaccgcacccgcccagaagaaattcttgctcgtcgccacggattacttcagtaaatgggtggaagctgaagcatacgctagcatcaaagacaaagatgtcaccaagttcgtatggaaaaacatcatctgtcgctttggcatcccccaaaccatcatagccgacaacgatccacagttcgataacatcgctttccggaatttctgttcggaactaaacatccggaattcatactccacaccacgttatcctcaaagtaatgggcaagcagaggccacaaacaagaccctaataactgccttaaagaagaggctcgagcaagccaaagcaaagtgggtggaggagctacccggcgtcctgtgggcttatcgaaccacacttggacgtccgacaggaaacactcctttcgccctcgcatacggtatggacgcgatcattcctactgaaatagggctacccactatccggaccgaggcaggaagacaggatgatgcaaatgcggagttaggaagaaacttggactgggcagacgaagtaagagaaactgcatccatccagatggtagactatcaacaaagggcatccgctcactacaatcgcaaggcaaggcccagaagcttcaaaaatggtacgctggtccttagaaaggttttcgaaaatactgctgagataggagcgggaaagtttcaagccaactgggaaggcccctctatagtatctcagacaagtaaaagtggagcctatcatctacaaaagctagaaggaaccccattggtccgaccatggaatgtatctaatctaaagcagtattaccaatgaaagagagatagaagtgcaatctgaataagtatgttttattaaatacttgtaaaaattgtatacaaagagttctccgaactataaaatacagggagaagataacagtaaaaattacaaaaagaaaaactctcattgggaaggcttgccgcgcagctccttctcctcacccggggaaatcgaagggacgtcccgtttgctaccatgtttcttcatacagcaacggtagccgaagaagtacatttcgtctacctgcttctgatagtccgcttcaagttcctccctttccgcagcaaactcagcctccaactcttctttttgcgctgataaacgcaactacaaatcctctctctgttttttctcaatagacacctctgtccggagttgtctcacttcccctctcagctggaccatctcgtcctccgcctcaagcaggcgggtgtctgtagattcctcccgactatttgcctcagctagctctatccggagagcctcgttgtcatctcgagcatcggataaactggcttcgacctgctccaatctcaagcgcagttcctcttcactgtttatgcactgagagacgaaggccttcatataatcagcaatccgcagcaggtcagaaaaaagatcacgttgttgagccatgccgcgaataccgctcaccagctgcaaaaaaaacccacaaacaagaagtgcaaaaattacaacccatgtgacaaacacatcagtatggcgagaaaaatcaagaagtaaactataccgtttccgccgcttcgaacatttttgctgaaggcacagcaacatctgagccgggtggaatccgtttcagcatctctcccaactccgcatagccgaaagggctagcggagatgcaagccgcatcatcaactggacttccccctgacgaggcattagggagtgactcctcccccgggtccggggccccatcattctcggccggctgggtctctccgggtgaacccccatccgggaccaccacgtgggcggttgggttctcttctaccatctccgtctcactcccctccggatgatcctcctagacggacgagcagctgacttcgatggcttccagaaaacgatcctgaagccgcccgatgaggccaaactttaagtcacgcgccggacgagaccttcttgtagctggccccttcgccggtacaaaggcaaggaggcttggctatcaagaaggcaaaccctgactttctgcccccgtttcttccgttcggggcgctgtaggaggcaatgcttcagcacaagaggccccggctgcatccgcttccggatggggagggccgggttgatttattgaagtcgcttcctcagccaaaagagtcagccatccagccactagcactgaaggccccaaatggtttagacccgcgagacgtccggagccgcttgaaacagagggcaagacggaggggtctggctctcttatcgttatttcctttacgaaagttagaggtggtattacaacctcccttgggggagttgggagttttatttcttttcccttgctgagaaccaacttcttcttctttttcgctggggcgccagcaggtggagaggacgtcggacgtttaccaccaggagccttctgcaaaagtccttcttgtcttttcccctcccagtcgttaagacgggctttgcatgcccgggcgtctgcctttcgcgccgtcgcgtaaaaataaagatctttgagaacaaaatgctccccagccaccacctttttgggcagccgcctcggaagtatgttgagcacgtatggctggggctcctgggtaacagagcggagattctgcgcgaagagaagcgtttcagaacttctctcggctgccccaatctcaaaaagcttgttcaaccagtcgaacaaggctttctccacccattctaccagtttcccatttttttccttgtctgcacccaagaaagcaaagcatgtcagccacctagcaatgctgacctaactcgcaacctcggaaggacaggaagtaacttattcatacctggcacctgcaatgaatggttgggcgcgaactgcctatccggatgcatcgacaaacccgcccataggcccttgaccagcacatgtcctttggcggcccccttggtcgagtccggaaggctagtcaccaactgaagggatggaaggcaggcgacaaaactgtggatatcattcttccccttcttgatagagtagataaaaagaacctccaatagtgagaggtccagattgaacagcatgctcagaatgctgcaccccatcagcacccggaccatgttggggtggatgtaagccggaggaatctgggtgaagtgcagaaattccttgaacagcgacaagagggggaaccggaggccagcattgaattgctccttggtaaaaaagatagcgttgtcctcagttttctcggtcgatgcagcctctccgtccataagttccacgaacaccacgccattcgggatgcagaagcgttcgcgaaactccctcacattcaacttatccacggatttctcagcatgagtatctccggactagctggatgaagtagcttccttgttcgtagacattttttaggctggggctgaaatggaacctgcatggcagaaatccaacagtaaaaaacaagcacccggtcccacaaccctaacagcaaaaacgcccagaaaacctaaacatcaccagcatccccatcccaacccttggctctatcacaaagaagaatcggtagcccacaaaaggcacaggggggcaacagaaaccctaaacacacccagaacacgatcaaaccccccgaaaaaagccctagaaaccaatatcgactcccagtcgcaaagaaacttgcctagcaagccagaaacaaccaacaaagcaaacacaaacgagaagaaggcagagatagagaacgtaccgagtgtaaactggcgaatggagatgaaatccgcagtgcagtcaccgtcacgacatgagtattgccagcagaaaaccctagagcttcactcgagaacgaagatacgcaaaaggtagaaaagaaagcactaccagaaaaaacgcagaaggaaaaatgcaagaggatggcacagtctgctatttatagagagacagcccctcggtatcccaaacgttcagctgcgccatcattgaaacgacatgctgcttggaaatacccagagtcggcggctcatcataaatgtttttctacctcttcgcccccgcgcaccacttggcccaatgagcggaaaaagtaagtctcagtttcaaaaaaaaaaaaaaattatttttaacccgctcattttgcccggacaaaatgggcaggttaaaaggagggcattgtagggacctctccccctagtgacacgtggcgcacatttctatccggattagctccatccggatttcccccaagaggacacgtggcgcgcttcccctatctggacttcctcagggagaggcacacggcactcacaaacatcacatccggacgaccgacatatcctatccagatatgtttgtccggatcgttgactaaaagtaagcaagtcttactacatcattccgacatcctaccacagcccactatccgtcgcctacaaagcgaaaggacagggttggtggcaagtcacctcccacgatccgccgcctgcagagcgaaaggacaggaatgatggcaagtcacctcccatgatctctaacagccgcccgtagggtgatgatggccctgccaccacctagaggcatcatgacgaaccaaaaagtctttccatcattaaagagggaggacaagcttctgacactatataaaggaaccttcacataaggaagaaggtaagcttgctatacctagtaaaaggtcaactgattaatctctccatccatggctaacaaaaccatcggagggtgtgcccggaccctcgtccgggcatcttttgcaggtgacgactgaaccaggaatctatattggttgagatcgtgcgtccatccatttggcaactacatggatcaccagggacgcgaggcctcaacaatacttacactacgaatgtgatagaatatttcattatatgataaataatactataaaagataaaaattagatacgggtctttttgtattttcaccctaaaccataaatcattttacttgattaggtgtctctctcactttttctcatatcttcatactaggtgtttctcgctcttcttcatatatctatgtcatctctctcgtaactttttaggctcatgacgtaaaatatttatagaaatattttcattcgttttccttattttataaggaatctaattacaattacatataaaattaaaaatattatatatgatactcattttataaaaaatatatatattctaaataggaatttgaaacactttcccaatacggaagtagacttcttttaacatgtatcttaaatctataagaatttaatggggtttataatgaataatatctatagactgagtcatacattaaaaatgatatcatacgaatccctaccctatgtggaaattttgtttttttgatcctataagaaatgtctatttattgaggataattatgatatcttaggtttagtaacacgtttcaaacactatacacttaatatttcaatcacgttagacctccatagactatttcaatctctcttaaagtagtgagagccggccattacactgccctacgtacacaaatgcacaccagtcatgacttcgaacctccatataattcaatctctctttaatattcagcagttccatacgccatatccatgtataaaaggacaaaatatatgtacatatcgttgacatattttctaatggcatgtatcaaatgatttaacaagatattttccattttttttttccttcgatgctcatttgaaatgtggctttagctgttgggacagttaaccgtgttcatccctctcttatttttccttaatatagatttagctgcatttttatgaataaaatgttttgatggatggctcatctgaaatttcggaaagatcaccagtttcgtatcaacttctagcacaaaaggcaattttcttcctgaaagatttagatacaagcatgacaaaaaagtaggata

SEQ ID NO: 13705 - DNA, 1891 bp, Vitis vinifera
  Intron number 6 from transcript GSVIVT01037850001 (locus G SVIVG01037850001) derived from phytozome v7.0 (chr-ID chr3 ; pos 7141002 to 7142892)
cctccagtatgaatcaacttctctcctaaaagatttgaattatttctttttgtaaattttatttgtatcctagaagttgtcaagacaatgctgctttctgcatccttgaatcattctttttcatgactcttcaagttacctgaaatcttgttgctgaagccaggaaagctgcatagttgccacttcagattcaggcgacttgcctgatgaagcagtctgctgtactgaagtctggaccaactttctgcttattggcttgctgtggttgatggcttagggcttaagcagtctcccagggtctggagggaagtggatcatcaggatccctaaatcctaatggggggagaattgcctcttcgatcccactccttcacattcaaattcataatttttgaaccctatctttcaaataactagcttttaacctggttattaagattgctttgcctagaaagcaaaatatgttgaaacgattggagagagtgaggaagatgtttataacccatcaaaattttaacaaatgaagaaaactagtacaatcaaggtcttggagaataaagtaggtaacagcagctagaaattggagtaaatgcaaaggaatgtggttacatatacactgcatgatgctattgccacaacatgactggaaaactttgagtcctttcagaagcactgattttgttgtattagatagggaaagtttagccatgcatccagtggtcccaactgctccatccaatccatgtaggacttcaaagcaataggcatctccaccgtggaaccactttggtccaaatcgctgtccaatatatggactgccaaagttaatttggtaaattgggtttattatagtttatgcatcttttgaatggaagtaaccatggttttcaagtgtcttattttatttggctattttcattttaaccccatattctctgtaatcttacatccttgagacttattattctgaagttcctttcattttgattttgtttgaaagaattttttattcttttttatgccaatatactgtctttttcaaactttaaacacaaaaagggggtgaatgatttctatattcttggtttctcatattagtgtacatgcccctcaagctgcaaagaaagttttgagggttttaacaacagcgcattggactatgactaattttgaaatctgaaaaaggtgcatggagtatgatgaattttgaatgaaaaaagatgaataaataaaaattgatttttttttttttttttgctaatcaaaaactctttatttgctataaaaatgaaaaaaataaaaaaataaaattgttgagtccttgcctcgattggaagtagtggccttcaaatcttcttttggtttagtttgttgtggtttcctcttgctctaaatttcgttacacctttttaagcttcctacagctttaccatttttttatacatctacttcataatgagagagtgcattattttggtcagcatcacatattaatttcttttattggatataaccatgatgataatcattgtttttgtagagttacatgattgaccattttttatttgggattttcttgtttcttaatgatattaaatagccagaaaatgctttaagatttgtttccctctggagagtgttctctccaaatgcccattgagattaggaactcattttccagtaactatggttatggcagttgtgccaatctaattctctatttgtactagtggagcttgctaatttagaattgtagttgaaatagttggactatgtgttctgtatgagttcatggaatatagcacatctttgttctctccttccctattgaccttatttttttggctgaattgcagcgaaattatatctacctaaagtaaaccgatcaagt

SEQ ID NO: 13706 - DNA, 6960 bp, Vitis vinifera
  Intron number 1 from transcript GSVIVT01020475001 (locus G SVIVG01020475001) derived from phytozome v7.0 (chr-ID chr1 9; pos 18873900 to 18880859 reverse strand)
ttcatattaaagtacaaaatcaaatatctatgatatgatccatcaagggatgaaaatttggtaaaacccattactgataaacaagctcctctaccatcaaatgtttaatgagaactttcaaaagggcctcttgtttttcggagactgctaacagtatccaacaaattgagaaaaatcaatatcaaccaaaatccccaaaatacacactatcacaatattcccctcaataaccatgaaaacagttcaatgttacatgtatgaaaccggtacttctgaagaagatgcttataattacataagcgatttgacatggaagaggatatatatgaagatcgagtagtagagtctcccttcactcaaacttttattggaattgcaatgaatattcctgctaggatggcgccctagtgcatgcattaggatgcagatggacatggtattcatttagtacaaagatgacatttttcatggaacaggttttgcagcaattgaaagatatatcaggtattgaagagaagggggtaggtgaaagataatgtgtcgcatctaattgaggagagagcactagcacggagaaacaaggatttcttgaagggttggctgctaaggatttcttgcactcatggatgtgagcaaggaaaaaaatcaaagagatctctttgttttccctgttcttttcattctcctggctatttaaaaggggtctaacctgctccttttgatacttttaacaggcacaaaatctagaggaattgctaaagcaagcactttgctactgccattgaacatggacaaggtttggaatccaagcttctgttgagagtattcccatctggtaattactatcattcaagaattgtacactatcttctgataccatcaatcatgtgttcagccgaagttcattcatacctaagttgttagctaagtgaggatccatgggaaaataaatgaaaactaggattaatctaaacttgtgaaagttttgaggcctgaaattcactgggcataataatctaaaatttgcagaatagaggaagtggtcatttcaaattaggtactgatacaagatgaaatgctactacataattttttgtagaatagtaaacaaagagtatctttgcccttgaaaacaagaataaaggaggtgaatccatgagtcttggagaattaaatgaatgaagaggagtttggaaaccataaactccaactggtagatgttcaatacaacaagaacatcaaacatagttgcaagtagaggttatgacactgcttgttacacttgaaacttcattagcagttctccttcattaccacaacagtttaactagcattaagttatatttgatgccaatgtatcagtcttaaaaccaaaacatagttcacaacatacactcataatatcttgcttaattacaagttttctatttgcctaagaaatcaaaattttaatatcaggcaggactcaactagagtttcaacagcttggttgcatacccatttatagatgccaaattatcatatatttgagaatattccgaggctttagtttcaagacttaaacttcaagaattacaaaaatctttacagagaggacttaattatttggacgatctttacaacaataataatcatcatcatcatcatgaagattgatgtttcagttctaatgtttcagtcagttcatgcaccaaatcttgtctcagtttcacatggagccgacctattcatccacattcacatttgcttgagcaggatattggtccaacgcattaaaatactgccccaaaaggagaatttctgccttatcgccctggaatcccaattatttaattgattttttttagaaacaagtcaagaaaacttctgcaagggattacaatcatatgtgccagattttcatggagatcaccatttcatctcttttaaaggctggatataccattgagagaattagagtgcgtttggaaatgttttttttctcaaagtgtaattaaataaaaagttttcctttctcatagattaaaaacataaaatatgaaatttttgataaaatggaaaccactatttggggtgggtaagaatagcttagagattgtatgcaataaaaatcatgaagttagctcaaaatgggaatgaaattttcattccattctagagtattaagtgcaaccaaatattgaaatgaatctttattaagattttcgggataccattccattctcagcaaaggaacagtcttattaattctaaagtaagtgttaagtacctagaggagaacaaaaataatataaaagataatttttttaagaaaataaattataaacatttatttatcttcttttccctgattttcttagcaatcaaagaagaaaacaattttataaagtaagaaacataaaatatgaaattaataaaattgaaaacattatttagaggtggaatgagaaaaacttagagatgatgagaaataaaaataatgaaattaacataaaattggaatgaaaggctcattgcagttcaacctattaaagtgtaaccaagattagaatgaatcttcattaccattctatcactaggaaacaaacacaacacgaactgaatgcctcaagcaacatcaaccatccattactttgatttccagaaactagaaatcctagattcacccaggaaagtgtaagaagtgacctgaagtaaatagaaatctttagtgccagttggaaggtgaggttactagattagtagtaatctctatatctgagcagctcttgacaatgaaccgaagttaagcctaaaaaataactcttgcaccctatagaaaatcaaatttcattttttgacccaaataagccaaacaaaggccaaaggggaaaataaacacaatcaaatttcatttctttggagattaaaaatttggggaaagaggtttggggaaaaagactcagtccctagggttatttctcattagtctgtgacatgcaatttcgattcgagtatggcaaggagtttggtgagcgagttggttgttcatcagcaatctagttgttgactcagttcctaaggttttatgcctttggcagaagagttcaatggccatcactagcaacgtctctcaacattgagggttaagaagagtgaataaaagaaaaatgtcaaacaattagtaggaaaacaaaatcataagttatttgaatattctcaccagtgggttctcaacagtttgaagtaagaaagtggctcttagtgggttcttggcagtccaaagtgagcagcagaggtagtggttatatagtagctctattgagacatttatagtagcagctcatttcttctcctaactataagagctcttatagcaacaacctatttcttccctaagctataagatctttttatagcaatagttattccttcccctagctataatgttgctttggttgtggatttttcccaactaaaactatgtcattatatcttacctttcttgtagtgtaatgtagatcatttatatatagatataggaattagataagtaaatccttgtggagatcacctaactgccattcatgttcactagttcttttttagtaaattaattttttattttgggtgctaaggactatgatcagttaaaaatcaaagtaaaacctgaaattgaagtgtgaaattgatttttcaaacagatttcaaaattaatcaaaacatttaaaattatcttctaattgttgtgataatttcactcaaagacaaaccaaaaccaaaaattggcatattgcatgtgtcttctaaagggggacaacttgtcttcataatcttgctttaaaaatgggttgaatacaggtgtaacaaaaagctaatcaagggatacttagattgcttcataataagacatcatagcaacttaaaagtcaaacaattgttttcttggatgttgtttgctagttcaataaatcataagaaagttgaaaaaaatagggttttttttttgctcttttctttgtgtcaagttgtaatataagagtaacctaagtaaagaaatggaaaactaaaattatttgatggagcattacactaggtaaggaagttcattatgacttaaacttttcaaggttttataaaatatgatttgaggtgacagcaccaaacttactttgagtatatccatatttaaatctaataagggcttaaatgaatatccttaggtgagagtctcaaaaggattaaagatatccatggtcaagcagttgatgagcaaccaaaaaatgtatacgaaagacattgtgatagcatatgataaggtgaaaatggttggttgagaaatttgttatattttgacaattattcatgtgtatggaattccttgtttgatattacttgaaagctttaaaatggtgtttcacgaattccattttcacaacttatttttagatacaactaaggaatactaagaggagaaaaacttgatatgatatttgtaaaagtgttgtggttgaagtaagttgaattttgctatttatcttgattgttgtatgatgaatactaagatatggggatgaagtaaacaaatatatttttataaatgtacatgcataagataaaagaaacatatatacgagtaactacgtattgttcaactaaggataaaattagaggtctatgacatatcaaggttgctcagtatatatatgaaggttgggtatcacatatgaagttgttgtctccatgtgtcaacattgggcgttatagaaaatattatacaatgtgtaaaaagttgagaaatctactttgttatggtaagaggaaattagagtggtgtggatagaaattaaatattttataaaataacatttctcgtaaattattttatcatacaaaacttcttgataaagatcaaaataaatgagtgaaggaaagcatctattagaagatttaatttgtgtgaataattgtgggtttgatactagtttgaactcatatgaactcaaacataaagaaaatatagcaaagggtacattgcatgtagagtgatgtcccataactaaaaatttttagttcataaaagttacaaactataataagaactaaaattaagttttaccttaaagttatggataagaagcaagctcatgacttgattttattctcattattgtctcaaattcccttctaggtttcatttttaagtcctcaatattttttgtattatagtagatattcttataagagaatcctcctacattttcaatgaaagtattttactataagattatcttatagaaataggttttgtctatgattatacatttagttctccatatgaatattcctatacaatgagaaaaatatcgaaagacattttgattgaaagaaagagtcattttggatgtaacacagggcttacaattttagagctctagaattttaatttccttgcagaataatagttcttaaacattttccccatggattttggctttaggatgaatcatgcatatcatcatgtccattttatcatttttgcttttcttttcttgtctttcttcttttaaccattattttattttattttattttatttttattttttatttttatagtggtgataatgttaatgttaagaagaaaaaaaaattaatttgtggttttgcccaattacctaaataaatgttgtcatcaacattgaaaattagagggagactaccgtcagtgatattatgtgaaaataatattgaatttatgaagaaaatacgtaggactattattttttgcttgggtcatgagatattctgtgatgctacaaaaggaaaaccattggcaagttatggttgaaattgaaaggtttatacatgcaagaaatgtatgattttttttaaacagattacgaaataatgagttacaaaaatattaatgacaaataatttttagaaagagttcactgactttgtcaaggttgagcacttgtcctaaggaggtcatggtatgtttgtattcaaaccctagtgcccatgacccactaattagtactcattgacattgtgcttgttataaaagctaagaaccagttagcactgagtatataaaaatctaggaaattgtaccttgttctaaagagattggggagaaaccttaaagggtaagttgcctttcatgatcctcaatacctagtatcttgggaagaatcttaggagttatcagttgatattttctaagctacataaaaggagctttcccaggatggacatgtgaaataaataaataaataaacaaaaaaatagatatgaaaaacagtggaatgaaaaagcagaaaatgagataaaatggcgctcttccaaaactagtcatgaacagtttatcttaggtagaggaagcaaatacttaaaataagtgctccatgaggatgctcttaagctaatatttgagttttgtttgaaaatcacttgtaaagttgatgtcgaagagactaatggattctaaacattggggcctgcttttgtatgcatttttatagtgagtggatctttttggagttatgctacttgactatgagctgattcttgaagggataatatattttcagtaactgaatttattgaaactaattcatgctgtttagtagttgttgccttaattcgtttaggagttttactctttatttttttctagagaccaacaaaatttaagttgggggggaaaagatttgtgtcatgggtttttctactctctaaatggtagattctataatgaaaaagaacgtaaactactctcctcagtttatatatatagtacctaattggtctgagttcttcaatttcatgtccaatgaagaaaataaagttaaggtcaatctcaggagatcaataattggctctggtttcatcgatatgaatatgctctagtttgacattcttgaagtggattagcagagtgggattctctactcagctgattgccttttcactg

SEQ ID NO: 13707 - DNA, 10242 bp, Vitis vinifera
  Intron number 1 from transcript GSVIVT01030994001 (locus G SVIVG01030994001) derived from phytozome v7.0 (chr-ID chr1 4; pos 20501118 to 20511359)
gggtaattttatttatttatctattttcattattgttggtttcttttaatcaatataataattttctattgggttagctttgtgttcaaagctctaattgaagttctgcttctggattatgattttttctaattttatttccctgattgggttgaggcatttaattatgatgttaataaagttgaggttgcttaattttgtgaaatgtttatacaaggcaaaagagttctttccttttaattttgggaatttgatgggttaagatgttggagatgctttccatatatacctcagaaagataaggatttgggttttttcttttctttcttcttttgcttttgtctgcctgtttgtaatgacgttattccatggccttatgatgatccgggtcagtttgcaatatcagggatgaacattctgagtatcattcttattataacctggtaaatgagagtaagcattaaaggctaatctcgtttcaggtatatgcaaagaagagagaagattggtctgtcacagaaaattattgtttcttaaagtatagccttttatttttggacatagatgttagtgaatctctggttagcggacaaactgatttttcttgctttatggattgaggcaatgattatcaaaaccagtgaaggaaaaggttgttaacagaaggattttccttcatgttagcttactagcaatttaaatattggtgttcttttggggatgtaaggttttccttgtcccacgggaagaatgaaattcaggttaaaaaagtgttaatgctgattaactggaaatacttgtcaagtggactttgactgctactaatcattaaggctgtctaaccttttgattataatgttaagatatttcagtgttctttattttatgagatggtatttcttctattggatgtgtctagctagacatcccaaatttatttgttgtaatctaatttctgttaaatcataatcagaggggaaaagcaattgtatgtcaaaatgcaaattttccatttctagcattgccaatgtgcagataaggttaattagtgtggtcaggaagactaagaaacatgttaaaaaattaagatatttgagtttgtttcctgaagaggatatgatctacaatcttttctggtcaaacaatgactgctacctaggagattcctgcttatttatttatttgtttattttatatgaaaattggaaataaaacttccagcttcttgaagattaatggatagattgcttatatgtcggaagtgtaaaggaatttgctaatgactacaccacaataggcatgtggatctgcttaagtagtttctacaaagtaaattcaatttgtgtaccgaatgtttgttgcatggagatgcattcatgttagatgaatgtaaaattctagatatttgaaaagaattttagatgggagatattgcctttctttgatatgcaaaagattaaatcaattaaaagtgcaaggaaaaaaaaaatgaaggcacacataagtatacatggtgtatacaagaactataaaaggccatatgaagcaaagaaagatgcgcccaaaaaaaaaaaaaaaaaaaaacccaaaaaaatctctctcccaacttagagcttagctagttaatgaagtctaaaatggacatagagtaatcacccatatacactcttaactaactctaagaagttatacataaaggactgtttgattgcttaattcacattgtcaatgttttaaaaagcttttctattcctcatggtctaaaataaatataaaggagctactctccaagcttttttcttctttttccaaataaaggatcatgccaactcaaaagaatgtttctacctgaggactttgtttcccactttattccaaatagggaataaatgagttgccttaagatgaacacctttgtgcaatggagaaagatatgattacttgtttcttctttttctttgcaaagataacatctaattggaaacttccatccctttcttttgagttggtccaatcttaagatctttccccatgctgcttcttgaacaagaaaaaacctccctcaatggagtattagaattcttaactgtgctcgaagggaaaacctccattcttccattagctagaagaagaaaatattgtcctctacttccctactaatagaaagaggagtagagagatttaattgagaaattgctattttttgatcttaaccacaaaatattgtcctctacttctctactaatagtctaaccttgcagtctcctaaagaaaacctcccgttcttcaagctcccaatcatggatttgtcttaagaatcaatggttcgagcagcccccctccccttcctgctcccacatctcagctacccatgcatctttaacaataattatagaaaacaatttagggaaaggctctctcaataaagagttgtcacatcacctagtcttcctccttttgatatatactctcttctatatagtaacgtttttgaaatttttcttccactgcatccaaaccttgaggcgaaactttgctcctaattgaaggcccaaataaacatgggggagggaactcgcccaatagcacaaaatgccaactagctcttccacattttgttaactcccctaggaccgggatcaattcacttttctctaaattgatttttaaacccaagattgccttaaaccgcatgaaagacaaggttaagtgctccaattggtccttgttggcatcacaaaggataggagtattattaacaaactaaaaattggaaattttcaataccacacctcttctcccattgactattaaacccttgatgaagcccccttctttttccctatttggaatgctggagagttcctccatagtcaacataaaaaggtacagggaaagagggttacttgtctcaagtccctagaactttggaaataacctaatggggtgccatcaactagatagagaagcaagctatagagatgcatcatttactccatctaatccacttagatccaaaatcgccatagaaaaacctaattgatatggtcatgtgcttttttgatatctaacttacaaacaatcctatagatggaactcttcaaccttgagtcaatgacttcatttggtataggaactacttccaagatttgatgaccctcaacaaatgcatattgaaaatctaaaaccacttttcccaccactcttttgagatctttagccaagacattttttagaagtttgtatagtcccctcactaagctaatttggtctgaagttttttaaatcttctgccaccctttctctggtattagcacaagtatggcatttaggcttctttcaaaggacccatgctcatagaactccttaaaatatcccattacatcacttttcatgaccctaacaaaattgtcaaaaagccatggatacaccatccaatgctggcgctttatcttcacacaagcaaggaagggcggcataaaccttctccttcagtagtcctaaatctattatgtccaaagattcaaaggccaaccctttgatactcggcctccactttcttagttttgaaagaatattgtggaaggcattagccaccccttccatgatatttgcttctttcaatagattctcccactctttggatacaagaaaatgatgaagttttgaagcaatttgatcatccaaacctccactctaagtaaatgggccaccaatgaaaggaaggtccttcaatcgaaacttctctaagatctttgaaaaatgcctcattgcttatgagagttttgagcagttcctccttttcatagtacatctaacgatttgaaatctcctcctatacaacaaggatgattttaaagcttgtagcagccaacttttctcaaaaatcctccttcccctcactttggaccagcctatacaccccaatgaatatacacacaaaatcctcctcacaacttccgaaatgacaagagattgagaaatcctccttctccatatcaattaactccaacaccctattgtccaaaaaaggccaaaatcccccctgcttgtccctttgctttcacaacttccaactccaaaaacctgcccacacctagactctcctctccttctacaatgacatatgttgaaccttttttttttgtaaacgtacaagatcaaccatctaagatctaataagagattttatcgtttttcgcttttctatctcattgatccctttgacattcaaagataaaatttgcaacttcattagtcgacctttgctagttcccaactattattcttgttcctcctacccttccttgatgcagaactatagttaatggaacactctagcttcctcaattccttctcaaatttggatccaacacttggttttctttttaattccctgacttaaggttttatctccttttctcagctccattctcagaagggctaaattttttcttcaaacccttttattggcatccccatgaatttgctaaaagaaacaagcttgttgaaatagtccctagagaagtaggcctccctattagacaagtggggatgctttccctctacaccaattgtccccccctttcactctctttgtttctttgtttgtggacactaccaacatgccatcattcaaaactatatgcaaaggcccacttgttacgccattgagcacattgaaaggctcacctcttggctccctctagctagacaagcaactgcccacctgttcactgaatgagagcccatagagagagaagaaggaaagaaagcccaatgccttaagtaagaagaagaaggagggcatgtacttgggaaatggtaggctttgaccaaaagagccttgttgctaagagtagatctcttcaagggcaccaaagcaagagctgactcctttgaagcacaaagatggccatccctatccttcactgaagcgttttcgaccatcgaaggaatgagcacaccatgctttgtaattctgtagtcacacgtatgctttatcattctctagtgaatgtatcacccatgcagtgtcctctactaatggtataatatgtattgattttttctttccagctgcattcattgattgtaactttcctgttatcccttatttcttttgtatgtttacacaaataataataataaaaaatttctttaacatgttaaaatttttatcccaaaactatgtaattgacaagtcttttcagaaagctttgatttactttatagttgagttgttgtttcatgcatttgatcttatagtccaccgacatatggagattgaagtgtgcgtcatggattgcttcatttgtctttgaatgaggtattaggtgtattttgatagttgggattagttttatgcgttaaaattcatgaaagatgtttttattaattttacgtgttttcttttttattttttatttttaatagtttttaaaaaagatgatatatatttttgaaatagttatatcaaagatgatatctatatatatatatatatataaatagtttctattttgtgaaagaagattttctattttaattggaagactttttggaataggaaatttttttaaataaattgattttagaaacttttcagtcacaaggaaacccataattttttaaaagtttatttaaaattgaaatgatttaaattggttgaattgtatttagaaacaaatttctttcggaaagaaaattcctagctaacttattataggatcattcatttttcaaattcttaaaattaagagcttcagagaagagaaataagagatttctccttgcataaggtttcatactctattgtaggatttctgcttgttcaagatcaagtccttatatggatatcattctttgattttgaatccgtgtccaaactctcatatcctataatttcttaggttcttgttagacgaagagtgtgccttagaggagttcgaaggtgtgctttgggagacataaagtgtacttcagtgggcttcggaagtccactttgatagactttcataggggtttttgactaaaaggtgaacaagggcataggtggcattttcatgattttgaaacatggaagaagtaaggtgagagttcaaggttacttctcgaattggtagcctcaacacttgaattgttggtaaaaccttgcaattttgttttaacttttagtttgagatttagcaagtgagagcttgtggtttttccccttggtaaaaaacttttaagatttccgtgcatataccatacatccattcttctttatttttcttgcaatttgtgatcggattagtcactacatgcttggtgtagttggatggatgaattaattggaaaaattagaaaggttctaaatttggaaacatgggtcatcctcctctcagtctacttgagttaccaacatctttttcatatggaataagccaaacttgaacaatagatatttggagggttgggcttgatacaaatgatttcatacctgtgttctacctgtaaaatatccaaaaccattgagagaaaaatattagggtttagcatggatacaccgacctagcctgttgaggtccctacttgcgactcaatttcatttttgaggcatttatttcatgaaccaagaataggatttttatcaaaaccaaatgaaaaaggtatccactttttgttttccattttcatttttttccctgataaaaatttgttctcattgatgttagaatactagacactatccacatcaataattactctaatggatgtttaaatcaagtttgaacctgatttgttgcaatccaaatccgaaatactcacacactttgttcttgctattaattttatttttaatacaaaattgtaactcaaaaattattgtgtaatgtttgatactatcaattgcattgtggttaaataaaaaagatatgattgaaaataacaaattcacgttaataatgttttatataaaatttatttatttgtggtaggccttgcaaagcattactattttccttttgtcattgaattaattattttgattaaacttaattaatttaatagtgtaaagatgaagtttgtctatatttctctcctttgtatttttttccccaagtgggatttgacacttggttagtttttaacctttttgtacatctttgaaggattgcacatacttgtatttatctttttaagataaatgaagatgcttgtttcttttccaaaaaaaagaaaaaaagaaaaagcagatggagtttctctatcttttttttttttttttttaatagtgtcaagaaatcaatttccaaataaaaatagttctttaaatatttgagtctttatgtgaatatcatatttgaagaacattgaaaagggcttaggcctcatgcctctagagagtgagacacgttttgtcacattttttattctttttttctactttttctgataagcaattgacaccttgtgtcattttttttacgggtaataagaatatatatatatatacaaaaaatatgtgaagtgcctaaaccaaaggcacaacaaagtacacataatgcatacatggtcacttgaaaatatgcaagaagaagaacgaggagaggaacaaaaaacaaacccctctcagcctctctcgttattttgaactaatccaaactacgaaacccatcatggtcagaagataatcatttattatttataaaagatagtttaattgcttgttctttttgttttgaatctttaaagtctcttttgtttctttccatccattgtgtctagaacagacacacaaaagtgaccctccaagcttttttttccagttcttgcccatggtggaaccatgttaggttaatgaatatctttatattttcgaatgcatcacccaaaccacacaaaatagagagaaaatcaattgccacgggatacatgctataggcaatggagtagcaaatgattagccaattcctcgtccaatttacacatataggatctgtttggcatactccatccccttcttctaagttgattgatatcaaaattttgccccacaatgcccccccaagcaaaaaaagtcacctttctagaatccagcgattccaaacacagtttgcgggaaatgacttacttgttccttggactaatgaaaggagagggatttgatggagaacttgtcacccttggaatacttctactccaaacaatcctcctcactcctaactaataagcaagcttggagtttttagagaaagtccatcactccttcaagctttcaagaaaagtgagggctctaccaaccactttccccatactgctccccaatatctgctacccatgcatctttgtttgtggctaaaaacaaaaagacaaaaaagattcttcgaaagatgaaccatcactccatccatctttccaacgtttgttgcttcttccattgccaataaagaagcgaactttgccttggattgagtctcatgcttttctgattgttttccacacacccatcccataaccatttctcgcaccatttgagaataggttctcaataaacatgaacaatgtgacattttccttgttaatcatcttgactcaaccaagcctttggtacctgctacttatggttactaaagacatttttgccattctgccgtagaatggcaagtaccgcatgaaatcataggtcatctcactcttagtaatgactttggcattcattttaggcattatgaatggaatttattgttgcatggtttacaattggttcctataagaagataaccaccttattgaaaatttttagtatatcaaaatgatacccccatctcccccccctggaaccatgtctttgtgatagttgaaaggcacctccaattaagaaacacaaccattacaataataaatgagagaaaatttatttttgctaaaattgtttagtaagggttttgtattgaaaaagctttattagtaacttggactccgggggagtgaattatcatgaataagtttatattctagatctagtaattttttttttcttagattttatgttgatatcatgcaccctaccccactaagaaagcaatcacctttgcaggaaaagtaaaagaatggacacatgatacgtacgtagagacttgtaagtatttctaccaaaagggcaaaacaacaggttttcacatagcaaatctcctctaaaagttaaaaataagatacaaggtgaggcaggagcatttgagaattttgttaagttccaaccaccttagtgctataaaaatagaattgttttacaattaggaattcactagtttatatagatttaggtttcatgaactgattaggcttttgttagttttctgttttatataggcttctattttatgttttcttattagaataattcaatcatgataagtgctgttttactatcatactgaggattaggattaactttcttaatacctaggacctagacaatgatgtggttcaacatattgaagttgtgtctgctgtaacagggttagtattaaatttgtgatggaggtagcttgtgtatatcaaagtgctcctatctcatttaaagttgaggaaccaccatttatttatcctaatttatgagaagattcttatagaaaaacctagtatagttacttctagttaagcttcttaaatggtcctttttttacgttgttgctctttgtaggccagttttgttggagcattagaagattacaacttaccattgcaatcaattgtatcggttagttagatatatgtgtgctacatgctaaaatacatatttcaagtcctgggctatcaaataatgtatcacatactttatgtggcaagaattattttttccctacatatattcttagtcctttttttatatgcaattaagtagtatgcattgaaagatgcctaacaaaaagggggcgtgagcctagtacataagaggtacatggcatgcaccaaggcctttgtcagtcaatttggaactttgcttattttacatgtgttttgcttaatgacaaactcttcaatgagagcttgagatctggaatccaagctgggttgcacagatacaaatttccttacatgagatttagcaatattcttagagccatatacagattcttgtaaacagaatctgatttttattagaaatgttagagatgaaatagaaccattttttatgttgttgacagttttatctcaatgcctgagtctggtatatatatgatttttccaggt

SEQ ID NO: 13708 - DNA, 2014 bp, Vitis vinifera
  Intron number 2 from transcript GSVIVT01033459001 (locus G SVIVG01033459001) derived from phytozome v7.0 (chr-ID chr8 ; pos 20508394 to 20510407 reverse strand)
atcacgcttctaggtattttctttcactttctctcgtttccttgccttttcttttctttcttaatacgtttctcgttttcgttcaatctttcttgtatttctttttctgttggttgtggagaaaaatcgggaaagaaatgaacactaaattttgaagggcatatttattttgtattttggattagggaaaccaaagatctccactgaaatgctgtgagagtttttgtttcttggaaatcaaaatatcataggtcgtgggattctagattttctttctgtcttttctttttgtttttttcttggcttttccccctatttctcagcagccctaaaggagggtaatagaacaaagaaaagaaagtgcggtggttggattaatgtattgcttgaagcgttgattatatttgttttggaaaatcaagacaactctctttgggatttggtttctttattggaaggaaacccggttgttttaccctttatttttgggaactgacaaaacaattcaggaatcagttgatatatgctgtatcaagtgattcatttctcaattgcaatattattcaagtgagcattgttttgtagtcactttttcgtatagttgcagttaatagtattcaatgatcaaatgatctctttgagtctagttagatggtccattgtgattgccattggtcatttttggaatttggatatcttagttgatatgcatggcatagttgttaaaggcacacgtaaagcacttctaggcccaaggatcaaccactccctagttataacatcttgcttgccaagacgtgcgccttgttggatagatgtatcctgtttatttatatttttccttttttaacacttttattcttaaaatttgtaattgtatattgaattttatataattttattactttttggttgaatgcttattttaaatgtttgaaatcttaagctttttgttgcttggattagattttggatcatattttatggatcatatttcaggcgtgggagattttggtgccttaagtgtgccttgcaccttttaaaactatgattcatggaatttggtagtttgaactccttttcttatttggaaactccctcattacgagtactgtgaccctcctatcaggaacagggatagaaaaaaaaaaaaatcatattgtgaccccattagatgggttttgggaaaatctttaaaagcttgaaatgggcgcttggtcagggttgcagttatggtctacttctgctctcatttccaaatgtcctcgtatttgcaatttgtaatagctcatgattccaactgattcttgatgcttacatgcaaaatttgtttatgtggaaggtagcatgaccaactagatgaggtcaattgtttgccatcatgataaatcaaaggaaaacttgtctttgtaatctttataagcattttattttttggatggaaagagactacaaattatagtatctatgaattctattgaaagataaatcataataatcttcaaattcaaactttgtaacaactctaggaaaatagactctatactgcaaatttttttttttcactaaacaatatgctattctatttgttttcctataaatatgatgacaattgtgaatatttagatcatgagttagcttccaaatatcctccattaataacataatagtactaggaatgttactctttttattataacaatctatcagtatttttgacttgctttcagtctttgggttcacaaacccattgtttttagaggttggcatgtaatctcttggaagtcatacatttcgcaataatcattgatgcattacttatatgcctactcgcagtcatttttataattccattagagtccctaataactcatcctaaacctttacaagcatgttgagccatcataaatattaatattacttgccctttatgcccatgaaatttctaagtagatggtgtattgttaataatcttgtgccggttatttgattcttcattctcagtgacaggaat

SEQ ID NO: 13709 - DNA, 7516 bp, Vitis vinifera
  Intron number 4 from transcript GSVIVT01013255001 (locus G SVIVG01013255001) derived from phytozome v7.0 (chr-ID chr2 ; pos 6186130 to 6193645)
aaaggtgcaatctataaatctgtaagcagggaggagtatataaaatttgtactaagtaggaaacctgttcgcaaaagtgcaataaatcttatgaagttggagaactgaaaggataaccatgtattgtcaaaagaatcgagttgaataaattacgtgatccagggtaatttaagaaatttcaatttgctactatagttaattgggactaagcaaactcattgctactaagtgactctttggagagactccaaagagaatccataaagaccatgaaactcgaatgttttgtggttctagaagtccctgacgagtaggtccgggaggattgggcattttgtgcaaaataaatgtcttgtaccatttttctattccttaataggatattcaactttatattgcttacctttagctattgtctcctgttttcttagtttctcttaatttcattgcttgtatggataggcatggtttgtgattcaattagttctcgtatgaatctatttattcagattgttaattagatatatatatatatatatattaagtgaagttgaatggcactaaatagatgaatcgttctaaaaatatcattgttatgatgttaagagagtgttgtctataaattttgtgtcattcatgatttgaatcttaagaacaattagttgtgaaaaaaattgatacaatttatcaacactattcgaatttggcacattttttgaaggcttaggttgaatataatgagggccttaaaaaaaattgacactaagaggatttgaacccttcaattacttgaaaaaattgaaaacaactcattcattaccattatattatttgattaaattcctattgatcaacataactcgtttaataaacttttttttttttttttttgtcaatctgcatgccatgaatttgacccaaattaatatatctaataattgtgttaattaacctaattataatcataacttatttaacttatagttgactcatttaaaatttgatttcgaataaataggtcaattggttaataagcatgttaggttgagatgttaattgtattagttgaaacaagatctaactcaacttgattattaaatattacttaactattaaatgagttatatgacatattacctgttcaataattaatgtgtttggtttatattttaatctgataattatttgatttgtgcttaagttgacctatttaggcaagtgcatgagttttgacacagcacaaacatgattcactaacatgaattgttgtcacccttaaaaacaacaagggattgatgtaaattgatgcatctctagccaaaagttttaaattgcacatattcatcctcttgctaggtatcctgcttggtattgaaaatctctttttaacaagtattagaataagaaaattatgaaatttttgtgtcaaaaactctttatatcatcaagacacatcaagagggtattggaaaaaaaaaaaattaccttaattactacattaactttaccttggtaaaaccaagtttcttaccataagattcatgaattcatacatgcatgtttgtggtttacattcatgtatttttatggcattacttagattcatcctagaataaataacttaaaaggtcaaattccaaaatttattacgaagaataagatctgaagaacctaaattttggttcatggtgagaagaaccataaagcacactatatcgaggctcttggtgcttttcttgactcacaattttttaaagcacttttcattcccatcattaaggattgcataaaaaaagagtgagggagcgaagatcaagatcattcattgtggaaagaaccataaagcactatacatccaggctcttagtccttttcttgactcacaattttttaaagtactttccatccccatcactaagaattgcatacaaaatgaacaaatgagtgaagatcaagagtgaatatcaagagggttacttggggatttttaaaccatattaaagtcaacattatatatcaagatatgttttcttctacatatgctaaatgtcatttttaagtctgatattaaacatcaaaatgaaaatttttaacatttggtatcaagaatcaagttaatcacttgtgtttttaattatttaaaattttgaagtaaattgatttttttttctcatgatacttgctcatagtgatcttgaggaacataaattctacctaatctaatttcttgacaaccacaattgctctacttcatcattcaaaagaatcaaatttattgttacatagcaattaatcaacaatagaaatttaatttagcaaagtctaactaatattttgaagcaatctatttttttttctttttttcttttttttgcacaacaaatctttatgatggttttgagaaaatttaccactacccaatacaaattctttgcaattagaattgttccacttcatcattcaaaagaatcaaatttatttttgtatcgaaattgactactagtagaaatttaatgttgcatagttaggttagtttggaaacttacattttttgtaccatacttctttatgatgattttgagaaacataactactacccaataaaaaaattttacaatcaaatttgttccaccaaatgattcgaaaaaaatcaaatttatcgttatatcaaaattgaccattgatagatatttaatgttgaaactgattttgttttttcacaccacacttctttatgaagatttttaggaacataattactaccaaataaaatttctttacaatcataattgcttctaaaaaatgaatgtggtataaattgagggtggtttttcaagtgcatatagtggcagtgacttgcgcaagtaaagtgggaaggagatttgcaattccttagaatcaaaattttgtcacaaccagaccacagttcctttgttgccaatatttaggagaatgagaaccccatactcctattaggatgtgaaggagatacacatagctttgaaaaataaatctaagacttgattgagttttgcatatgaagctcttctcattaactttgaaaaataaatccaagacttgattgaatagtctaaggccctgcaacatcaaaacttgcaataaattatagcttgttttcttataaaagttctttccacctcacaagatcaatgcactaaagaaggaaatttcaaactatagagcatgaagaacgagaaatttttgtccaatgggagatattcaaggagatagtcatagcctaccctcaccatagctttgatgactagatgttagtgtcctacctttacaagggtatgtctcttccgatgaagcaactccttgaatgatgcatggtagggatttcatgaattagagtcttgaaaaaggattccaatttctctataattatgttgcaaaagtatccagaagttaagacgacttgatcatctaagaacaattaagggacaaaggggtgaacaagccaagagccattagagtgtaaacactctcaaatggtttagatttccgagcaaaaattgctactattgtaaagaggttagatgatttagaaagtaaaggattttgagaggtacaaaggatcactcaaccatgtatgatttacaagtttgtggaatagaggtctccttcttactctacttttagtatatgatatgcttccaaagcatgcaaatgtcattggaagctatgcactactcatgaacaactcatttttctcatgtactatttatctaaattggagaacatgcaaatttttcatggagtagaaacaacaatggcacgttttagtagtaaggaaatcaattccaagccaatcaaagtggtggtctactaagaaatttctatagcaatctttatctttatcattaacccaaggttggagaacttaataaggcaattcatgcaacaataaagcaagtttaatgaaaatcggctaaaaataaatgcttaaacatcgtaggttacttcaaacatttggaatgtcttaagtcaaatcactttaagcttaccacaggacaaaaacaagttctctactcgggcacatcaaaatccaaagggaacatgtaatgcttttgatattaagaatgaagcaagacattagtcacactttgaaattgtaaggccctagttatagatctaacttttattttaaaattaatcatggctttaagggaggaaaataatagtaaatacaaggttcattttcaaccaaggaagaggaaaaagccaattatgtataaataaaatactactttagatttgtgaagcatgaatagatccaagaaaagacaaaataagcaagtcatgggcatgaaatacgggaaattaatattataacatgaggtagagggcaaacaactaagagtgaggaggtttgaagcaagtgtaacaagtttaaaatgaaatttgaaactcaaactaaaggcaacaacataatacatgaatttgagctaaattttggagtacttttagattgtcttttaaagccaactacctatggttttaaagcttaagaagtcaaaaatccaatgttgggttggagcttttaaaaacaagacatgaagcaacaaagtagaatatgagcttccacatttctatccatcatttgcactaatattgatttgagtattcagacctatatcatttgcattgtacatgactttggtgtattaagagtttcatagaagatacaagttatggactccttgcaagataataagtagttcataatcggtttatggatttgagtaatccaatagaggagatagtacattgataagtagcttacagtcagttcatggatttagacaatgtagtaaaggttgtagtgcactatctcctaattggaggataacttgtcttggttgtcgggatgaatttctcatgttgagtgtactagtgtgaatggttacacattggatataacctacattaaattatgacgtaaaactattagattattatgattcactaggccactgtattacatgaaccctcaaccttgagaagatattgaacctatggtgaaatcaaaatgaggtcttaacctatgaatgagatcctaatgtgatgatatacccctatagattgagtcattattgatagaagatggtaatgatagatattctcaatagaggcaccataatatctcatgggattaagacaattttctcccatgagtgatctaaaggacatgtgttcataaaatttgtagtcatagtaattccttaagggggtgtttggtacacgggaatagggagtgagaatagacatctcattcattttctcccttattcctatgtttggataaatgttaagaaggtgaaaatgaaataaaaaattatttcggcagaaatcaaatccaacttatgagtcggatttgcattcattaaaagtaggtggtattctgattcattaaacctatttgataatataaaataacttaaattactattttaccctcttatcttgttctttaaacccgatgtttatcttctttgcaaaggtagagatccattcatcatccacttcttatcttctttgcaaagctagagacccattcatcatccaattctctgcaacaagtgattcttccaaattgaatcaattaaaccttccacgatatttaaaaaaaaaaaatcaatttataatttatagggttttggatgtacattttgattgttggatctaggattcgtcattgtttgctacaactaggttctgaaaacccccttctacatcttcgatcaggtttaccttattttctctttcttcttctacttctttatatgtgtttcttcttctctataaatcgattatttttttttttttataaatttatgtttggaatctttgatgtttctttatcttgtattaatggaatctggagagaaaaattaaaatggttggaaaaagatttttcgatttcacgtgtttacaatattgaaaatttttaatggttaggaaaaaaataaaaagaaaaaaacaaacaaaaacaaaacttttggtttttttttcccctttgtttattattatcggcgtcttcctttcctagttaaagctatggattctgccgtctcgcaaaaaatctgctgcgtttccggctcattttggaactttagcatgggccacagtgaagatctcttcatatcattactatttaacaataaacaaaccattaagcaccgagaaaccaacattgattaatttttttattccagctgctattgatctatatgggcccaactttatggttaattttttatttattgagtatatttatatgtttttagtcttattatttaataacaaaaaacctctcaaattttatttttttaaaatacaagtaaaaataaaaaaatattttaaattatatgtaaggatattattataaatttatttctttttcattttcattcctattattatcaaacattggaatggaaacaaataatcattccaatcttgcattcctaagttcatccaaatgctagaaatgggatcatcaaattcattccatttcattaagaaataggaaaggaaacaaaatattatttctattccctattccgacgtaccaaacacccctgaagtggaatttgacatatgttttttatgagttaaaatattcaattgatcacataataggaggatttgtaacttaaagattgaaaaagtaatcttgatgggttaataacactaacctattagattatgggcattagttcatgaggagtccacatgcaatgaactaatggattttgactaaaaaacctgtaagtgtcaaatggatttattagataaagtataaacttgatggtaaagctaatcgatttaaagcagcaaaaggttataaatagatctaactcataaaaggtgaaaattttaccaaatggatgtgaagttagctttataattactaaaaaggtttttgttgaacaaccaccatgatataaagggaaaaaaaacaagtttacaaactcaaaatggcattgtatgggttacagtagaccacatgcttagtacacatgaattgatgcttatttattatgaaaaaaaaaaaaattgtatgtatcattttattaaaaggataatctattaaaagaggtggaatcatttccactttataaaactaacccttcatttatttttaatttaaaaaataatcgatttagaaaaaaaaatgtctttatttttttcttgtaaaataattatttttttttaaaaaaaacacacttataaataatagaagtgttaaagggtatttatgtcaaaattagattactcttcaagttcaaaacgggatatattagttttacaaatttaaaattttttcatccttttaatggattaatcctttattaaattaatagaatttttaagtttcgtttttacgcacgtgtttttaaagttcacgacatttgtgtctaaaatataaaatgtcaacaagcgacacgtcagtttttggtaaacatcgttctcaaaaggaaaagaaaaa

SEQ ID NO: 13710 - DNA, 8589 bp, Vitis vinifera
  Intron number 1 from transcript GSVIVT01001049001 (locus G SVIVG01001049001) derived from phytozome v7.0 (chr-ID chr1 1; pos 7045071 to 7053659 reverse strand)
caaaccaggtaagcaactatgactccttcatgtttgtgctgtcaaatttgttccaaacgagtgttggagatggtttcatttgactttttttacccactaaaaattataaaaccctagaaattttggcagagtgtatgatgttgtaaaccccatctgtttcatatgacatgtgcaaaactgtgcaacaatacattgaggaaagaaataggttccagtttcattgagatcaaggatgatgttagccagatttttattaagtatacatcattattttctcaaatcttcctatttctgctttgaggaatgattttgtaaaataaaacagcattttccacaggttctatataaaattgggatttgctttagattatttaagctgattttcttgttctcgaaaacattttctagtgttattttataaacccttgttttgtgcttctaccatgtagggattgtaaatttgccaatgaggtttactggttctgaattcgtgttggtctcaaacagaaaaatagattcatcttcctgtctgagttcatatattgactggtgggtactggaagctcatgggactgtggttctattttctaacgtggggcaaaggggttgtggattcattaggaatacaggtgggagcctttttattgttatgcaagttcagaaatgtggggatttgtcttgtctgggtggtaaaatgggtgtatcatgtatggaccagtagatgggtgggaaagagggtatttctgggaggactaggtgcaagtctgcatgaggggctcaagggagtatctttgatctactaggtggtgttttaacacagttgggccctcttttgagaaacataattgtgacagaacttccaacttctgcaactgttaggaggttttcagactttattgctacctatgggtttgttgatttgcttgtggaaggaggaaaatccatataggtcagctaccaacgaaggcagtgcatgtccaaattgatggtagtgatggtgggaggaacatcatggggatgtgtttgagctcattcttcctggacatttgtttcaatatctgcttttgttgcatatcagtggattgggaaggggaaaatgcccctttagatttgaattatgtggagagtatgagtttgaaagtggaagactttaggagaacatgaagatttaatatggaagtttcattgcttaaatgggcaaagagaatgtaacacttaaaaatgttcttagatattgcaactagaaaggcaagaccattggaaaaaaattagggaagggccagagagtgcataaaagaaaaggataaggggttgttggaggtgtacgcggggtttggaaatgagcatggtgaggaatattgttgattgatggagatggaagtaatctgttggtgataaaaatatggggtgatttggctaaagtatgggaatggaaacatgaggtttttttgctagctagctaatgtgctttgaagatttaaccacataggtagattgaagggcgacacaatgtgaaggaatattgaagaagagattggaactggtggagtcacaccattcttccatacattgtccattgacatttgacattgtattatggagaccaaatctaaatggtttggaggttagttctttagacacaatcagtagagtgtaggttgtgagagctatttgacatgaaacatgggatgaaaaataataagttctgtctattagattgactatacacatagtttatataggagattacaagagaagaaataggaaacaagagacataataagaaactaacttattcttaaattataaaactatctatttatagaaataagaaactaataaaactatctatttacagaaatagaaaactaacataataggaaaataattctcctattctatttacagctcaacactccccctcaagttgaggaataaatgtcttccattcccaacttgaatacaagatcgtgaaacattgaattgttcagcccttttgttaggatatcagctaattgatgttctaatggaacataggacatacacactactccttcctcaaacttttcgttgatgaaatgcctatcaatctcaatatgttttgtcctatcgtgttgtatagggttatgagtaatattgatagctgacttgttgttacaatagagcttcataggaccatcccacttgattctccaatcatctagaataatcttcagccaaagtagttcacataacccttgagtaatgaccctaaactctgattctatagacgaccttgctaccacattctgttttttacttctccatgttaccagattacctccaagaaaagtacaataccctgtagttgatcttcgatccactagggaacttgcatagtcaacgtcggtgtatgcttcgaaagcaaaagtattgttcttcttgaacaaaattcctttcccggggttgcctttcaagtaatgcagcaccctgtaagcagcttgaagatgaggctctcttagatcatgcatgaattgactgatcacgctcaccgagtaggcgatgtctggccgagtgtgagcaaggtataagagcctaccaaccaacatctggtacattcttttatccaccactggttcttctttagcttctcccaacttgtggtttggatccattggggtagagactggtttacacccgatcttccctgtttctgccaataaattagtcacatacttttgttgagagatgaagatcccttgtgtggaatatgtcacctcaataccgaggaagtacttcagtttccctagttccttcatctcaaactctgttgctaatctctgcttcacttcatgcttttcactttcatcatttcctgtcactatgatatcgtcaacatagactagaagagcagttactccccttgtagccgagtgcttaatgaagagagtgtggtcaccttggctttgtttgtacctagactcttttgtgacttttgcaaatctcccaaaccaagccctaggagattgttttagcccataaaagggcctttttcagtttgcacaccttgttacctgtgtttccctcaaatctcggtgggatgttcatgtaaatctcttcatctaaatcaccatgaagaaatgcattcttaacatcatactgtaggagttgccaattgtagtgggcaaccagtgatagcaggattcttatagtattcattttttgcaattggagtaaaagtctcctgataatcaactccataagtttgagtgtaccatttggctaccaatcttgctttatgtctctcaagagatccatcagccttatatttcagtgtgaaaatccacttgcaatcaacaatgtttttccctttcggtctttcaacaatctcccatgttttattcttttctaatgcactcatctcctctctcatagcatccttccattccctttttgtcaatgcctcagaaacagtgttagggatgatagtggtgtttagactcacaataaaattgttgtgggttggtgatagatgcttaagagacacatagtgtgatagtggatagagtggtcagtttttgcattctcttgtgccttttctgacagcaatgggaaggtctaggtctaggtctaggttgtctgttgagttagtggaagtttcaccaggttgtgtatgtaaaggtggtctgatcttaccgtgatttcattcccagggtctaagttggattcttggacctgcttttgttctggaatgaccttttcccttgaatacaacttaggaaattgtggaaaattgccagtgacactggctggaataggggatgactcaggttctttatcactatgggttgagacatgaggaaagtcaagaggttcaaaagactcacaaggactatcttccatcattgaaatctcctcctaaagagaggacttggggaaaaaatgtttattttctgtgaatgtgacatctgtagagatgtaaaattttctggctgagggattgtaacacttgtatcctttttgagtggatgagtaaccaaggaagacacattttatgactcgggggtctagcttgtctctatgttggctgtggacatgaacaaatgcagtgcacccaaataccctaggagtgagcctatttgaggttctgaagtgttgatagaaactcttaagtatctctacggggcttttgttgtctaacactcgtgagggaattctatttatcatgtatgtggcagtaagaacaacttccccccaataggacttaggaacattcccttgaaagagtaaggctcggattgtgttgagtaaatgcccatttttcctttcggctaccccattttgttggggcgtgttaacacatgatgagtcatggagaatgccctgtgattgaaaatagggtgacaaaatctggttgaagtaatctctagcattgtctgttctaaagctttttattttaaccccaaattggttttgagccattgagtggaaattaggtataacgatgctaacatcagatttttgtttaagaagaaagatccatgtaacccgagtgcagtcatcaattaaggatacaaaccaacgagccccaaaaacattaggtatagttgaaggaccccatatgtcactatgaatcaaatgaaaaggatgagaacttcttttattactaataggaaaagatacacaagtatgttttgccaattcacaagtttcgcaatgaaactcagaaatatctaatccttggaacaaatgaggaaacatgacctttaaaaccctaaaagatggatgacctagacgtaggtgatacaaccaaatggtatctttatttgaggaactgagaaaagataacgacaaattattactagttttctgagatgatttaaggtggtaaagacctctcctttccttagtaagtccaatcctcctccccgagccttgttcctgaaaaacacaataagaagggaaaaaaatagcataacatttaagagtatgggtaagcttttgaatggaaacaaggttgatcgacaattttggtacatggaggacatttttaagaataaggataggtgtgatgtatatgtctccaaaacctacaacgatagctaaagagccattggccactgcaattttcttgttacttaggcttcgggtggtacaagtatagaaaagtttagatttggaggtcatatggtctgtggcactagagtctattatccaagagtcatcataaaccctgtgtgagacatttatgcaaaaagagagtgaaggtgtacttgaaagagccaaagaagaagttccagtaggtttgtaaagaacacgtgaataaaaaaaaaattcagctatgaaggccagaaaaatggcgatgaaggccaaaatgatgcctaggtcttaaaaacctacaactttgataccatgacacgaaatatgggataaaaaataataagttatgtctattagattgactatacacagtttatataggagattacaagagaagaaataggaaacaagagacataataggaaactaacttattcctaaatcataaaactatctatttacagaaataggaaactaacataataggaaaataattctcttattctatttacagctcaacactattgatgttaaggaggtgtaaggagctcataaagatgtgaatggggataaagcttgaggattaattaggttgtgaataactttttgctagtatgattcagattgggaagtagtgaaaagagaggttatggagctttgaatgtcccatgcaactgggacttcagaattttgaacacttcattcattatgttagtgacaaagaaaccgggagtggagaagcttaaggactttaggccaatttggggatatgttcaagcatagttttaaaaagcttgctttactagccataacttcatagtcatcagatagtataaaaaaaggtgatctattcattctctattgcccatacatagagtttaacaatctagactaaggaatttgaaaggtcttctcatttgaaacacgtcattggtattagccttcttattggccactcaccaagcaaagaccttgacctttgatagggcctttgatttccaaataaaattagcaggagtgaagagaactaaagttgattgctttgataaggccagaattttatttatttttttaatcgaaaataagctagaagatgaaaaagaccaatgtctcacatttgaggatgatggtgataggttaaaactattgagaatggatatgaatatttcaagatcctctatttttgaattagtgagatttcactgaaagttaaaattccaagaaaaagagggagagagttttaggatagatgaaataggggaatttcaaattgatgaaactctataagactcagaaattgcaaagccaaagattgagtcctcttttgtaagtcttcctataataagatttttgtcccattttccttcaaaatatggtatgattagagaagtcatggaagacctgagaaatggccttccaagggcaacaatctgaccacctaactaaaatgtttgtgtcctaaccttttggatgcttttcatagtttctcaagataaccttgtgccaaagagtagtgcactccactggaaactgtcacaaccacttccttaaaaagaccctatttctcaaagaaatgctcccaaacccaaccctccttcctccttaggcttgtacacttgatccaactaatgagatgatctctctttcccccataaaccttaactaaagaaaattcctttgcattttctcaagctttgttgccactgaagaaggaatcttgtataacgggaggaaatagctagggatgtgagataagcaagactgaattagagttattcttccacttaaggacaaaaaggcatttttccatccatgtagtctccttgaaattttgtctatgactgggtcccaaaagacttgagccttgggattccttcctagtggaagactcaaatagactaaaggctagttggaaactttgcattctaacatggaagccaacgtagcaactcgatcgtgactcatattaattcttaacatagtgccctctttgtgtactttgtgtgcctttttcaagcgcttttaatatattttctttgtttacttataaaaaaaaaaaaattcttaacatagtgctcttgtttagattgatcttacgtcttgaaatatagccaaaaatcaacaaaatgatcttaaaattttgcaactcttcatctctagcattagaaaagaagatagtgttgtttgcaaattgcaaatgagacaccctagttctgcttctcctcactagagagccttctaagaatatcacaatcctctgctctaactagcattctgcttaaaacatctattgcaattggtgaaaagtaaaggagaaagaggatctccttgccttaagcctatggttgctttaaagcatcccttggcattttcattcactaaaactgaaaaacttgttgaggacaaacatcccctcattcatgatctctatctagtattaaaaccctttctatcaagagcatggttgaaaaaacccaaatccacatggtcatagatcttttcaacttcctgaggaaaagaaatctgtgatacttgtagcaccaacagcatatgggagatgattttaaccactggccagttggtaagaacatcccaaaatggtgctgtgtgtataatggggatggggagagtgctgatcaattcctttttcattataaaatggctagcaatttatgggttatgagtttaaccctccttgaggtgtgactttggtgtgtttgtacatgtgccatgagtccggctctatttggttggcttggaaagtttgttgacagaagaaggaaagtgcagaggacgaaacctttatgttgtcttggtgcacttggaaggaacacaaataatagaagtttcactggaaaattggcgtggaaactggaaggaaaatatgtcgagattcttatttatctgggcgaaggtcgatcagtcagtagatgacctttcttggagttcagtgacagtttgagtggagattaatatgtttttccttttttctttctgtttcttgatgcctagacgtaaattgtactgctcagttacttgccttcgatgtttacaattttcaatatatgttctatgctaatatctacaaaaagaaaaaaaaaacattggttgcatagcttgtttgctattgctacataaggcagagatgaagattttattgaaatttataactagtgcttttggaggtcataaattgtgaaattctaactttaggagctgtactttctatttgttgcatctttaaacatgtcattattcattcttttctattttggtctcatttccaatgcatgtggagtgacacttttttttctgagaagtataatttttattactttaaagaaacctattattatgacccttggaaaggcaaaggtacagagttatagtgtgagctacaaggcatggccttttatcatatttactagtatcacagagttctgttgcttaatcaaaagctcatatccaaactgaggtttatcatgtatgtattgcaggcagtaaagcaat

SEQ ID NO: 13711 - DNA, 11918 bp, Vitis vinifera
  Intron number 5 from transcript GSVIVT01001087001 (locus G SVIVG01001087001) derived from phytozome v7.0 (chr-ID chr1 ; pos 22528939 to 22540856 reverse strand)
cagactttacttttgaggacttttttgcggtaagtctatcataaatatgttctttatatttcttttgtggttgctatgttttgttttattatttatttatttttgatagacaatatatatatatatatttatggcgcttaagcaaagggtgtaacaaagtgtatatgatgtatgcatttggtgtcaaaataggcaagctataaaaagaaagaataataaaaaacaagctccctttccttactttttttgttttgattagaaacaaaaggtatatattaaatgagaaaagaaacatgagaaggatgaggaatccaccctatgatgtacaagtctgatcaaaagaactaagcaaatctccattaaccgaagaaggctatacaaagagtacaaaaggctgcttgatcaaaggaattaactaaacctccactaaccaaggaaggctacacaaaaggaacaaaaggcctatacaagtaaaacattcttgacccaatagacccaactctaaggtgtacataatggaagccaactaagttggattacactcgaaggatagggttaaaaaatgtttgtgcagtgaacaaaaaaaaacacataaaaatgaagctgatcccacatcatcttcggcgtcttccaaatgtcctcgaaaatcctaacattcctctctctccatacaatccacaacagagaaagacacacaatcctccatagagtcttgcctctaaaagaatttcaaaacacttgaaagaaatcaccatcatatcgcaaatattgcttggctgaacccactccatcctagcctatgaaaaaattctatgccacaatctcaaagtaatcggacaatgcaagaagagatgatcaattgtctctctgctcctcctacaaaggatgcaccaattagggctaaggactttgaaaggccttttcacctgcaatatgtcattggtatttaccttcttatgtgccactaaccaaacaaagacaccttagaggggacttctgatttcctcaaaaaattagctgggtagaaaggaacaaaatttgagacaatggataaggctgaaaaaaatgatttaactgagaaaattcccgaagaggacggtacccaaataagccaatcaacaaaacatataatggtcaatgaatgatcatttatgtacacttttgattcatttcaaaatgtattcattaaagaaaatctaatagtttgttatgactgtccaagtcttaaaaaaacccttctatttcttttgttccacaacatctaaaatagacaaaaaggagtaacccaacaaacttttttccgtttctttcccatgaagatctatgccaattcatcatgattttgcttaatattggagtgcatcatccaagccacgccacaaagaaaaaaactagttatcataggaaacttgctttaaggcaatgaagaagcaaattattagtcgattcctcctcatctttgcacatataacatctagttggcatcatccattccttgcttttaagttgattgatcattaaaatccttttccatattgcttcccatacaaagaatctcaccttcatatgtatctaggaattccaaactatgtttgtgggaaaagaatctcttcttcctctggctagggagttgtagaaggatttaacatggaacttgccacactgtgactccttccaacccattctatcattctcatctctagaaaggccatcattctttcaagctcccaattgtgaaattgtcttgagaagcaaggattccaccaacctcccttcctaacttgctgtcaaacctttgctacccatgagcctttagtggtgactatagagaataatgtcaggaagaactcttctaaagataagtctcgacacaatctatctttccaagatttgagcattcttctattgccaactatgtaatgagatatgcttttaaaggactcccacccatttctaattgctttccatacacctgccctacaacctttcttcacaccccttgagcatcatctccctttcccaaacttttgtgctacaacacatttccataaggactctttctcaatttcaaatcttcatttctacttatgaaggagagccttgtttagaaataaagagatttctaatgccaaggcccccatactcttttagtaggttatgaaccatttttatttatttatttatgagaaacaacattataatatattaaggtcagtaagaataataagtagaatagaaggacaaggaatcctcaaaaaaaaaaaacgacagaaaaagtaagtaagaacctctaaagtactaagtaaatctatacaactataaggtgccacaacgtatatgggaataagtccttgccatcccacacctttagacctacacactaacaatgtatcatattaagggggatacccttaaaaattctagtacaagaggcctaaaaggaggctaagaaatgaataatatctcaaaaaccctctgaagttcttgccttgttttaaaaaatcttaacatttcttttccaccacataacccacattaaagcaagacaaacaaacaaattgtcactacaccttgtcgctaatggtactttccaaccctttatatgagatggtcatcatgtcacatatactcctaggaggaacccagtccaaatgagtaaatttgaatagtttatgtcatagccccaaagttaaatgatagtgtaataaaaaatgatctaccatttcaccactctccatacacaataaacaaacattagaattgagggctttgtggggtattctcatttgtagcctgtcattggtgtttacctttttatgcgtcactaaccaagtagaggacttgacctaaaatggggtttgtgatttccaaacaaaatcagtgaggaaaaagggaattgaattaatatggttagataagactaaaaagaatgactttattgtaaatgaacctgaagaagataaggaataacctcttgcattaggaagaaatggggataagtgcaaacaagaaagaggggacatgagtcttttaagatctcctatctcaaaatccgaaagattgcaatgaaagtttaaattccaagagaaaggattagtggacccaagaactgatgaaatgatattttttttagctgtggcaattgtgaatatacctgggaattgaggacacaaaggtttgtcccccaccacaagtcttcccataaacaaattctcgtcccatctcccgcaaccaaccaagtgtatttggaaaaatcctgaaagactcgtgcaatggctttccaagggcattgatgcgatcacctgacaatagtgttggcattccacccattaatatgtgtcccatatatgcttagaataagctgatgccaaagagagaaactttcctcaggaaacctccaagtcatttccctaataaagcacgatttcttacaaaaatcttcccaaaccctagtcccctttcccctttagacatatatgctaagtcccaattaatgagatggtatctcttatgctcccaacccttgaccaaagaaaatacctttacaatttctcaatttttagtgtcatagaagaaagggtcttgaacatggaaatgaaattgctaggaatatgggacaaacacgagtgaataagagttatccttctacctaaaagcaaataagcttttttccactcatctagtcttcacaaaattctttcaatcaccaaatcctagagaacacctgcctttgggttccctcctagtggaagtcccaaatagggaataggctaatctgacactttgcaatcaagcgccaatgccatcccattgagttgatcctgatcaatgttgatgccaaacaaattactattttctagattgacttaaagactaaaaatatgcccaaatactaacaaaattatcttaagagtttttaatttttttggacaaactctagaaaaaaaaaggcgtcatctgcaaattgcagatgagatattgtagtcttactccttcctatagtgaagccttccaatagcctattctccttagccctcaagatcaatatacttaacacatcagctacaatgacaaagaggaaatgaggtagtggatttcctttgtcttgagcctctagaagttttgacccaacctttggcattaccatttactagaattgcaaaagagatagaggataaacaacctctcatccaagtcctccatctaaaactgaaccccctcctttcaagtacatggtttagaaaactaatccacatggtcataagcctttttgaaatcaattttgaaaactgctccttctccagatcatcttttttcatccactacctcattggctattaacggtgcgtctagtatttgtcttccattaacaaaaactcctggtgtgatatggatagtttcattaagaacaccttgtaactgccttgataggacattggctataaccttatacaaacaagtgaccaaattgatcagtctaaaataggaaatccttttgttctaactctttttgggctttagagcaatgaaggtggcatttgtactccaattaactaccccacttcaatgaaattttgaaaataccctttctaaatcctccttaatcacatcccaatactcttggaacacaaccatggtaaagccatcaggctcgggagctttgtccttatctaattgaacaatggcttgacaaatctcttttttagtaaaggggcgttccaaccaagcaacactctctgttcaaatggatgattaatctaagctttctaaccttagactttccaagggggtttgcatatagtttcccaaaaaaagcaagatctttgttgaaatagtgtccatgttatctaaaattactctttcatcctccaagaccttgacatacttcttattgcacctgccactagccaccctatgaaaaaatttgaattacaatcctcttctttcacccacatcatcctagatttttgcctctagtgcacctctttccttaacagtaactcctttgactcctcttttcagaaggccctttgctctaaaagcttgggagaaagattcccttcttgcttgatagcatcaatgctagcaatatcattacggatgctcttcttcctctcatttaactctccaaaatactccttattccattctttcaatttggatttaacaaattgtaacttcctcatgaacttatgcctttcccaaccatcgctccgaaaatctctctaacaattattaaaaccatctttgaaatctggatggagtaaccacatgttcttaaatctaaatagagttggtccccacttgaatagatttgtgtctaaggcaattgggcagtgatctgacatcaatctaggaagagcttcttgaaggcttcgagggaaattttgctcccactcatttgagtatagaaatctctccaatctcttacacactgcggcattttgcatatttgaccaggttggtccccacttggttttggttgccttgatactttattttattttgttttattttttgccatttcatatataaaaagtcactaatatttcttgtatgccttctccatcagtgaacaaatcgtgataccttggctctaataaatgaataaatgggaggctctggtggttctactttgcaattctgtagtctttgatatttttcttgttgcttctccatagtctcttagataagtcttgggtcccccgactacaaggataaggatttgacctttgtcaaatagacagaagtaattcttttggatgctacttgctgcatccagcactctgatatagtggttggatgctactttccaatcaatgaacttggtattggagcctatgagttgggatgggtgctggtcctttatggattccattgtttaagcatttagaaaagcctctggtgcaaatcctgattgacactcttgtgttctcacattctgtccaccttgacactgtataatattttcaatttgttctgtttgatttttgcatgtggattttttttttttagataaaagcgcaaaaatatattacgaggcaaaaagccacaaagcatacgggaagtatacatagcagcctgaacaaaaacaacactcaccaccccttagggaacgacaagccattccaaaaaacctaaaagcgaagaggactcctctcccatatacacccttgcccaactccacaagttacaaacaaaagaattctttagtttctgaatagctagagagccccccctgaaagctaatctatttctctccttccaaaccgtccaaaaaatacacaacgggatggaagtccaaatccttttcctctttctccccaccaaagggcccctccaactgactaacatctctttgactttctctgggaacacccaattagccccaaacaaggccaagacaatctcccagagagcccttacaactgtagagtgtaaaagaatatgatttacattttcctcttcataaccacacaaaaaacaccgatttggaagaagccagccccgtctttgaagtttatccaaagttaggaccttctcctaagaagcctcccacgcaaaaaaagcaactttggttggtaccttgtccacccaaatgctctttttcgggaaggtaatgacattaggccctgtcaacaacttgtaggcatctctaattcaaaagcggtcgtgtccccctcctttccatatcaccgagtcctcttcaagagaaatcctcaaatccctcaacatatgcaacagctctcctaaggcgtccagctcccaattattagagtttctagagagtcttatgttccaacctccttgaccaagactagaatccgacatctcatttaccgaggcattcctttgtgccgccaaagcaaacaactggggaaaagctttgtatgtggaattatgaaagagtaaaacatgatgatagtattgcatgtaatcttagcctgatgattgaattttttttttcatgtcttctgatgctaatctttatcacctctcatcttcatgatctgcagaagcatttctgttgaatctcccatcagaaaagaaaataaggaaagaaaataatattattcggggaattttcaaaaattgaactttcacttaggtgagctcaaggaattgggagttgtgtgggatattgatatctgatagtagctgtgatgggataggatggattcttcttcttcgattaggtagattactatttgtgcttatagtcctggcaatagtgatgtaggaagccttatcttgatgcttgtcctttgggtaatctggtatggataagcactaggtgatttagtccctatggaattactgtgatgacaaattttggtatattttagcattttccctcatgctatgtttggttcttggataatttgaggaaaaatgcaagagaaagaaatagaaaagaaaagtagaaacgaaggtgaaagaaatgtctccgcaagagaaaacattttcccagggttttgattccagttgattaatgagaatcaaaattctctgttggaatgtccgtgggattaatgattttgagaaaagaaagctaatcaagggagtgatgaggaatcaaaaaccggatttggtttgcctcttagagacgaaggtgaaagaaatgtctttgcaaatggtaaaaagtgtgggtgtaggaagatttcttaattgggcgttagtgaacgctaggggtgcggcaggaggtctctttctcttttgggataacagagtcttggagaatttagaggttgaaagtggggggtactccatctctattcgatttagaaattgcgctgatggcttctcttggattttctctggagtgtacgggccagtgattggtagcgaaaaggaagatttttgggaggagcttggagccatccgtggcctctgggatgacccttggtgcgtaggaggggactttaactctgtaagattcccagaggaaagaaggaatgcccctagtctcataggtgaaatgagaagattttcagaggtgataagggagttggggctgagggattctccactgactggaggtcctttcacttggatagggggcttgaactctctagctgtctctaggttagatcgtttcctgattttggatcaatgggaggaccacttttcagccatcacacaatctgctctaccttgtatggtctccgatcacaccctcatagtcctagaagctggaggtttatcttcaggaaaaagcccctttcgttttgaaaatatgtggctgaaaatagatggattcaaagacctagtaagaagctggtggaatgggtattttgtcgaaggctatagcagccactgcattgctgagaaactcaaagcgcttaagaaggacctgaaaagctggaacaaggaggtggtaggcaacgtctcttccaatagagcagaggccttcgcccgcctacagtgttgggaagccaagaagaaggagaaccctcttaatcctggagatatggaggctaaaaatctggctcttgaggactataagacatgggcccttctggaagaaacttcttggagaaatctggttaagagaaggcaacaaaaataccaaatatttccataaaatggctaatgctagggcaaggaggaacttcctgtctaaaattagagtgaatggggtgactctctcttccattgaagatataaaagatagtgtttgcagaacctaccagtccctcctctcaaaatctggggattggaggcctagtatcaatggccttaatttcaagggactgggagagggagtggccaacagcctggaagttatgttctctgaggaagaaatctttgcaacccttagcagctgctgtggggacaaatccctagacccagacgacttcacaatggcattctggttgttttgtcaggaagttgttaaaccagaaattttgggtctcttcagggagttttacctcaatggaaccttccagagaagcttaaactccatgttcctcttgctcattcccaaaaaggagggggccgaagacctaagagatttcaaaccaatcagcctggtagggagtgtgtacaaactgctggccaaagtcctagcaaataggttgaaatcagtgatgggggaggtgatttctgattctcagcaagctttcgtccaagggagacagattccggactccgttcttattactaacgaaacccttgattctagattgaaagacaacaagtcgggtcttcttcttaagatggacatcgagaaagcttttgaccatgtcaaatgggactttctcatagaggtgatgtccaagatgggatttgggcatagatggattaattggatgaaatggtgctgctctacaacaaccttctcgatcctcatcaatgggagccctttgggcttctttcgtagctctaggggattgagacagggggacctcctttccccctatctcttcctttttgccatggaagcccttagccaactgttgtcttgtgcaagaaacgggggttttatttctggcttcagagtgggaggaagaggaagagagggactaatcgtgtcccatctcttgtttgccgatgacaccttgatcttctgtgacgccgaagcagatgagttgcaatatcttagctggactttcatgtggtttgatgcgattgcaggattaaaagtcaatctgagcaaaactgaggcctttccagtgggggaaggcattcctatggagaccctcgcctcggtactgggatgtaagatagggagtcttcctaccacctatttgggtctcccccttggagccccctacaaatccaccaaggtgtgggataccgtggaagaaagattcaggaaaaggttgtctctctggaaaaggcaatacctctccaaaggtggctgtcttaccttgttaaaaagcaccctctccagcctcccaacctacttcctttctctatttgtgatccctaagaaggtgtgtgcaaggcttgaaaagatccaaagagatttcttatggggcggtggtgccttagagaacacgcctcacttagtaagttaaaaggttatctgtgctgctaaaaaggatgggggcttgggcattcgcaatctagctatttttaacaaggcccttcttgggaagtggttgtggagattagctaatgagaatgagtccctatggaagcatattatctctagtaagtatgaccttcaagatgagggatggtgctccaaaggtgtaagagatcgttatggggtgggggtttggaaggccatcagaaatggatgggagagcttccgttctcactcccgcttcattgtaggggatggcactagagtgaagttttggaaggacttgtggtgtgaaaaccaatctttggaagaagcttttcccatcttgtttaatctgtccgtcaacaaagatagttgggggcctcgttttaatagacatcttaatgattgggaggtgggagaagttgaaagcttgttaggcaagctcctccctatgaccattagaagaggtgtggatgatgcgctccggtggaaagagaacaagaatggaacctttttagttaaataattttatagctctctctcaaggggcatcaaaacccccttcccggctagaactatttggactccttgggtcccaattagagctagcttctttggttgggaggcggcttggagcaggctgctcaccactgaccgtctgaagagatttggttggagcattcccaacaggtgctttttgtgaaaaaatgaggaggaaaccatagatcaccttcttttgttttgtgaaaagaccaaaatgttatggcttttgattctttccttttttggggtgcaatgggtgatgcactcctctgtgaaaaggaacctcctgggttggcatggttcttttgtgggcaagaaaagggagaaagcttggagagcagcccccctctgcctgatgtggaccatatggaaagaaaggaataggagggccttcgatgatattgagaggaacgaccaagatattaagtccatttttttgtacacttttgtgaattgggctagggtgtatataaagaaacacacttactctttgatagattttgtagattggctagccaccaagtaagggtgaggcttgttttccctttggtgtcttacttctttgtatcttggtatacaccgtgtatactctttccttagccttttggcctttaatgaaattactttacctatcaaaaaaaaaaaaaaagagtagaaaaaaaaatgtagatttaaagtaaaaaaaaaatatttttatatgttgccttaaactcattttacttttttttaacaattttatataaagatgaaataatttaaaatgcataagtttctaaccaattttaattatatttgactttctttcatatttttcattgttaaaccaaacatgagaaaatcattttccctaacatttttttatttccttagtattttcttggaaccaaacatagcattaaagatgcatttatttgattaaagagattgtggattcctaggtcagctaactctaggacaggtcggaaaactctagattgacatttcaatgtgggatacttttcctgattggaattttaaattgcttttttttaactgtttgacattaatctttcttggggagagtcatactcatttccccatttgaacaatgctttcattttctattcaagaagtgaaaagggaaaagaagttctaattgctaggagttgcaaacatggtctgtgtgctagtgtgtgttgctaatgttggactcaggaatgacttttgactagcaaactttgattaaactgtattttttttcctttttcagagattatatttttataatatttaattccttttacaccaactctctttgactaaatccttgtgataattttcagttattccttgagcagctggaaagtgttgtccaagg

SEQ ID NO: 13712 - DNA, 3417 bp, Vitis vinifera
  Intron number 1 from transcript GSVIVT01010385001 (locus G SVIVG01010385001) derived from phytozome v7.0 (chr-ID chr1 ; pos 20036651 to 20040067)
gagagagagggtgaagagagaaagatggaggatttgagagaggcctttaggatgtatgagatggaagggagtgggtgtataactgcaaagagcttgaagaggatgctgagtagattgggggagtcaagaagtgtggaagagtgcagtgttatgatcggacagtttgatgtaaatggggatggggttctgagctttgatgagttcaagctcatgatgctttaatcttgtttaacatctttcatctgaatgttgtattttttttttagatttaagaagagtggtttgtattcaaaaattaagatactcctcattgctttcctcgtgcacatggtgaagaaaatactccctattctatatttgattttgcaaaaaaattccttttacggcaaagagcaagtgtgataaaatttaagttgatttttaaattaaattgttaattcaaatcattttctctctctgtttgtaaaatattcatattaaaaatattataaaaatacataatattattacataaaataataatgaaatatatatcatggaaaaaatgaagtattaaattattttatatttttaaaaagttatttagtctaagttattgttttgcattattttaactttaaattatatagaattaatttaccaatatgcctagaccccatttgaaatagagtttaacttttgccctaataataaataagtagaagtataagtattattggtgtaattgaattttatattttggaatgatatctatccccgcaaattttggcagtcttataaaaaaagtaaaactgttgaaaaaatattagaataaaatttttgcattaaaataattatcggggtgcacaatccataggacgataatgaattggagttgaagatcaattaaggaccttattttttttttttaagtgggaagttgtttttcataattttatcattgaagttatcagtatttgtaagtgaaattagagaattaaatttggaatactgaagatttgattatttaattcaagaagtttggtttcttaaagttaacaacttgtctaatttatttaggaaattagttaataagagaatatttattttcaattttcttttgattttgtctttttttattgaggaaatttgttaataaaaaatatatatttttaattctctcctaaactttaatgatttgatttaattttattttgtaatacttttaaatttcatgaggtgtcacatttgaattaaggagttacaattttgaagaatagtttagtggtaatttcatgcaccaaattttttatatctatattatcatcaatgtttttagaattggatcagtcattaaaccggaaaagttattgattcacagtttactggttggaccaacgatctaaccgcggtcgaaccggtaccgtcataaatttatattttattattttatatattattaaaattttaaaaattacaaaaaaataatatattttatctaaatttttacaatatctatcaaaattctgatcaacaaataaaaataacacattaaataataaatataaaagtaataaaacaaaaaaataaatttaaaaaataaaaatcaaacattggagcagctactgcacaggccgaggaggggggtgtgtgatctacaacgggtgtcgccagggtgggggagatttatagccgctggagtgggggcttacaataggggaagggggattggggggttatagcatgccgaaggaggtttatagcggcaaggggtggcttaccggcttgcaacggcacgatggggaaaaggtgactcaagcaacggtcttacgaccgatggagggagattttgcatggtgaaatgaccgacagtgggagcttgtcgcggtgggtgaggggcgggcgacaactgctatggtttggagagagagggtttggaaggaggttttatatcttccaaaacaacgttgttttgatgctaaaaaaaaaaatttaatcgaactgtctagtttgaagggaaatggcccgttcgttcggttcatcaatcgaatcaccaattcagtcggtccgatcctggttcaacctatttccggtctaattgatcggatcggaccagaatcatgaccaaccgacgattggacctgcctgtttagtccggtttttaaaaccatgattatcataaaataagaaatatttttattaaggtaatatttaattctcgaaaaatttgagggaaataaaatagatagaaaaattagaagaaaaaaatagataataaatttaaaatcaataaattatttttatatattactttaaacttattttacttatttaactattttatataaggattaaataattttaaaataataaatttttaattaaatttaattatatttgatttttttttatagtagaatcaaatataagaaaattattttttgatattttttatttttgtagtatgaacgcacacttggataagattgaaagttgtgggccacatttaaaaattcttttcaaacaatactaattttgatggaaaactcttttaagaggattttaacatgtttaataatttaaattaagtaattaaatcatattaaattattaaataattaatttatcaaatatttctaaatcttttaatcaaaatgaaaaaaatatttgttatatatatatatatatatatatatatatgttcatccacggtgacgagttattggaatagtgtagaagtagataggttgtttgaactttgaagtagttcagaagtttgcttgtcggaagaccactattttaaaaaaaaaaaacaaattattattattattattattttatttttaattttgtaacatgaagtctatcgtgttactcgtctgtcgcatcatttccacatcatgtccaagtggattgaaaaagcaaacaagccagaagaaaagtattcatttacgaggagggtttgaccctcgtacagtggaattccagcacaaagcctagcaatttctcactttctgcctccgaaacctgccaatacgcactccgtgacgtctccaacactcgcttcgcttcattctccggaacttcctagtaaagtatcaattcttcactcccaaaatctctatacccaacagctccatctactccttttacgcgtcctcacaacagctatatatatgcacacacaaagtgttcatcctcacatcttcacatcttaccacatattaagtgttattcacatcaattttcattaatatccttgtgttgcgacagccatgatcaactgcaatgtgtatgaacacattttcaagcgcttcgatgaagatggtgatgggaaactctctccttcggagctccgacgctgcttggggacgataggggaggaactgatgatggaggaggcgcaggaggtggtggagtcgatggactcggacggag

SEQ ID NO: 13713 - DNA, 4511 bp, Vitis vinifera
  Intron number 10 from transcript GSVIVT01014504001 (locus GSVIVG01014504001) derived from phytozome v7.0 (chr-ID chr 19; pos 4584998 to 4589508 reverse strand)
acttcagctaattcaaaaagtctcatattcaaaatgtataaaggaaaaaacaaaatttgattgattttctcgctaaccaaacaaagtgtaaaaacctacaaaaacaacaacaatcaaacaaacctaacacaacatttagattacacaatacatgtatacaacacaaacaaacaaagacacacacacacacacatatatatatatataagggtacaaaaggtttggctttctggaagagattggaaatctaaatagctaggtcaaaagaagtcgattttctcagagagaataactttcatctacttcgttgagttttattttccccaaattttttgaaacatcaaaatgaaatcctaaccataaccctctttgccaagatttttatagtcattaaagaaaaactcaagtttaacattgcaaaacaaaaaacatattgttgaactccatgtattctatgtcaacccttcaatgcttgcattagcttgcttggaattctagggtttggttgcaatttggggatttaggaaaattccaattaatgatcgaagaaaaggggttgggttggggttttgggggttttttttaaatgaaatgatgattttgccctcccataaacacgttatgtgttcagcacatgtgtctttcgttcattatagctaacactgtcatacaacaaatgtacattgctcgattttaaatatacgggggcaatgtgaaaaacacgatataggttaaggggtaaagtgtaataaacccaaaaagtaaacaattctccaactaaatattatatatatatatatacattatctttttggcaaaaaaaaaaaaaaaaaaaaactttgccataaagaagttgttaaatttaaggaaccaaattccttaaattaagcaactaaatatcataaattcaaaattcaattccctatcttcacctataaataaaaatgtcttcctttaaaaaaaaaataataataagattagaaaaacaacttcacatgggaaaagaagctacacatagaaagaaaagctttatgaaatcttcttgatagtctaataaataacattagtgttacacacgtgttattctctgtttattcaaaaaaaaaaagtcgctctaggccttcgattgaccttcaaatttatgaaaacacttttgtcattgttcttcgaattgtgatcaaaataaaaaaaatcaaatggaaaatatgtttttatgaagaatattatatttgagtttgtaacccacattaatgaattttaatataatttttctttttacattatttgttctattgttagaaatttctagcacacccgatgggacatatttgcctttgacctcttttgttaaaacaatttattagtactacgtcaatagcatccaaaatgaatcaagttgcacatgtcaacaagggcaatgacaagatagtcattacttaatcgacacataacaccattaccaaccctataacttgtagtaaagcaaaatcaactactacatttttcaacaaaacaagcaagcaagcctacttgtttgctaaaaccagtaaggacctgcgacaagcaccaaccatttatcacctaagcctccttaggggtcaaggtttatagtcctcataatagggaaaaaccctcttcagctttaaaggactctagggataagtcttcctactttgttactaatgccaactccaacaccgactcacattttgggtcaccaaccaaggtgtcaaaggagaatgattccaattgttttgactcatttacttcttccttatcaatgactatgttagtgatgaaaacgagtgccaaatccatggaggaacaattagttgagatgactcataccattgccaaactcaccaagacaattgataggaaagatttacagatagcctccctcatgaacaaggttaaggcacaagcacaaaatatggatcagtcaagtcaaggactaaatcacctttcgaatgttgcaccttttcctggtaatacaccacatgcatctaagatggtgcaagttaagggacaaactatgaaatttaccttggtggcgtcattatttatctaacaacttcaagacatgataactaacataatgcagcatgatagaccctcacaaagtccactcatgtgctctaaaccttacattaaaagaattaataacctatgtatatcatgggttatcatctccaaattttcaatcatttgacggaaagggaaatccaaaacaacatgttattgattgaagctaaaatatgggctctaatagcacatatatgatacgatttatgcaatataaaaatctcaaatcatttaacttaactcaaattgatgttaaaaccttagttatgaatctaacttttattttgagtctaattctaggtttaagggataaaaaaaaaaggcaaaagtcattatcaaccaaggaagaaacatacataagtgagagacttagaacttgtgaaccatgaaaagtccaagaaaggttgaaataagtgagtcatgggcatgaaatactagcaacagatgttatgaaatgagatagagggcatgaaaccataatgaaagaggtttgaagcaaatgcaatcaagttgatatgaaaatttagaacttaaaatctggctacaatatgtactctgaatttgaggtggagtttggaacacttccccatatcatttttttgcatgttatatgcctttcaaagcttgggaagttagaagtccaacacttcaaaaggtgtgcaaatcggagttaaaatgaagaagttatggtcatttgaagataactacatagagttgaagaaccattttgaaatgatttcgaaatccaactaatgaatttgaaatccatttctaaatgacccaaatttcgaaattgcacactactacattaatgtttcgcctcctctacttcgagaattgcatctcgagcaccccatttgccctaagtgagccttacccgactagaaatcatgattttataattttttttaatcatttttaggtaatcatttgaaaaataagtggtgaacatgctgtggaaactataaaaattcaattttttagattttctaggagttttggaattttttagattggagaaaaaacaagagacgaaatcaagatattggtttgttcttttttccatttttattaattaatatatatataatcaataatgaatcttttttattcttttatggcctatgtatgtgaggacatgctcataagaggctaaaaatccatcttgggggtgaaacatgaaaacctaggattagattcaaaaggaaataatgggtgaaatcaaattaataataaaatatatgaaatgttaggatactagtattaatatcaaaataccctctaaagttaatttaacttcggagatggtacaattgcatattccttgatattaaggattctttgtcattcttgatccctagttataagaggtttcgtgattgttatttaccctaagacaaatctacacaaagtggtaaaagcctaaaaaccttagacctaaacttcaatttcatattcattcatatattaggtaatttaatgaaataaaatattaaaagttaggatatgaatcaactctgaggtgtgaaaatcaggttgatctcgttagactatgtattgagattaccataagactattaaattatatactcttgtttcgccaaaaggtttaacttaaagttggattgttgagacctcatttttgaacatttgaattaaagttagtataatcttgcattttttttaatttagatttatttagcaaactcatttttattcaaatagattttcaaatattttcaatttaaagaattttattaaagtaatcttttaaacctaatttgataaattccatagatcagtcttcaaagacgataccaagagtaccacaaaagccatagttattttttttttctaatttttattggccaaattcattatgtacaagacttagtattttagacaatagagaataacaatcacacacattttaaatttgtttttaaataaataggttaattgagtagtaataagacttaactcgatatgatttttgacacgattattattcctagggtttgaattgagttatgtaataggaatacctaagctttgacatgatatgaacatggtccaccaaaccctaactaaaggattttgattcttgacctttgtagtatggtaatccttgttctgttcctattcacctaccattttgagaattttttttaaaatatttattaaaatatgacaattttaaagttatttttaaatcaacaatattgttcagttttgtgtctgaggcacttccaatcagacaccttcaaaatgtgggacatttaaaaatattttttaaattgtaatatttaatatatatatataaatgctgccttaattgaattctttgtgaaaaattgtgcaaattacccgcagcttaaaacgctgtaacaggaaaactaaggcatccatccaaacagtccgccgca

SEQ ID NO: 13714 - DNA, 18083 bp, Vitis vinifera
  Intron number 2 from transcript GSVIVT01028271001 (locus G SVIVG01028271001) derived from phytozome v7.0 (chr-ID chr7 ; pos 5134250 to 5152332 reverse strand)
cacaagtgctttggattaaccttcgtgaggaaccggtaaaaacatttgcatgctgcaacaaaacacatttcagcagcaccttgcatgttttattagttgatagttatgtgcaatatgctgcttttgtatggctgcctattactgcaataaaccaccatcatggttacaattgtttacttcaattgtctgttaaatatgttggaaaaaacttttaaacttagaatgccaaagaatatgtttggtttcaggactatttttgaaggaagtgtcaggaatattttggaggcaaagtaaacccataagttttcaccaaaattctagttttagaaattcagaaacccatccttctctgttgactgctaaattaaacaagtttgggaaagcatcttctagagattgattttcacactacaagtccttccaaaatttcactctagtaccatcccctacgatgaagcggaagtgagttctaatgttctcccaaccatttctgatggccttccaaacccccacaccataacagtctcttacacctttggagcaccccccccccctcttgaaggccgtactttccagtgataatttgcttccataggggatcattctcattagcaaatctccacaaccacttcccaagtaaggccttattaaaggcagctaggctgcaaatgcccaggcctccatcctttttagcagcacaaataatcttccaactcaccaactgaggtctattctctaaggcgcctccgccccataagaaatccctttgaatcttttcaagccttgcatacactctcttgggaatcacaaagagagaaataaagtaggttgggaggctagagagggtgctttttagcaaggtaagccaaccacctttggagagatattgccttttccacagagacaacctttttctgaatctttcttcgactacatcccacaccttagtggatttgtaaggggccccaagggggagacccaggtaggaggtgggtaaactcccaatcttacaacccaagaccggggcaagagtctccataggaacgccttcacccactgggatggcctcacttttgctcaagttaactttcaaccttgaaattgcctcaaaccacataaaagtccagctaagatattgcaactgttctgcattagtgtcacagaaaatcaaggtatcatcggcaaacaaaagatgggacacaatcaacccctctcttcctcttcctcccactttgaaaccagaaataaagccaccatttctttcacttgacaacagttggctaagagcttccatggccaaaaggaaaagataaggggaaagggggtcgccttgtctcaatcccctagagttacgaaagaagcttgaagggctcccattgatgaggatcgagaaggtagccgtagagtagcactacttcatccaattgatccatctatgcccaaatcccatcttgaacatcacaactataagaaagtcccaattgacatggtcaaatgccttctcaatatccatcttaagaaggaggcccgacgtgttgtctttcaatctagaatcaagggcctcgctaacaattagaacaacatctagaatttgtctcccttggatgaaagtttgttgagaatcagaaatcacctcccccatcaccaatttcagcctattagcaaggaccttagcaagcaatttgtacacactccctactaggctgattgacttgaaatctcttaggtcttcggctccttcctttttaggaatgagcacaaggaacgtggaatttaagcttctctggaaggtcccattgagataaaactctctaaagagcccaaaaatatctgatttaacaacatttcaacaaaacaaccaaaaggccattgtgaaaccgtccggacctggggctttatcactgtagcagctactcaaggctgcaaaaatttcttcctcagaaaacataacctctaggctgctggccgaatcttcccccagcgccttaaagtttaggccattaatacttggcctccaatcccctgattctaagaggagggactggtaaactttgcaaactccttctttgatttcttcattagaagagaaaaacacctcattcactctaaattttgatagaaagttcctccttgccctagcattggccattttgtggaagtacttggtatttttatcaccttctcttaaccaaatttctcttgacttctgtctccaagaagtttcttccaaaagggtccacttcttatagtcctcaagagccagccttttagcctcagccttcccaggaataagaaagttctcattctccttggcctcccaactctgcaggcgggagaaggcctctgctctattgtacgagatattacctaccacctccctgttccatttcttcaaatccttcttgagcgcttttagtttctcagcaatgcagtgactaccatagccttcaacaaagtaaccattccaccaactccttactaggtctttgaagccttcaatctttagccacatattttcaaaacggaaggggctttttcctgatgagaagcctccagcttctaggactatggggttgtgatcagaaactagatgagggagaacgaactgagtaatggcagaaaagtggtcctcccattggtccgaaatcaagaagcgatccaatctagaggcagcctgagaattcaaaccccttatccaagtgaaagggtctctagccaaaggaaaatccctcagccccaaatcctctatcacctctgaaaatctcctcatttcagccgtgagtcttggggcattccttctttcctctgggaatcttacagcgttaaagtcccctcctatgcaccaagggtcctcccaaagaccacagatggctcctagctcctcccaaaaatcttccttctcactaccaatcattgacctatatactccaaagaaaatccaagtaaaaccaacacagtttctgaaacgaacagagatggagtaccctccactttccacctccaacttctccaagactctattatcccaaaatagaaggcggcctcctgcggcacccgtagcatccattgatgcccaattaagaaatcttcctacacccatacagtttaccatttgcactgacatttctttcaccttcgtctccattaggcaaactaaatctggtttctggttcctcaccacacccttgatcaactttcttttctcaatatcattaagcccccgtacattccaacaaaggattttaattctcattaatcaactggaatcaactcccaggagctctggccggttcttttagctagccctgatgtcccccccataactaacggagcattccaatctttttaactctctttcaaaacaggtagaacatgattttttcttcttacgtctcttgcaaagggtactactgccagtcctcaacttcagtttatttatttatttatttatttatttattggaaatgacacagagaatattgatagataaaaagaagtacaataagaaggatgagaaatcctcccgccaaagaaaactaaattacaagaaattacactgtaaaactagcaaactctctataaaggaccatttcttatggagtacatgccgctaaccaatcaagttgtaacacattaaggggagtccccttaaacaccttggaatagaaagcccaaagagaagcaaggaaaacaatagagtcccaaagaaactctgaattccttactttatcctaaaaaatcctcgcgtttctttccaccacacaacccgaattagagcgatgctcgcagcttgccacaaaactatccccctcttggaagtagcaaaaccattaaatttgatggacatcatgttaaagatgctcctcggggggacccaatccatcttagctaactgaaataacctgtaccataacccaatcgtcaaggaacaatgaagaaaaagatgatctgctgattccccatgcttcatgcacagaatacaaatatcaggactaagggctttgtagggtcttctcacttgtaacatgtcattagtattcaccttcttatgtgccattaaccagacaaaggacttcactttgaaagaaatttgagaattccaaacgaacttagaagggaaaacctgaggagatccaaaaaattgagataatgctagaaagaaggatttgactgaaaaaagccttaaagaagataatggccaaaatctggcatctggaaccgaagaagatagatgcaatccatcaagtgaccgcatgagaccttctaagtcctctatctcagaatctgataggttacgacggaaattaaaattcaaagagaaaggacgagtaggactgagaactgaagaaatatgaatgtttttatccacgattactctaaatagtcttggatattgggttcccaaaggttggtccccccaccacaaatcttcccagaaccgaattctttccccgtttcctaccacaaaccgagtaaacaaggaaaactcttgaaagacttgtgcaatagccttccaagggcagcgatgtgaccatttgactaaagtgttagcatcccaaccattagagtgtgaaccataaatgcttaatatgacctgatgccatagagctgaaccctctctaggatacctccatagccatttccctaaaagagcgagattcctcaaagaaatattcccaaaacccaaaccccctattgccttcggtttacacacaacatcccacctcactaaatgatcttttttgccttccccaatccctgaccataaaaaatccctttgcaacctctcgatttttacagccactgaagcgggtaacttaaataaggaaaggaagtaacagggcatatgggtaaggcaagattggataagagttatccttcccctgaaggataagtaggccttttgccacccatctaatctacttgagattctctcaatcactggatcccaaaagccgcacgccttggggtttccacccaaaggaagacccaaatagagtataggccagccggaagccttgcaatcaagcatctcagccaatcttgaaagatgaacctgatcaagattgatgccataaatattactcttgtcaaggttgaccttgaactcagaaatgtgcccaaacactagcaaaagactcttgagagtgcagatcttcctccctagtgttagaaaagaaaatggtatcatcagcaaattgcaaatgggacaccctagttctgtttctacccaccttgaaaccctccaacatatttctttccttttctctcaaaggcatcctactcagtacatctgcgactaaagtaaacaaaaaaggggataaagggtcaccttgtcttaatcctttcaatgccttaacccaccctttagcactaccattcaccaagactgcataagataccgaggacaaacatccactcatccatttcctccatctaggactgaacccctttttctccaacacttgatccaaaaaatctcacttcatgtgatcgtaggccttttcaaagtcaattttgaagacgacaccttcctcccctgatcgtcttctctcatccactatctcattcgctatgagaaccgcatccaaaatttgtctcccttgaacaaaagtgccttgagtagagtggatggtttcatgtagaacccctcttagacgccctgagagcactttggctattatcttgtagagactagtgatcaaactaatgggtttaaaatctgagattttctttgtcaaactctttttgggtaatagaataatgaaagaggcattagtgttttgattgataattccgctcctataaaattctgcgaacactctcaccaaattctccttaatcatatcccaacagtcttggaatactgcaatagtaaagccatcaggccccggagccttgtccctatccaactgaaaaatggctttagaaatctcttcttcagtgaaagggaagtccaaccttaacgcgctcttttccgaaataggggaccaatctaatccttcaacactccaagactctcctgtaggacttgcgtagagcttttcaaagtaaagtaagatctcctctgtgatactctcagcattattcaacactaagcccctctcattctccaactccttgatatatttcctatttcgcctgccattagccactttatgaaaaaaacttagagttacaatccccttccttaacccatttcaccctacctttttgtctccaatggatttcctccctccatattaattcctctagctccccttttcttaaggttctttgacttaacaattcagaagtgagaccccctacctgctcaatggcatcaaacttcagtttctttagcagggctagaatttcaacttcatgccctttgataagcattcccaagactttgctaaagtgggttggtttggaaaactcctcttctgaccacccttcttcgcaaggaagttctgctgacaattccccttgcttcgccacatcacaatccaccaaaaccaacgcctcattttccaaaacaggacccggggcatcagtcaataccaccgttgacccatctccgagcatcatggatagaggattcagcgatgcttcagcctcccttggcgatgattccacaagactggagaaggatcccccttctctctcaatccccagagcccagaaaggagtagaagaagaaaaagtgttcccctctcgaagagatcggtggaaaagatggcttaccttgagagttgtgggtttcggcggggaaagaaatctcagctacaggcgacgtcgtcgcttccatctgtggagtcccaacaatgcaaggaatcggtgcgaaggctcttttcctcagacatgacgggcacttagggcttccttgccctaaatcactggagggggcaggggtgttaggcttaaaaggaggcccatacttagcagagacaagggccttctccagcccaggcccgaaagccttagcacaagccaagcccgaatgggcccttgcaactgaatgctggcccaaatccatagaggcaccttcgcaggcttgggcaaggctctcaacagctttgatcttgttcgaggtaggggcaccactccccgagacaggcgggggcaacttttctgggtgcagagaggcttctgaagcagagggcaaggtgcccacgctcccctcagcgcgtgcaagggccacctcatcatccttaagcttcctcgcaccaaaaccatgagagggaagcacagtggagaagcagagctcttcttcccaccacagttgcaaagcgaaacaagaagaaccagctaccacctgcatcgagcttggatgctgccattctctggtttcgatgaggactctggcccactgaagaatccgacgttcaaccgtattttcatccacagccacgaatctcccacaagaatctccaaaccttttgaagagatttcttccccaaagatgcaaaggaagacccaaaattctgacacacacaaggcgcgcaccccctcctcctccctcaagacatccaacggagggattccatatttctaaacagaagcttcttcctctgaaacgtctcacccctgacttagacacccttttcgcttcatcttcaaattcaaactctagaagcaaaaggtttcctcccatgtctaacagccaaaggttcccttccaaaagccaagagtttttcgcccatagtccaaaggagacgaggtcagggaggcggccagtgtctccctcccatttacccacgagacacctgcccaacaactcctcatttctatcaaggacctttgagcgagacttttccttctttatttgctttagcttcgaacaaagaggcttgggtaaatgaagtgtggacagccgagggggaatgggggggaagttggaacccttgtttcaatagacctttcaacgattgggagttggaagaagtggaaatgctattttgttgcttggaggggaagaaggttaggggggatgaggaggatagggtgaagtggatggcatcaaaggatggggttttctcggtgaaatctttgtataggaccatgcagccggggtctcttgcttttttcccttcgaaaattataaggaactcttgtgtgcagcccaaattgagcatttttgcgtgggaggcttcttgggggagagttctaaccttggatcacttgcaaaagagaggttgggttatggcaaatagatgttatctttgccataagagtgaggagtcaattgaccaccttcttatccattgtgaaaaaacaagggaagtatggatggtgttcctttccttttttggagtttcgtgggtttttcctctttcggtcaaggaaacccttttaggatggaggggctcttttgtgggaaagaaaaggaaggtggcgtggcaattgggaccgttatgcttgttttgggttatatggaaggctagaaattcaattgcatttgaggattgtgggctgtccattcaaaggctgaaagtatcttttgtgtatttattgtggtcggaaaccaaattgtggataaaagatagttcttcaaccttaatagaatttatagagtgggtgtgtatgtgttaagggagaggtttttttgttttgccttgtcctttgttgtttgggtccttttgtaagggggtaagtcccttcatactgtaattcggtgggtcgcttctttagcgtctctttgcaatacaacatatacttattgatcaaaaaaaaaaaatcaaggacctctttctcaatttctaaccaaacaacatcacaaggtgcagagcaaccatgtctctgcccagttgaccctttttttcctcaattctgctaggcaaagcttgagatggcatgggattttccaacagagctccattcccctgaaggggagagattcccaaacttcttagtttgctagcaagaagtttccatcccccaacaagtcctcttccttcaggaaaagccaaggtgaatatttttttcttcgcatctctcacaacacaaaacaagaatctccctgctctattactacggatttccagattctagtctctatctccttccgaccaaaacttccagaaaagagctctctcctttagacaacaacaagactccaccccttctagcagcaaagacaagcctttccctccgaatctgatccatgaagagaacttgggacctctttcacaaatcttcccacgtacctttcctttgaactcctctatgccaatctcaaacgtcttcaactcaacaccaaaccaacacttacccccaggagaagctactggcattgtttttgtttacaggattattagatggtataaagtagaggcattacatgtagatagccacttagtaatctaacaaataggcttccagtcaatatgcttggtatgatcacattggactatattgtgagtagtattatttgctaaatttttgtcacgatacaattttgtagttcctttccattgattctgagatgttcaagtattatctttaaccttagtaactcacaaatcctatgtgccatggctttgaattcaacttttgcacttgttctggaaaagagtgattatttcttacttctccatatcacgaaattcccccttaagaatgtataatattgtgatgttgatcttttatcaattaaagacgtgatcttgtacttcttcttcttcctcttcttttgggaagtggttgattagatgatgtggatgggtcaggtagaataatgatgagttgatcatgtactttcttcttctacttcttccttttttacttcttttgggaagcagtttaggaaagattttcaccattgatttgttgatgtggatgggtcaagtagaataatgatgagttggtgtatttatgtaggaagaaaaggagtctgttaattgtattctcctatagtatgagatcacaaatgccttgtgggccttgctagaataacgatgagttggtgttatttatgtaggaaggaaaggagttcgttaattgtattctcctatagtatgagatcacaattcatgtgtgaaaacttcaaatttctcaagcaaagtggggagtttagatgaagaattagcagaaaaggataattatgaagagcaaagttgaaaggatttttgtggagaaaaagaattttcaggtcgagtttgaaggtttgaatggtggaacttgggtatcggtaacagagaggagccgaggtttcgtagtttcaataggttttgatatggaggagctggactggttgatggtgcatttgaagaaagctgtggaggtggaggcttccaggggttttgtaagaaagatcaggggcaagactaagaccctcttgatggagatatgcttcaataacagaggaaggttcatgaaaattacagaatttgttacaaaaaggaaacctttatttcttgtcgtccccgagggcgtcaaagggaaaggatgggaagatcttaggaaggcgatcctatcagtgcaagagaattctgaacgagacggaggagattcgaaggagaagaatggcgatatccggatgaatagggacactttcagaggaggaaggtcatatgcagaagtggtggcagaggcaggtttgaggactggaggttcgttttcagctggaaaatgggccagagctgtaatatgtgaaagccaagtaaaagtccaagactggactcatgaaggaagagccattgcgaggatgatggggatgaaaggaatggtgtccataaatcccatttctgctttcaaaggatgcttctttgtgagttcaacaaggagagcggaaggagttcatgatcagggaagactttcagtgaaaggaaggacgattctgctaaggaaatggtcgcccaaggaaaatatggtggttcaaggaaagttcaggaggggatggctagtattgaaaggcctccctttccatttgtgggatgaaggtcagttgagtttcattttgaagaaatgggggagggtaacgaaggtggcaaaggagactttgaagctggtggacttgacgagggcgaagctatgggtggagatgcttccaaacgtcgtgttaccggcgttgcttgaggtggaagatggggaaaggtcctatacagtagcagtctcagtcaccggagaagacgaaggtgccgacgctgtcacgtctgagttaaaccgtagcaggaacgagtgggtgagagtgggaggttgcgtctctcagtcgtcaaaagctgcagaagggctacgaggtagcgttagggacatcgagtgctacagaaagaggcgtcttccccgggcacgtcatcggcaatcaaggtcgtgtttggcggttaaaggggagataggagggggatggagcaggtcgggccaagctgaagcaatttttgggcctatgcatgaatcccctattaaggcccacaaggctagggcccaaagtgggatgaggcatcgtgggcttcaagatggcccagatgctcctcaagccctccagtctgcatcggctttgtccctttctccccagcgagttgcttcatctacagaggcgattgcgaagctctgtccagaagatgcaagggccggcgacgaggttttccttggagaagaaggtcgggccgttgagattaaggcccagtccctgctcaaccctaggccagcgtcagacaacaccatgggctgtaagtttaaaggcccgtcggggttgggccaaagcttaggaggaacgaagccctctggtttggaagtctggtcgcgaagagaagcaatcgaagcgaggaaggggaaagatcccgctgttcacatgagggatgctacgcaggaggaagagacgacaattacaaagaagacgtggtctaccctcttccctccaagcgccgatcgacgacagggacatcggtgctgcagtgagcctattttcacacggggttcgtcgtcgtcaagtgaaggccgcatcttggaagaggagtctgggatgggctctcagatgaagcgaggaaccagagtgaatcctctctccagatgtcttctggctgatactctttcgaaggaggacacctcggcgagccgcgttgaacttaaaggagggctatcgggacgagcggggttggatcctcgtggctattcagtcatgggttcaccttctaatccaataatcagaggtaaaggactcatctttgaggggttttgcgaaattccgggagccaaaatcttggaggtatgtcagccctcttcttctcagacacccgagtctctttttcttccttcctgtagcccggtttcccctttgatgaatccctctggtccaattcttcccaattcagtccctctttctcagtctcctacggatgaccaaggcatctcaaaatttttttatgaaaaaggtggtgttgactatttaaatcatggtgacattcttgaccgtggtgaggaagagaaccagtgtgctctatctaaccagatgacagagagctgtacacctaaggattccatcgtaaggtcgcataaggaggtttcaggtgatttcctcattgatggtttgtcccccgggaaaatggccaaagtgcgagaggtattaggctctcttgacattaaggtgtattctaggaggaagagtagaggcccctcagggcattgagacttgttggttttggtttggaaggtcagggtctgtgtgttttcccatgaaaattattagctggaacgttaggggtttgggttcaaggaataagcgtaggatggttaaagattttcttaagacagagaatccggatgttgtgatgattcaagaaacaaaaaaggagatttgtgataaaaggtttgtgggtagtgtctggacggccagaaataaggattgggttgctcttccggcgtctggggcttcaggtgggattttgatcatatgggattcaaaaaatctgcgtagagaggaggtggtaataggagctttctcggtctcagtcaagttctctttggacggttgtggacctctttggatttctgctgtttatggtccaaacagtccctcacttaggaaggatttttgggtggaactttttgacatttatggattaacttatccgctatggtgtgtgggtggtgattttaatgtcattaggagaagctcagaaaaaatggggggttctagcctaactccaagcatgagggactttgatagttttattagagaatgtgaattacttgacccacctcttcggaatgcttcattcacttggtcaaatatgcaagagtctcccgtgtgtaagagattggaccgttttctctactcaaatgagtgggggctgctctttccccaaggccttcaagaagccttaatcagaaggacttcggatcactggccaattgttatggataccaatccgttcatgtgggggccaacaccttttaggtttgagaatatgtggttaaatcacactaaattcaaggagaactttagagattggtggagtgggttccaaggaaacggatgggaaggtcataagtttatgaggagactccaatatgttaaagctaaattgaaggagtggaacaagttttcttttggagagcttaaagaaaagaaaaaaagtattctcaatgatttagctaactttgacgccattgagcaggaagggggtctcaatcctgatttgttaagccaaagagcctcaagaaaaggggagctagaggaattaatattaagggaggaaattcattggagacaaaaagccaaagtgaaatgggtcaaggaaggggattgcaactctaagttttatcataaagtggctaatggcaggcgaaataggaaatatatcaaggagttggagaatgagaggggattagtgctgaagaatgccgagagtatcacagaggagatcttacattactttgagaagctttacacaaatccgacaggagagtcttggggtgttgaaggattagattggtcccctatttcggaagagagtgcgttaaggttagactcccctttcaccgaagaagagatttctaaggccatttttcagttggatagggacaaggctccggggccagatggctttactattgccgtattccaagagtgttgggatgtgattaaggaggatttggtgagagtgttcgctgaatttcacaggagcggaattatcaatcaaagcactaatgcctctttcattgttctaatacccaaaaagagtttgtcaaagagaatatcagattttagacccattagtttgatcactagtctctacaagataatagccaaagtgctctctgggcgtctaagaggggttctacatgagactatccactatactcaaggcgcttttgttcaagggagacaaatattggatgcggttcttatagcgaatgagatagtggacgagagaagaaggtcaggggaggaaggcgtcgtattcaaaatagactttgaaaaggcatacgatcacgtgaagtgggattttttggatcatgtgttagaaatgaaggggttcagtcctagatggaggaaatggatgagtggatgtttatcttcagtatcttatgcaatcttggtgaatggtagtgctaaagggtgggttaaggcatcaaggggattaagacaaggcgaccctttatccccttttttgtttactttagtcgcagacgtactgagcaggatgattatgagagctgaggaaagaaatatgatggagggtttcagggtgggtagaaatagaactagggtgtcccatttgcaatttgcggatgacaccatattcttttctaactcaagggaggaagagttgcagactctgaagagtcttttgctagtgtttgggcacatttctgggctcaaggtcaatcttaacaagagtagtatttatggcatcaatcttgatcaggctcttctttcaagattggctgagatgcttgattgtaaggcgtctggatggcctattctttatttgggtctccctttgggcgggaatcctaaggcgtgtggattttgggacccagtggttgagagaatctcaagtagattagatgggtggcaaaaggcctacttatccttcggggggaggataactcttatccaatcttgtcttacccatctgccaagttacttcctatccttatttaaaattctcgcttcagtggctgcgaaaatagagaggttgcaaagggattttttatggtcaggggttggggaaggcaaaagggaccatttagtgaggtgggatgttgtgtgcaaaccgaagacaatagggggtttgggtttggggaatatttcttagaggaatctcgctcttctagggaaatggttatggaggtatcctagagagggatcagctctttggcatcaggtcattttaagcatttatggttcacactctaatggttgggatgctaacactttagtaagatggtcacatcgctgtccttggaaggctattgctcaagtctttcaggggttttctttgattactcggtatgtggtaggaaacggggaaagaattcggttctgggaagatttgtggtggggggaccaacctttgggaatccaatatccaagactatttagagtagtagtggataaagacatttctatttcttcagttcttggtccttctcggcctttcttgtggaatttgaatttccgacgtaacctgtcagattctgagattgaggacttagaaggcctcatgcggtctaccgatgatttgtatctctctccttcggtcccagatgccagattatggccattatcctcttcagggctcttctcagtcaaatccttttttctagcattatctcaaccttctggatctcctcaggactttccttcaaagttcgtgtggaattctcaagttcctttcaaagtgaagtcctttgtctggttagtggcacacaagaaggtgaatactaatgatatgttacaagtgagaagaccctacaaagcccttagtcctgatatttgtatcctatgcatgaagcacggggaatcagcagatcatctttttcttcattgctccttgacgattgggttgtggcacaggttatttcagttagctgagatggtttgggttcccccaaggagcatatatgacatgatgttcatcaaatttaaaggcttcggtaattctaagagagggatagttttgtggcaagctgcgagcatagctctaattcgggttgtgtggtgggaaagaaacgcaaggatttttgaggataaagcaaggaattcagggttcctttgggactctattgttttccttgcttccctttgggctttttgttccaaggcatttaaggggattccccttaatgtgattcaactggattggaaagcggtgtgtactccatagggattggtccttagtgggaggtcgtttgtcttaagtgtattttcttgttttttagttgtctttggtgggaggatttctcatccttcttcttgtacttcttattatattaatatatctttgtggcgtttcctatcaaaaaaaaaatagtatgagatcacaaatgccttgtgggcctcgcttttctctatttttggccataggaaggtctgcaatttggcagcatttagctttttctggtgcatctggaaggaatgtcaaaagtggattttttaatggataaagatattggttgtcagtctcaaagaccattaaattatctaatgatggctgattttggctcttgttcttgtttggtctttttaatatacatgggggtggagatgtgggagatggcatgagatggagctcagtcaaggatggtagattcttagtttagtcccaatttaagggtatgatacaagggggtgatggtatattgcatgttgcaggggtatgttgaaccttacatctaaaggagtatgggattcatgtctacttttagagttgcaaaagatacttaaccactttaggaggggaaaaagcctctactttaatattgcatgtatactaggcatgaagatggtgcatgtgttgtaaaagatatttttctatttgcagagataattgggtcctcatgaactggtgttgtatgggtaaaagattaagaggaaaccatgttttgatctgtcaagaggaaggtttttgaaattgcattggtgtgcctaccttggtatatatggagggggaggaatcataggaattttctcggcaatgagttcttgaatctaaaactaggagtaatgtgccctagatccttgtttgtattgttggtggattcattttgggaggggaagagtggccttttcagatttggtttaaagggagagaagaagcaaggttgtttgctttattttttgtttttgtttttctctcctcttctccccctttgtctctgtctctgtctctgtctctctttttctgtttagggggactggtgtattgccaagtagttgggtacttggattatgtaccaatcttggggctttttaatgtaattttcctttgcctataaaaaatattaagaaggatagtatgaccttgaagctactcagagttgctgcctctctcttgtgtaagaaagcggcctccttgttgccaaaggtttgttgctctacctctactgaagccaaaagtaaataacaagaaccaagataagtctctctctcaaaaaaaaaagggagggtcaacgatcatcacacccattctcttgaaggccatttttcctcctgatctcttaatgccatagtatatttcttaagaaatcttcacaaatggttccctaaaaaggcaatatttctaggatacccaaggtctatcccctttggattggggacatcttacaaactccaaaccacccaaatgctctctaatgccttgccagtccactcccaagggagtccatttgaaatttctttgccctcctagctacatgtattgggacattaaataagcaaaggtaatacattggatactagaaacaaaagtttgaattaaattgatgacaacaactcagaacactgatctgccagtgttattatcaacattttgtttggtgtttaaaagcttgatccacccagattttaagatcctcaagcatttattggatttaactattttagtgctctggtttatttattatttccattctattcttgaaacaggtggtgtacatta

SEQ ID NO: 13715 - DNA, 6450 bp, Vitis vinifera
  Intron number 2 from transcript GSVIVT01021726001 (locus G SVIVG01021726001) derived from phytozome v7.0 (chr-ID chr1 0; pos 10104962 to 10111411 reverse strand)
gcagagtagagccatcatggtagaaaaagttgttattagctccagtcaatatgcaactctgcttgaataaatatttgattatggaactagagaagaatcagaaggttagtctgtaaagtatatttttacttgatgtttctttaattaattggttttctatcaattcgttgtgaatgaccattctattgatcattactaaactttgtatttattcctcttccaactttactggaacggcatttttagcaaacaggaccacaatatgatattattggaacttacgtagccccctagaaaatgtaggaaaacattaaaaacaaatcagaactttgccccattgcagatttgctaaggattgtattcattggtatctttccctttagggggctcaatgcttactggctaagtggtggtatgattatactttttggtgctcttttttccccaaatgttcccctttttttcttttttcttttttctttaatgttggggttgatgcttcttcttcacagttggttttgggagctgaaaatttgcatataaaatgctgacagttcttttccaaatgttttcacttttggagtgagtttgaaggacattttttgtgatgtcatttggtgttcttttttttccccaagctgttggggtttttccaatctcctatttgttcgaattacaacatatagttgcttagataagaccacatttggttttggaatctgtaaaaattgcatataaaatgttttggaaggtttaatctaatcaagtcttcgtcttcttctgtttctctaaaaatactttgtatatactgtgatgatggctcaaatatatcagatttgatttgagaagcttgaaaaatcgcttataaaatgcagataattctattcagaaggtctaatctggtctaaacttttctttttttccttctacttatatgcagaattgaatttactggtcttcaatttgtcctctttcctctgaaatgaaatcaaatgctaaaaattacaaaatttgctgcagcttattattattcaaacattactatagctcagatgaggtcacatttgatcttggaaggttgaaaatttgctgaactgctgatagttctgcttgaaatgtttaatctgatccaatctttctcattttctttttgttaatctgatcaaaattctatctatggaatttcagtgtcttttcatttcaatgacatcaaatagcaaaattactaatctttatggttgtttcctagtggtatttctgtctaaaattcgtagtttggatggttaaaactgctaagtctttaattaatgttctcatctaagaatgcatcttggaataatagagtgtctccatggttggttttcaccttggaatcaaaggccatatgagtatgagagtctaggactgctgcagccagtgagctatggttcaggagaagtctggtttttgaaattctactgcatcatcaagttacttgcttccttttaaacaaattgtgacagagttaatctaaattaacggaagtttcttttggatgcattattcatataaactctgtctctgcacaacccttttttttcatgtggattatttaattcttaggctactggttcaccttcttgcagaagataggacagttcttagtttaatttcttgtattctctaaaatccaaaatagcaatcaaagtttcctgtgtgacagttttgtaagaccattaaataccagattgagagcttgtttgggattgattttgaaagagagtaaaagtctgtttgacaaggattattgaaagtgtttctaatctttttaatgtttgaaagataaaaattttcaagcattaaaaaagtcaaaaacgtttcttaaaattactaccaaacggactctaaaaacgtatttaacaatgattttatgaagtatttttaaatttctaatacttgaaaaataaaaattttcaagtgatggaaatgttaaaaatactttctaaaatcactatcaaacacactctaaaaatagtttgtaatatttagaagcattttttgttaaaaataaaaaataaaaattgggtatgtagtaaattttttaaaataactttataaatctgaaaaatcatttgaagcaatttcaagacaattattggtagatgaatcttttaaaaatcactttaataaaaaatattatcaaaatactatttttaatttgtattcaaatattaagtgatttttttaaaaagcattttctaatgaaagtactatttattaacaaaagccttatagataaaagtccttaaaccattttaattggaacgactcccaaatgggtttaaagattattatggattgtttcattattgttagaatgcaacaatgttattattaaatctaaggacaggtcacctgaataatgatggtcgaatataataaaaggtatgacctactctcaccggacatcaattaggttttagatgagatggtcaaaattcgattttagaaatggtatcaaagtcttgtttagtaggggaggtcacgaatttgagcctcactccatattatttaggaaggtaatgtgtgtattagggctgcatataagggagggggtattattaaagaagatatatatcgtcgacccaaatcctagaggcttaaatttttaggaaaattggctttaacaatcaaccttgcttattgaggggcttctattgaattccttgagagttgttttttcgggtgcatgattttctgtatgtattttaagagagattatttgagaaaagaaagcagattgcttcaaaacattgcaatagagttgatggaaatcatgtgtaggaggggaagaaaattcctttgtactaaaaaaattacaatgagaatgttgttgggctaggcccaatggtccagcacatgagtgttcggtgtggtcagttattgagggaaaatttatcaatttggaccgaaccgaactgattctgctgaaagcctcaaacccaatagcataatcatttacttttcccgttttgatttctaaattcaaataaataagtatgaagaaggaatcactcacattgattgtagggaatgacagcaaagtttggtttcgattctagcgacccaatttgggcctaattttaggcttcaattaggtcctcaaggccagttaggttccgtttttagtttggactcttataaccaaggcccattgaattttaatctagatttatttttatttttaattttattttatcttgggctcttctaacctctagtccaacttcccaagtaatctaagggctttaatgttgcgaaacatttgctagtgcaagtgctaaattgaaatcataatattttaggaacttcaaataaaatcatcttttgctaatttttaatccactaaagtagtttaatcatcaatatccccttttgggaaagaagggtcggattgttatttaaaacaaaataccagtacattttaaaatattaaaacacccttgtgtttgtaggcaattcaattgaataagtgttaaggagaattaagaggatgaaagcaagaatgtggtaatgtgggggactacaaatcatttttctccgattcaaatttgggtgtcacctaatcaataaaagactcgaaatcccatattatgttttgctaatataatttgtcaaattatttcccagtagaaggacggaaaagaactattgatacttgtttgattctaagcatctaaggattctctaatctaaagggttataaatcatctaggattcaaaaaaagattttttttattttttattttagtagtggaaagtaatcagagagttttgatagcccttccactaccaattgccctctcttcttcaagatgatatctttttttttttttgcattcttagagccttttataggcttacaaaactctaccattaatacatttatttactcatattaatagtcaatattaaaggaggacttacatttataataattttaatattagagaatgtaaagcagtcacatctaccacttgtatttataacactccccattagatattcactacacaagagaatatgtctcattaaaacctttttaataaaaaaactctgtgagaaaaccctaataaagggaaaaaaaaagtataatgtttttataattctttagctgctcttggtctgttaggaatgtctcattaaaaatcttgctattaaaatctaaagggacaaaacttagatgaaagggaaaaaatgcggtatactaacatttttttaaaacatacttctcctcatatcgatatccttgagtttacatatttcaatttttttattagcctcttaaatgttagagttatcacttgaaaatatttatttaacatcaatttcactgctcttgagttcatatgtataaaagaattttggtgaaatatgtttggttttatctcctttaatataatctcttttatttactcaataaatgtaacattatcttcatataatattgttaggttgtctttaatagaagataattcacatgattttcgaatatgttagattatagatttttaattacatacattcacgatttgcttcatgatgatgtgaccaccattgtaatgtaacaaaattttcattaaatatacctctattgattttttaggtatctgacggttacttaagtaactatcaaagtttttttcacttagtatagatggatatattttgagtttaatgtgatacttgatttacttcatacatttccactagataatatgatcccaaatcatttttagcaatacaaaacatgactttttctaagatttatttagggttttatttttcattttattttcctttaaaaacaagcaatggctccaaataaaaaataaaaataaaaaatccacaaaaaagtaaaaactaaatttgccaaaaaaataaatgaaatcatgttatgtcattgtgtggtaagggctagagcgatgttttaataaagaaatgaaaaggatgacttttagtatagtttgtgtacaaaccttggttatagaagataggggaagcaataagaggtgatgtttgttttttttatttattattgaatgtattttgcttttagacattaaattatgtgttttttttttctacttattacttttttttatatataaaaaaattgattgaataaaaaaaatcaaaatattttattatttgttgaatgctaaaaaaaactcattgaaacaaccaaaataaaatcctaatacaaccttcaccctattaatacttaataaaaataaaataatagtaaacaaaacaaagtacttaataatattaaattgtatttggaattaagtgaaaaatcaaagaccaccttaaagaatatctgaatccaattaaatgttttcactatggtaaaaaatgtcaagtggaaaagaatctatcacaactatcatattcaagatgtgatgaaggtttaatattaggtcattataatataattatcgtagctaatttaatatttaatgaatattattattaaatatttataatttattctagaagagcactgttggcctgtttagagttgactaaggagagaggtaaaaggcaaagaagataacaatcaaccaatcaaccacaataaacctaaaatttatggccaatccttggacaagtcgtaaccatcttcccatatggaggccagaggaagagccgtgaagtatataaaaatacttgtttctagaaatcatctctaatatcctctataccttccatttaagacgacgtcttattaaattattaatttctttaaatttgaaatttgaaaaaaaataaaataaaatattcttttttaaataatgattagttagtttgaacaataattacaaaatacctctaaaaaggatatgttttgtttggctaaagggacggattaaaatatcatgatattttcgttcatgtatcaaggtaccccgaataaaaggttcaccatgaacctcaaccaaccattgagacagatttgccccttattaagcataccacaccaaatatatatatacattaaaagtcctcaaataaataaaatattaaaaaataataattataattaaattttttttatttaattaatgataaaaaaatataaaaattattatatatatcatcatcataatttattttatattatttaatatgattaaattaaataatttataacttaaatattaaatatattttaaaattagatatattataatcaaattttattattaaatagtattttatataatttaataataaatatttttttatcgatattattattaaatataataaattatatcatatataatattttttttataaaatcaatttatatattttgacattgtcaaaatatccatttaaatccataaaatcgagtttaatctgtgagtccgatattttcatcgttaaggacgaggagaaagc

SEQ ID NO: 13716 - DNA, 11193 bp, Vitis vinifera
  Intron number 10 from transcript GSVIVT01032128001 (locus GSVIVG01032128001) derived from phytozome v7.0 (chr-ID chr 13; pos 22394808 to 22406000)
gttggacgtgctgcctaccataagtatggacaatactcagtttatagaagttatttcttggttttcttattttctgaaaacattattgctcaaatgactggttttatatgaaagaattttctttcattatgcctgtgtgtggaatatgaacttccctttttgatttagtggttgaatcaatttgcacttagtgtcgtatatgttctattatgtagggtaagttttattttatattttcaatagtgtattcattttttgggaaaatcacactagtctttcaagccttttaacaattacagaaacttgagatttctacagtcactcactggtttattagtgctatcatagactcttgcttagttagttggtcatcaaatccagcaaaaagaaatgttgatatcagttaatttttttttttaaattaaattgcattgagataaaagactaggagtactaagagtgaaaagagcacacatctacaaagtctggaaaagaagtccttttacaaaaaagcaaatataattcctgctggagaaagttctaaatgccatatggcttagctcagaatatatatgaattccttgccctcaaaggttctatggtcctatccattgacaagcctctaagcgcataatgaggaattggtatccaaatgatctttgccttagcatctttggtcttgatctggtacattaaaagatctattattatatctaccagcttgttaatgagtaatgttcatgggactaagttttggtttgatgtttggtgtggggagattagtcgtaaggattgcttcttgactttctacatcttggaaatcaagatgttggtagctgattattggtattcggaggatggttttggtgattggaatttgaaatttattgggagcttttggtttgggaaatggaggaggtaggaagccttttttggcttgcatttttcaatagatgatcaaggtagagagagagagagagagttttggttggaggacctgaaagaagggggttatgttcttggctatcttgtaggtctaatattttctttttgacttcaaaaatctcaccttggcaattttttttttttttgggaaacttaatttttgcagcctactgatttggagattgaggaccttgaaagattcatgtcctctctcactcgtttgcacttgtctccatttgtcctagatgcaaaagcgtggtcattgttttttcaaattattctcattaaaatcattctttgtggctttgtccaatatatcagatcaattactttctctttgactaaattttcatggaaatctaaagttctatccaaggttaaagtctttgctcggctagtgacatacaagaaggtaaatattgttgggtgcaacaatacctactcttaagcctagggatgggttatgtgaatgatgatggtcaaataccattaaaggattagtctaccatcattggataccaattgatttgcaaatggaatgttcaaagtttgattcaaaaaatattaatgatatgctatagttgaaaaaaccatcaaattcaaaagatggtcatcaagattaagggtgggattacagtcttgttgagaagatggtcgccaaaggaaaattcagaagtagaggggaaatttagggaaggttggatagatttacggggtttgccatacctaagatgggctttgggtctcgatggatggagtggatttggtggtgcatttcaactgcaaaattttttgttctggtcaacggggtgccagcaggctttttttccaattccaaggggctgcgtcaaggagatcccctttttccttacctttttgtcttgggtatggaagtgctaagtgcacttataagaaggtctgttgacgggggattcatttcaggctgcagacttcaagggagaagggggatggagatgaatgtgtcccatttgctctttgctgatgacacaatcattttctgcgaagcaaggaaagaacatctaacctctctaagttggattttggcttggttcgaggcggcttctggtctaagaataaatctagctaaaatcgaattaattcttgttggggaggttgaagatattgaggaaatggcagtggagttagggtgtagagtggggtctcttcctactgtctatctggggctgccccttggagcccaccacaagaccttgtctatgtgggatggggtggaagaaagaatgaggagaagattatccctttggaaaagacaatatatgtctaagggcgggagaattaccctcattaaaagtacactggccagcatacctatctaccaattgtccctttttcgaatgcccaagttagtagcaaaaagacttgaaaaattacaaagagactttctttggggagggggaaacttggaaaggaaaatccacttaatcaattgggaggtggtgtgcactcaaaaggagaaggggggtctaggcattcggaagattgatctcctgaacaaggccttgttgggtaaatggatttggagatttgcctttgaaaaggaaatcctttggaagaaggtgatcggggtgaagtatggccaagcgggatttggatggcggactaatgaagctcgcggaatgtatagagtgggggtttggaaggagatcctgaaggaggcaaactggtgttgggataacatagggttcaaggtgggtgaggggactaaggtcaagttctggatggtgtggcaacacggcgctgtcccaaaatttaccccaattatttgccttggcggtccataggaacgcaacagtcaatgaagtgtgggactcaagccttggtcaaaggaggttgaaatcttagattttccagagattctaatgactaggagctggatttaataagaaagctaatttcatatgctgagggacttcaggatttcttcaaaagaggactcaatgttatggaaaggagggggtcatggtactttccggattagggatgcttataatttgctggctgctcgtagtgccaccgccttcccgaaaaaaagcatttgggtggataaggttccaaccaaagtttttttttttgcttgggaggtcatgcgggagaagatcctcactttggataggctccaaaaacaggggtggcacctccttaatcattgctttttgtgtggctgtgaagaggaaaatgtaaatcatattcttttacactgtatagtggttagggtcctctgggagatcgtccttgccttatttggggctcagtgggtgttcccagagacggtcaaagaggtgttatttagttggagggacccttttgtggggaaaaagaggaaaaagatttggaattccatcccgttgtgtattttttggacggtatggaaggaaataaatagattagcttttagggggggctctttatacaaaaactcaaaaattcttttgtatgtaatttgtagagttgggctatgggaaaggagtcctcttcgcttttaggctttttggagtggctatcggctccttaagggctggtgaggttgattgttcatgtgttttttgtttttaggctactatgtatactacctgtatgctttgtggcttttcgccctttaatatattttgttcttcatttataaaaaaaataaaaatttatggtctgaggtacacttgaagaaaattatggagcagtgggggagggtgacagagatcaactggaaaatgttgaaactgtttgatctaagtaaggcaagggtgagagttgtaatgaaagaacggtcggttctccctgctttggattgaggtgttggatgggggatgggaattcacagttttagttgcactgactggaaaggaagacggtaggcaaggtagagagatgggtgagtcaactcggcagaaatccgagcttcacacgtggacagatggtagaaagagggttgaggaggctagatcaacggctggaggggggtcttctgttggggcagttggaagaacgaaggaggggagagcttgtcaaaaggctgaaattgctcctgcagggacacgtagagtgaatagaccgacagtagggaacaactggtcccaacctccacggtctttcagtttgaattcaaattttctgagagcagggcatgctgtgccaaggcaggctggagaagcatgggctggaggggacaaagcctagtcaacttttgaggtagggcttcgggcctccaaacaagtgagaagggcccaatcttctcacaagcccagtccatagtctgaatttgacgtgggttggaagaggggagtttctttaaaaggcccgattcggttgttgggccaagatttaggaggcaatcaagccttttttgcgaagggccctttacacagtgttgatatctctgcaaaggggaaggcgaaggtagactccaaggattctgaagctcaattgaggggctccacgttgaagtgtggttcaaataaactatggaatgctctgctccctccaagtcttggatgccgacaagggggtcgaagtcgaagcgagcctctaacgattgagagatcgctgttagtttgcgatgctcttccaatggaagatgatttcgaagcaggaacacagttggatcaatgctttagtgcaagtccaaggcattcgtcagggtttcgaaaaaagtgtttcgagaaaggaatgttgccgacgaggggagatgcggatcaaaggactcttcttatagctcattttctttcaaaggggaaggagaaaatgtgcaatttctctaaaggtgaagacggagcaggtattaagggttttgtgggttgtcctcattgtggatcttcagtcacggtttttccgtattttcctgcaaccagagaaaaaggcttaactctgtggggtactgtggaatgatggtagtggaaaatttcgaggtagcttctcatcaattttctcagccttctcagccttttctttctcctttctctggtttggctcttcgatactcgagtccttctgttcctgatcttcccacttcagccttttagtctcagttttctacgaaaaattgagtactatctgaaattttttcaaaaaaaaatggcgttggggctttttgtcttgggtctgttggcaatcctaatcgtgatgttgcagtgtcccagttagctagtttgaatcttttgtccaagaattttaaatctgttaagaccaagcccaacacgcctaacccgggtatagttagtcagggggatgcagagttacccccgatgggtgggttccaaatagaaggtctctcccccagcaaaatggctaaagtatgagggattttgatggttttataagagattgtgaactacttgatcccccattatggaatgccccttttacttggtcaaatatgcaagagtcaccggtgtgcaagagattgggttggtttctctattcaaatgagtgagagctttcctttcgtcaaagccttcaagaagttcttcctagatggacatcggatcactggccgattgttttggataccaattttttcaagtagggcccaatatgtggctacaacatccaagtttcaaagagcgctttagtagttggtggagagaatttgatggaaatggttgggaaggtcacaagttcatgaggaagttacaatttgttaaggcaaaattgaaagtttggaataagaatacttttggaatgttaaaggaaaggaaaaaaaccatcttggatgaaatagctaacattgatgtcattgaataagaaggggttctcttttctgatctttctactcaaagagttgaaagaaaaggggagatagaggaattaattttgagggaagaaattcattggagacaaaaagctaaggtgaaatgggttaaagatggggataacaattcaaagttgtttcacaaagtggctaacgagagacgaaacaagaacttcatcaagttcttggagaatgaaagaggtttggtgttggataattccgagagcatcacagaggagatattactatatttcaaaaagctctactcgagtcctcctggagagtcttggagagtaaaatgcattgattggtcccctatattagacgagagtgcttctaagttggactcccatttctccgaagaagagatctttaatgccatttttcagttagatagggataaggcgccagggcctgatggttttaccattgcagtgtttcaggattgttgggatgtgatcaaggatgacttagtaagggtgttctcagagtttcacaatagcgggattattaatcaaaacaccaatgcctccttcatagttcttttgcccaaaaagagtcagtcaaataagatttcggattttagatctattagcctgatcacatgtctctataaggtaatagcagaagtcctgtcagggcgattaagaggagtactacacgagactatacactctactcaaggtgcttttgttcaagggagacaaattttgaatgcagttcttatagccaatgagatagtggacgagaaaaggcgatcaagggaggaaagagttgtattcaaaatagactttgaaaagacttatgaccatctgaaatgggattttttggatcacgtgttggagaagaaagggtttagttctaaatggaggatttggatgagaggttgtttgtcttcggtctcttatgctattctagtgaatggtaatgctaaaggatgggtcaaggcatctagaggtttaaggcaaggtgaccctttatcccctttcttgttcactattgttgcagatgtgttgagtagaatgatgttgaaagctgaggaaataagtgtgctggagggtttcagggtaggtagaaatagaattagggtgtcccatctgcaattcgcagatgataccatcttttttgctaactattacgcggaagaactgcaaactcttaagagtttattgttagtgtttgggcaaatttctgggcttaaggtcaatcttgacaagagtaatctttttggcatcaaccttgatcagaatcatctgtctaggttagccttgttgcttaaatgtaaggcttttgattggcctatactatacctgggtcttcctttaggagggaattcaatggcttgtggattatgggatctagtgattgagagaatctctaggagattagacgggtggaaaaagacttacttatctttcggtggaaggataactcttgtccaatcttgcctttcccacattcctagctactttctttctctgtttaagattctcgcctcagtgggtgcaaaaattgagagattgcaaagggattttctttggtcaggggttggggaaggtaaaagagatcatcttgttagttgggatgcggtgtgtaagccgagggtaaaagggggtttggggtttgggaagattcctttaaggaattgtgctcttttagggaagtggttgtggaggtttcctagggagagtacaactctgtggcatcaggtcattctaagcatttacgggacacactcaaatggttgggatgccaacactttagtcagatggtcacatcgttgtcttggaaggctattgcacaagtctttcaggatttttccaagtatactcggtttgttgtaggagatggggaaataattcgtttttgggaagatttgtggtggggggattagatcttcaaagtccaatatccaagactatttagagtagtcacagataaaaatatttctatatcttcaattctcggttctgttcgccctttctcatggaactttaattttcgtcgttcctgagatagaagatttagaacgtctcatgcgatctcttgattgtatacatatatccacttcggcttcagatgcaagatcatgatccatattttcttcaggattgttcatagtcaagtctttctttataaccttgtcccaaatgcctgatttatctccacttttccctactaagtttgtatggaattctcaagtacccttcaaagttaaggcctttgcttggcttgtggcacacaagaaggtaaatactaatgacttgctacaattgaggagaccccacaaagctcttagtcctgacatttgtaagctgtgcatgaagcaaggagaatctgtagatcatcttttcctacattgttctgtggcgttggggtcgtgacacagattatttcagctagccaagatggattgggttcctctgagaaacattagacatgatgttcatcaactataaaggttttgacaactccaagagagggatggttttgtggaaaaatgcgtgcatagctttaatttgggttgtgtggcgggaaagaaatgtcaggatatttgaggacaaagctaggaatttagagaatctttgggattccattcatttccttctctttgggctttttgttccacggtttttaagggcattccccttaacaagttacaactagattggctagcagtgtgtagttccaacgggacggtctagtcaagggagattgtttgtagttttcatagtgtagtgtcttgttatctttttgtgatgtttagttttatctctggtgggaggattcctcatctttctattgtacttctttttctatcaatatatacatgtgttgtttcctataaaaaaaaaaagaccatcaaatcccttactcctaattggtgcatcttatgtatgggaagtggagagacgattgactatttctttttatattgtttgataactttagggttatgtgacatataattcggagaagctaagatggattgggtttcgcttaggagtatatgcgatatgatgatcatttcatgtaagggtttagggagttccattggaggcaagaccctttggcaaatcgcttgtctcacattggtttagattgtgtggtaagagggaaatgctagaatctttgaggataagtgaagggacctttgggatgctgtgggatctatgttacttctatttctctttttgggccttatattctaatatttttaaagacattcctctcaatgttattcaactcaattgacatttagtgtgtagataaaaagggtttggacgataatgagaggagcttagttcaggtttgaggagatgatatccatgcatattgtatgtgtctaaactattttgtataggtttccttgtatagtggaggagtttggttataattgatcggtttttttgtaattgtggggaggattcttgatccttctcgtatactttttatctattgatatatcctttgtttttgataaaaattatatgttctttttcatgttggttgattcgggctcttgtaaaccatgcaaggttggttttgctagataggatgtttgagaaaagattgccatcttagactagttaacgcagagtggttacacctaaagaggagttagcaaatcttattattctctatcgtacagtggtgctttgggacataatatcctctattttggcatatcttttgtcctattttttctcattcatggtaccattgtggaaagaaaagtaaggttgtttggaggtttcttccaagttgtatattttggtgtatcttgaaggaaagaaattagagagtggagcagctagtattccaactgaatgacattttagaggtcatggttttcttggtctttgtattctcctggggaatcccgtccaaggcttttgactttttggttttccttgtactcttcattttcttctcaaggtgctcattttccttgtatatatattgtgtgctggcatttagcccactttatgacattttaatatattaactacttctttgtcttgggatctcgttttccaatgcaatttaattgatgtggagattgtggatattgaaagactaatgaccttactttgctatgttcatttgactcctcctactccagatgcaaatgcttgggtaccgtccttttcgggagttttctcagtaaaatcagttttttcagccttattcaatgtctcaatttttttcctttttacccagctaatgtcttgtgaaaatcaaaggtcccttctagggtcagagcctttgcatggttagtggcacataagaaagtgaataccaatgacatactacaattgagaagacttttcaaaatccttaaccctgattggtgcatcctatgtaggagtagaaagacgattgatcatctctttttgcattgtctgattactttgggattgtggcataagatattttcacaagctgggatggcgtgagttaagctaaatagtatttgtgatatgatggtgatttctttcaagtgttttgggaattctattagaggcaagactttttggaggatcacgtgtttctctttgttgtggattgtgtggagagaaaggaacgctaagatttttgaggacacttggaagacgccagagttgatgtgagatttgcttcatttctatgtttctttttgggcttactgtacagacattgtaaaaccttatcctttgagtgtaatttggcttagttgtctttcgatatgtacaccttagggttgggtccacagggttaggagttgttataattgtgtaggccttttgtactttttgtatagccattgttggttagtggaggtttactcagttcttttgatcaagtttgtacatcatgaggaggatttctcatccttctcatgtttctattctcaattcataaatgtgtttgtttctggttaaaaaaatatatatattagctactctataagaaaaaaagtcaatgataaattcttgaggttcgtagcaactgcacaatggacggagatgatcacttactttgcttatgcaatcttgataggtgagaatcaaaccctagtaacaagatgatcttctgtcaggaattaatttctcattgttgtccatatatagaactccaccttaggggtagaatgagaagtgatcaaggagggatcctgtgtgttttaactcatgacctcccaccaaaccagactttgataccatgttggacaaccaattttcttgaaagcttaagttgttatgactagggccatatatcatactttgcaccaactttgaagttttgttttcctcttgaagagaaaagacttgcttttgaattttttagttgttttttccttagatattttttttcgcccttgctattaagccctctttctttgtttattcccattggttgatacttgaagacttgactgaaattattgttcattttcaacagcccttggtatactctgggcc

SEQ ID NO: 13717 - DNA, 3843 bp, Vitis vinifera
  Intron number 1 from transcript GSVIVT01015401001 (locus G SVIVG01015401001) derived from phytozome v7.0 (chr-ID chr1 1; pos 3290124 to 3293966)
agctagggttgttcttcttcgagattccgctgaaggtatgtaatcagtctttgttgtttctgtttctatttggttgctgaaagtttgatggggaggaatgggaaatggataggattcaaactctggcattgttttgtttttctctgtttcctttgaaatcaaacgggcggttacgataattttggtagtgcaacacatgaattggatatattagattagttcttgaagtcatgcagttttgaaattctgaaacatggatacaagattttaagggtgttctgtggatgaactaacataaatgtagagctgactcttgtatttttttcttttctgatattgaattgtgctttttctttaagtgtttttgggatgaatcaaggatgtaagattaaaattcaacattcccataaaaattttgggcagctattttgcttgtttagggttttgtttctaacttatgtctgtaggagctaaaaaaattctcctaaaaatcgtagaaatataaacaggataaaagagaaacaatccaaacaagtacaactctaaagatgtctcgtctttcttttccatcaatcacatcaataaacgtgatttgttttggagccacgttttacaaaactgtacagaatgataccaattcattggatcatatgcagatggcatcctattactcggatgtgcatcttcttcctagtactcaaatgtgcatctcctcagttgttgtttgctctcccccgaaaactttgctttcctttgtccttcttgcttttagcccaaactcgtaagttataatatactactccccatctttacacctttggcttgaagaaaggtggcaagggactcaacttctcgtagttgatgggaactcttcttgacaatcttctcagaggcttctcagatcatcttccctattctattctgatgggaactctacttaacaatcttctcagaggcttcttggatcatcttccctattctattctgatgggaactcttcttggcaatcttctcagagaggctttttggatcattttccctattttattcttgttttttagtgtatttgaagttgtttggacttcgggcggccttcgcatttttgctaaattttgtgctaaaatacatttggtttatttatttacttttaatatattttttctaaggagtattttcttttcatccatctcttaagtcaattcgtagattgaacttttataagatattttatcagtctaaaaatagttaatttttagtagataattatgtgattgaaattttattttataaaatccagaaaaaattaaagagggtatgcaagacatgtcttcttgtgaaaccttgaaagaataaaagtcttacagcaatataattataataataacatcaaaactataatgatgagatcagtgtttctaaaataaaagagcttctataaataaaatcttgaaatggtaattataattaataaaactataaataaatgaagtttaaacccacaaaaactcttctctatcattctcccatgagatttgtgagaaagttttggatgctgatactgcatgttgctttgtactccgatttctaattttgagattaaacacccttgctttgcactttgatgagagattgactttttcatcgttcccacaggtgggatcacagtgtttgttttaaaaaatcgtcgtccttttcttctttctttcctttatatacatgcgattttcaattataatacatggaggttggacatgggattgcgagccacatccagctcccacattctatacaggcaggatatgctagttgtagtgggatattgccctgaagttctcagaagaattatctggtaaccatgcaatggctagtccgggttcttggctgtgttccccacagtttggttgtcttttagcaaagttcagtaaggtctcctttcacatgattggtgaagaaaatttttgaaggagggaaaggaggacatcatgtaaatctattaaaataatattagaaaacttgttcatggagtatcaattcttacatgattttctaaatttaaaaattccaacatgtcactaattcaagcacacgagcagggaatgcctgattattcataattttaggcataggaacattagaatgcttgagattctgctctcttcacatttcaattctggtgtgatagcttatcacaggaattttttattttgcaacagtacggacctggtctatgtgtttaagcagattgttttaatgagtactattccatcatggacttatgccttactgcactgttggttaatatttggaattgcatacgcactcatagttattgcatactaagttgcagtacactctggactgattctcatgatatacttcattatgaatatcctgtatgctaaaactaatgaggaatttccaaacaagatgtttcacaaaccactggaattagtttttatatatttaggccatcaaactagattaagttatgtaaccaaagatgtttcttattgatcttacatcccctaattttttaacaaagttgttaaatgggttgtgtttaattatgtacttataagtggttttagtttggactatattcttatgtttttttcttatcttcacttgtccaatgttacctttgcctatagcttgtcctaggctgaaagagaagagggaggttagattttaggttgatggcctgcataaaaccttcagtcaagcttttaggaacctaaatttgaaatctagaaaaattctttgcctaaatatatggctcctacagaggcctaggtagagtttttaaaataaattctgaagaatttttatgttaaagttatataagtttgtagcctaagttggcttgttggcttgctttacagtattgacccattacctagtaacttaaacttttggtttaattggtaatttaacatggtatcaaaatatcagttttcaaaaggtcttaactcataagttcagacatcaccatgtgtttattttcccatttgaacccaggggcaaattcaaggagtctgcatgtgaggctggtgttaaaggtcatagcctaagtttgtccgttggcttgataacattgttgtctcattacctaatagcttaactttttaggctaatttgtagtttaacaggtaaagtgccccattaggcttgtgatttatgaaaaatacatttttcaagtaggcctgatctgaaggggtgagaggaggagagctggtgctggataagtcaaagagaggatgtataatttgaaggtgttgaaagtggggggaatgttgaaggacttgaataaagctttaattagagcaatgattttgacagacacacatgatgaaataagagtcatattttttatttttttatttattcttgataagtgatgaaataagagtcatatttttaactgaaaatgggtgcaggggcactggggcttggttgattaactgatttataagttattcagcaattaaggttgcacctactatttttgtactctgtagcaagtaatactacatttacgaccgctatctagtaatgaataggaaaatcgtatttggcaggtggggcggtgatgtgattacctactgacgtatagattcatatgaatgcattttagattttattgtaaaggcaccatattcttgcacaacacaaaggtaactaatgtgagaacacaaaagatacacaacacaaaaatcatgctcactggcttgcaattgccttgaccatttttcactctttttcttcttattctgcatactagatgttacagctgcttaagtttgtttaactgcattatttggattttgatcaggcaagagtatc

SEQ ID NO: 13718 - DNA, 2365 bp, Vitis vinifera
  Intron number 10 from transcript GSVIVT01022289001 (locus GSVIVG01022289001) derived from phytozome v7.0 (chr-ID chr 7; pos 18258157 to 18260521)
gccttaggtgatttaattaatttcacattttcactcttgacatcccattatgtttgcatgcacagaatgtgtgatatgcacacctctgcatggtctctacaagcattatattcatacaaataattagcacaattgttaggagatcaatgtggacaagttggtagacatgatatatatttatcacgttcctagcttgttgtatgagcttctctccattttccccacaactgcgggagaggaatttcttttattcagcacttgttaagaaggttggtggagtctctctctctctctctctctctctctctctctctcggtcccttgctcgaacttgaacttggaacttccacatcccagcctaatcgtttgccacttgagtcaggactgaagggcttcttacctttgaaagtggggtgaaaagtgagatctattaaaatgagcctctatttttcctaggaaagaaacattaccaacagcctaactgaatctgactcagaagttgctataaaccaattcatatagtggatgccaataccgccctcgtggagctttaaaaccctatttggggaagagctccgatacactcaaatcaacatttaaaccctatagtttgtttagataaaactcctaaatgtgggctctacaaagctcaatgtgattggcatcaatggtctagttaacaagactagaactcatttcaaacagttgtctttggttgattcctgcctgcactggaggaagcttattaaggtgacattagtaacatgaacatttgtctctccctgctcgtagtgcttttatctttgtgaaacatacacacttgcaaatctatatacaaatatatatacattaagatgtattcatagaactaaactacagcgtttttccttctcttctcttttctttttcttttcatgtatctgacacttcgtttttttctttttgcagggaagcttgtacaacatggaggtattcttcatattctttattttcatgattaattttggccaattaaaattttatgttgcacctgaggagcattgctaattattatttttactattattttcattattattattgctgttgttattatgaattggctgttatctgttagctgcagtagaggagatcatatggttatagaatcctgtttgtgcttattcatagttactgaagcatgatgtgtgtgtgcatgagcacatgcatttgttttcctccataattagttttttatcataaaaaaatacagtgcctttcactttcaaagctgctggaaggttacctactaatacatgcatgaaaaatagacttctgaaatacctttcacaacctgcctattttttattttttatttttaattaataatgaaaaaatgacatagttaacatgttggatagcatgctttcaaaaactgttttaagaaacatctactggtaataggtcattttagaaatatgttaacatattgtgtttgtttaaaaatgtgagcatcgataaagaaagttatccaaaaatgacaaattttttaagatgctcattgttttcattttttgaaagaggacatttttgaagaaaaccatttcatttatgctgctagacaggctctgactttttctgaattaatagacctccattataacagcctatataacgtcttctgtctgtgcttcatggaaatttgaagtttttggattttgattttgtttgacccatatgaatggcagaaattttaaaataggatggctctctttctgtccaagcatgcatgttatctgcctttttagttgcatggatgcagagaagaagtatgtcactcttcttttgtcttgtctagcatttggagccttgtatgtgtagctaaagcagatgaaacattattctaaagtacatgctaaaatagattgcccattatgcttaaatagtgaggcctctctgtataccagaatctcttcctctatttaagtcaatgttaccggtcacttgtagaattcaaaatctttagctatttaggttctttgacatttttgcaaattcaagctcttatgaaatgattattttaactcttaacataggttaaatgatagctcttacaactcaaccagttttgagtttggaaaggacaacattgggcacaattcttctgttcaaatatctttcatttaatgaaagggtgaagcaattaaattcagtacatgaaacttgattcggatctttttgagtataactctccagtccatttatctatcctggttactttcttcactgaggtggatattaagtgatgtgatacttattcatgtgctttaaattatattcctttacgtcatttctggctgatgtcctcaagttgcttgggtgtttt

SEQ ID NO: 13719 - DNA, 8802 bp, Vitis vinifera
  Intron number 4 from transcript GSVIVT01019366001 (locus G SVIVG01019366001) derived from phytozome v7.0 (chr-ID chr1 5; pos 278107 to 286908)
agcattcatcaaatttctgcaacactaagaagaacgtacggtgtgaattttttatgttctgttaaaccgttttattcttgaacattacaaacctgtgatttgtcatcccttgcatatggactaatttccccttaatgattagggtcaagtaatatcttattactattatgcagtatcatgtctttattttatggatcattctagattttgtatattgtgaatttagtcttctaggaaaaatgagaattttgttggacaaggtttgtttctttttttcggttgaaattcagtgtggatgaaggaacctttctattcattttagtaaggctattgttttcaaacttcctccactcacccttaatggaccctactttgtttatttataggaatatgaaaagtataagatattggttgatgtataaatccaagaatactagaaagactaagaagatacaaaaactaatgttgaaaaaaggaagacctaattatattttatattttgtggttgtcattgtgtatgggcgtcatagcgaaagattttgtatgttcatagtagagtgacagtcagtggaggctatgcccatgttggtgaagttttttgaagttgaaaagatgtttgaggttaggtttgaaggcttccaggggggaaatggatttctatcacaaaaaggtctcagggcattgctttcagcaaagaggcataagattttttatgtggaaaacccccacgctaacggtggagataaaaaaccatgaagtttaagacctattgatctaagacctactaatctaaatccactatacgaaatcaaattaaataaatttatctgactgctttaccttaaaggcttactcttcaatacctacaacttgattcatgtctgcaatacaacaacctccaatggctttagtggatcatttcagcctcgctgaagggatgaaggtctttaaaccaatattcaaaggttaaatccttgaatgagagatcgggaatggtgtgacattttagtctttttctatgggaaaccctctctcgagaatgtgtgacctcttttcaatcacttaacgatctctaacccaaatctctaaccctcaaggggttaagagggaggtatttataggcaaaagcccaaagagtctcggttttgaaagaattagcttgaccgctcgagctaacttaggccgcttgagtggtcctaagcgctccaagctacttaagcggtcttgcactatttaaaaatcatttttaaaatcctttaagttcaaaacaaaatcgatcctcttaatacctcaacatagcctaatttgccataagtcaaacctctttagacatacttgtgacttcgtggttgaatgaacaactcctcttgatcttcaatggagagcaagtcactatctacaaagacttctatgctcaaacataaacaagaacaaaactaccaacacaaaaacaagactcaatgtcctaacaaaggatagttgttaattgcgggtggatagttattgaaaataaatctaggtataaagatacatgaggtttccttcgtgttttgctagtggaagctctaataccacttgtctgcaagcagaaactttaatgcgatgtattgatgcaataatatagagataaaaataaatctaggtataaagatacatgaggttttaatgtggtttgggcaactatggctacatccataggtgaaagagaaatgattcattatactatagataacatattacagggaatagaaaaaacatatacaaatatggaaacttggaacattctgcatttctcactttctgtgattacattctgaactacgggtcctcgcttcatagggtgtctcatactcttcatcacatctctacccatttggtatagggtttgcatgctttacattctcatctctatcttacaacatttttctgtcatatctgatagtattaatagtgatattcctgtcacatttccttattctatgaaaaaactaaattttaaaggaattggcaattatgaaatttttaaatgatattcctttaccaaaaggaatatatatcaaatagggatttaagggactttgtaatattttgttctcacccaagtgaaaaccacctgtcacttgcttctcttagactctctaataaggcaaagatctcggcctttgaagcaaaaccagcaactgctgccctagaaatatctgagaacctcctgttttttgtctctaaatagctctccaatacttagctgaccgggattatccaaaactacgctcaacatccacaatgaatctatgttatgagcacatgtcctggtatccttgggcacattcaatagctatttatttctgttttagatcaagcctagtatttgggatacaactggcatcctctgttgaactacatttttcaatattcttttgagaaagatctcccatccttggccttctaaattcccccttttttttttccatcaactacacttttttatcctatcaaagaacaaaaagtaaaggtcttttttagttattattattattattattattattattattattgaagaatttctgaactcctttattgatattttatcggtacacaccatacacatatatatacacaaatgactgaataagaaaaaatcaatctagcttaattctctcctaaaattaggaaactaaatcataaggaaatatcctaaatgatctctccttttttattcctaaattaaagtcctaactttggcattatttcaacactccccctcaagctggagaatatatatcatataatcccagcttgcaagttaagtcttcgaagttaggcctaggtaaagctttggtgaggatgtctgcggtttggtgcttggtaggaacatagttcaatttgaccgtctcactagtcaccttctctgtgataaagtgtctgtcaatctcaacatgcttggtcctgtcatgatgcacggggttctttgctatgcttatagctgcctgattatcacacatcatcagaattggagatgaactcgtttgtcccaatttactaagaaccctttttatccaaatcccttcacagattccctgtgcaagagctctgtactcagcttctgcactacttctggctacaactgattgcttcttactcctccaggtaacaagatttccccagacaaaagaacaatatccagaagtggaccgcctgtcaatgatgtttcctgcccaatccgcatctgagtatacttcagtgtcacggttctctgtctttctgaagaataggcctttccctggtgtcatttttaaatatctaagaatcctgtagactgcttccatgtgttcctcagtggggctgtgcatgaattgacttacagcactcactgcaaagccaatatctggccgagtgtgtgagagataaatcaagcgcccgacaagccgctgatatctccccctgtctaccggtgtactttctttctcgataccaagtttcttctgactatccataggagtatcaattggtttgcatccaagcataccggtctccttaagaagatcgagtatgtattttctttgagagactacgattcccttccttgatctagccacttccataccaaggaaatatttcaaatttccaaggtctttaacttcaaactcttctgacaaatacttcttcaaattctgtaactcccccatatcattcccagatagaataatatcatcgacatagactatcaatatggccaatttcccgacatgagacttcttgacaaatagagtatgatcagcctgaccttgtttgtagcccagcttcagaactgcttttgtgaatctatcaaaccaggctcgaggagattgtttaaggccgtacaaggatttttggagtttgcaaacctgattctttgccatactttcttcgaaaccaggtggtatttccatgtagacttcctcttctaggtccccatttagaaacgcattttttatgtccagttgttgcaagcaccaatcttgattgacagccaatgagagaaggatcctgatagtgttcagttttgcaacaggagcaaaagtttcctgatagtctatcccataggattgtgtaaaccctctagctaccaaacgagccttgaatctttcgactgatccatctgctttgtattttatggtgaaaatccacttgcaccccacaggcctcttcccaaccggcaaatctgtgatagtccacgtcccattcttctcaagtgcatcaatctcatcttgtactgccttcttccattctgaaatttttaatgcctcttgtattgtgttgggaacctgagtatcatcaagagaagtagcaaatgctctgtaagatggtgataacccttcatacgtaacataattcccaattggatgatctgtacatctcctaacacccttcctcaatgcaattggcaaagtagaatcatcaatgctgggaattaacacctctccatccctatcctcacctatgttctcttcaggaagacttgaattggagtcaatatattggccacatgttgactgtgatccgtgctctaattcctgtcttttcctcctcctgatgtaaacttgtaagttctcattagcaagttgtggggctataggttgaataggcatgggagactggatggtcacgggagaaggaacatttgtgtgctgggctggctgaactgatggcggcatgggtgtggacaactcagtgggcgcgaattgggaaggatttggtgactctgagtgaaaagaaggtacaccctcaagaaaagactcccaaacttgatgttcattcatgctctccccctgaacatgagatttgggatagaagaagacatgttcaaagaaagagacgtccatggtggtgtaaaatcttttgttggttggagaatagcatttgtacccttttttggttggagaataccctagaaaaatgcacttatttgctcgaggagcaaatttgctacgattttgaggatacacatgaacgaatgctgtgcaaccaaatactttgagtggtaaattagaagaggcggcatgggtgtgaggaaactgttttaagaaaagttgacgtggggattgaaaggtaagcactctggatggcatacggttaatcaaataggtagctgtgagaatagcttccccccagaaatagtttggaacattagaggaaaacataaggcaccgggcaacctccaagagatgtctattcttgcgttcagccaccccattttgttgtggggtgtcaacgcaagaacttaagtggataatgccatgattttgaagataagtactgagactactagtaaagtattcctttgcattatctgacttgaggacttgtattttggaattgaattgattttgaaccataagattgaaggtttgaaaaatgtgcccgacctctgacttttctttcataaggaaaacccatgttacccgagtatgatcatcaacgaatgtcacaaaccatcgagtgccagaaatattttttatctgggagggaccccacacatcactatgtactagagagaaaacagtcgaaggtttgtatgggatttgaggatatactgttcgagtatgctttgcaaactgacaaatttcacagtgataagatgctggatttttattgataaataatttgggaaacaattttgcaaggtaaacaaagctaggatgaccaaggcgatagtgtaacattataatctcactatctttattgaccttagaatttgacacagaattgaaagactctgacatactctgagactgtacgcaacttgcttgagagacttggtttgagaattggccacatgaaaggaggtagagcccggaacacagttcagcactgccaatcatcttccccgatttcaagtcctgaaaaacacacaagtttggatagaatttagtaacacattggagatcacgagccaatttgctaatggacaaaagattacaatccaagtttggaacatggaggacagagtcaagatataagtctttagtaagttttatagaacctgtcccgacaatttttgactttgaaccatcagcaatatggacggatgaatgaccattacttggcttgtaattttgaagaatggcagcatctcctgtcatgtgatcagaagcacctgtgtctactatccacggcctcattcctcctcgattagcagtgaaggctacaccggtagtactgccactgccaacttggcttaataatttctgtagcatctccatctgctctttgttgaatggactcggctcgggaacagatgtgctctcagagttggcagccacgtgtgctctgccatctctgtcaaaccgtggctttggtttccaataagccggtttgccatgaagcttccagcaagtctccttataatggcctggtttcttacaataatcacaccaaggcctatcccgtttctgacgatctccaccactactattaaatgaccgagcagcaagggcagaggcatccaatgttggggcaggttgctcttttgatcccatcatcactttctttctactttcttcacgcctaacctctgaaaaagcctccctgagacttggcaggggtttaatgcccatgattcggcctctaacatcatccaattccctgtttagtcctaggaagaacttgaacagtctcttttgttccacaatttgcctgtatgttgctgcatcatccgaacatttccatgagtgagtctcaaataagtcaagttgctgccaataccttgtgagtgtgttgtaatactgagtaactgactgctctccttggcggaagtcatgtagagctgattcaacctgaaacagttctgaagtattttcagaacttgagtaagtttctttggctgcatcccatatgtcctttgcagtcccaaacaacaagaaattttcgcctatgtcattgttcatggaattgataagccatgacatgatcatgctgttttcaatcttccacttcctgaaacccggttctgtagtttctggcatgactgcttgtccagtgaggtactcatcctttcctttaccgcaaatgaacagcaacacagattgtgaccactgtaaatagttatggccatttaatttgtgtcctgtgatgagaataggagaggaatcattgccaccaaggtttggaatttcagatctaccccctgattctggtgacgtgacgctggatacttgtgatgatgccatttcgtattttgtcatggaccagaaaggtagaagaacacttcccaaggaacgtgcagggactggagttgagaaaaaatagccggaggacgctggaaaatctgatcagagggcccgcggaagcaaaagaaccccaaaagaggcacgtgcagggctcggattgcacaaacaggtaggaagggtggctggtcggcgtcaggcgagcctggaggaggaagcgcgtcgccggaaagtggctcacgcgccctcacgcgccggcgcgtgagatgcagtcgccggccggaaaaacgcgcgtgggcggcgcgtggatgggtttctggttccggtgctttgggacaaattggagatctcctccaggcgctccttgcggtgtagaaaaaaaccgtcgccggaaagttcgccggaaaagttcaccggaaaatttttgccggcggtgagtgttttctgacgacgattcgactgatcggaaagtgttttctcccttggctctgagaacagggactgatgaccggaatgggagagagagagagagagagagagagagagatgatcggattgagatatggccagagagatttggccggaatgagtgatggcctgaataagaggtggccagaagggattagggtttcagaaaactagctctgataccatgaagaatttctgaactcctttattgatattttatcggtacacaccatacacatatatatacacaaatgactgaataagaaaaaatcaatctagcttaattctctcctaaaattaggaaactaaatcataaggaaatatcctaaatgatctctctttttttattcctaaattaaagtcctaactttggcattatttcaacaattattattattacatttttcaatattcttttgagaaagatctcccatccttggccttataaatcccccttttttttttccatcaactaaacatttttatcctatcaaagaacaaaagtaaaggtcttttttagttattttcattatcaattttatggaataggcacatagggtgatattttcaaacttttatgtagtaaacttataagtccaatagagatatatcttgtgtacatgtgatatagcttgtacctcagtgttatgtcttatttggacgtaagagttattctatgagatattgtataggtgaatattttctgatgcccactacaaggcaattttttcctcttatggatcatacctatgtgttttctgtttcaaagttggctgtaaattgttgttattatctctttatgcattttctgaatttaggtacaatgtttatgttgtatttttattgccaagggttttgaaaacttttggatgcacattcactttataatttcttggaggggttctgtttcttttttgttgattttgtccttgttaggaatgctattttcttgctcacaaatttatagataaattgttttaagtgcaaatttttttccattggctaaaaggattggtacttattaatatttttcttagatgtgacaaacgtacactttcatcaagtgatgcttgttttgctttcatttctagggagttagatcgagaaattgctgatttggttttta

SEQ ID NO: 13720 - DNA, 1573 bp, Vitis vinifera
  Intron number 4 from transcript GSVIVT01016957001 (locus G SVIVG01016957001) derived from phytozome v7.0 (chr-ID chr9 ; pos 2967718 to 2969290)
attttgtttctttgattgcagtaaccttacttttggttccatgtatcatctaaaacttggaataaaatattatatgtttagattagattttttttttttctttttaaagttgtgaaatgatcatgtgataataactttatatgttgtgtgttgagaggtctctttcatgtctattttaattaatcatttccagcatgtgcaaaattgattctgcctcatggaagttattttcaaaaagagaaagctaagatttaccaaagaaaatgatttggttgaactttttacatcaatcattctattaaactaagggagaaggatcccttaaaatgtttgatttcaccaacaaaaaagaatgcaatctcttaaattatgtgtttcaatgattgaattaatttcattttcttttgctatgacattgttgatgaagtagccaccaaggcttgcaatgtattaattcctccaaagtgcatataccatgcttgtataaatcttatctacaattaatgtattaatttcagcatattgtgacaccttgctcaaaggcctaagtcaatgacatcatgtaattaatattttgttggtaacaattgatagaatttgaacattgcccgacacgattcatgattataagggaataaatagctatgttatagtgtgttttgtagattgttagatagggttttgaccatcttatctacaaattaaccaatgtccagttgagatagatgaaacgttttatgacattcgacattacctttgcgtgtctattctaaaagtcatcatctgggcgattcatcctcaagcttaaaaaagacattattacacccaaaacatacccccctcctcaagattagatcattaaagatccacccttgtacatggatcattttctttacccaaaggggtctagaataaggagaaacagtactgcagatactaataccaaaactaacatcaacacatagcatctgtgcggttataagcaaatcttgataagaccctcattggatcaggtgagaaaaaggcaatatagatcagaggagtgaattcaaatataggctccatattggatgatcttttttcttcagtaaggctgcaagaaagccagacccctgtggtcaaaaagtagataaacacatgttgaaaacttggtattagatcaataagtctctgcctataagccaatctttattgggcacccattgaatattgtaggttaaagccaacacaactgacacgtcaggactattccaccatgataataacatgacagacatatggtccaaaaaggcattcatacaaaaattccccatgctgcatgaaggatgtggatccctatactccaggtgacaattagtaaggtccagacccatgaactaatcttttgttttaaccatatataatttgtgtcagttgtctgtatatttttttgaagagaatcttatgccctagaccataaaccttcccccccatggtcatgtccattgtccacccacaggaattctaaggcatcccacaggtattttaaggcacccacatgtattttctatagtttctccacaagcattacaac

SEQ ID NO: 13721 - DNA, 4327 bp, Vitis vinifera
  Intron number 3 from transcript GSVIVT01030704001 (locus G SVIVG01030704001) derived from phytozome v7.0 (chr-ID chr1 4; pos 14081687 to 14086013 reverse strand)
atcactgtgattctgaggtaatttaagtatggaatatttttttatttccttatttcatttcaatcttttgcacatttgtttgtgctgaacaaacaaaatttgtgactttgggtgtaaacacaggtggcttttattttgattctttgatttattataacctgtggatatgttccatgttgtttaattattggcccttattttttggagaatttcttgtgtctgataagttgatgatgaatacattttttttattaggtgattagaactttgactcaaaattgaagcttagaacattttatggtttgagtttatgtttgatattaaggcatgcaaagttccatcggtttgattccaattttgtactgctgactttaaatgcagactgaattctagatttttatattgatttctaagtttaggattaatttcttttctaatatttcattctctattttgggttacctgatattagtggcttgtcgctaggcaatcatttttcttatgaggcttagaattctgacaacattttatgaagcttttgtgccttgtttttggaaccttatttagtgaaggatcttcctcttatgtgcttgatgtttacagttaacacaaaatttttgtctaacatgactctactagactcttacattaaagtgcctattaaggtacaattcctaaaaaggtttcttcagaaaaaaaacagcatttcttgcaggaatgttttgacggggtttgggataagaatagtgtcaaccatacaaatataggcacaaattgatttgaaatagttgctttaatatgtgagataatgatggatgggagtttttcatttttctaacattgcttctctcccatgtttgagttatgttggcattgaacaaaaggatgggtcaagattagtatcagaatatgattgagatttgcaagggagatgatgatggaatgaaggtttttccttacctttcctttccttctctgtccatgtataatatgatgttggggttggacaaaagaatgcagttagattatagttatatgaaagaatacaaattaagatgccgataaaagttgcatgttcttttatggtctctctctctctctaggttatttgcttgaataaaaagatgtggttggaatgtattatattaatgtatagagaactagaaaaggaaggtggttttgctaatgatggagctgcttatgttggtggtgatgagttgtagttttttttttggttgcttctctcttcacaatatttgaagaagaagaagatggtggcggtgaatggaagttgtcctcttgtagtgttgcttcactgtccacattcatgagatgttaggggtcaataaaagaatggcttatatattgatattgtattatatatataaagctataataaatctaagggaaacaaaaacctagaggaggatgatgatgatgacataaaggattgtaatatatttgaagaagaagattgatgctttgttaaatacgctaatgatacaatggaacaaaatttgcttgagtttgagccatgggcttgtggaggagatgattttggaagcaagttccttgatgctttgctacaatgtgttttgcaaagatgaaaagtccattggaagttacagatatcactttaaaaggttattagccaaatgccatattataaagtttctctgttcatattaaaataagttatttgacaaatgattctaatttcttaggagaactttttgttggcatcttaaatctaaacaacgaaagcggtgccgatttgataaaaaaaatgatcttttaggtttaaagtgctaaccttaagtttggatgttctcaaaccttaaattccaagtaatgaaaaatcaaattaatgtcatcggaagtctcgtagacccacaatctttcgcccgatggctcttcgttgatcttggcacactttcggtgaggggaaagagagggcggaggctatgactctttttctctctagaggtggaagacaactcaatggaaaagttatgaaaaccctaatcctaagagggtatttatggggttttccaatgggtttaagtgatttagtccactaagggcttaattcacttaatcaaccccaaaatgggtcttaattgattaattagcccaatagggcctactaattaatcaattaaccaatctaaaaaccttgttcacttacctttatgtaaccttgcgtaattatcaaaacgcctttttgcacaaaagtgaacctatagctaatccaaccttcacaaactgtgccaacaaggtatatgagcttgagtggggaccactaggacccataggatagtattagctccctcagaatccaattttgaagttgatttaacatcccattacagaaaatcaaatgcattatagtaccctatgtaaataaaaacaagacaccaagtgctcaagtttatgacttgctatccattgtgttaagcctccccatgaattggtgtttgtagtctaataaggtgaaagctattagtctttcaagactacctttaccatctttgaattatagatcctcctattgtgtgttcaattgacatgcctcaactttcaaagagcttctgtcaagttccacttaaggaactactataaccatagtttacatgaacacttctttaggatcacccaatgggacactttgtttcaatcctatgagatatcatgatgcctctattgataatatctattgctactgactttcattaacagtgatccaatctataagaaatatatgatcaacttacgattttaccggtaggttaaagccactgctgactttagcgcaagttcagtattctctcaagttgagagacaacacaatgaaacaatttggtgaagtcatgactacttgataaccttaagtcatgactcaccgtaggtcttgtccaatatgtaaccatgcatactagtgcactcaccataggaaacccatccttagccactctccaattaaggggtagtgtactacaatttcaaatggattgcttaagtccacaaactagctgcgaacaaccaatcgagtttttgggcattttagaaggtcacttgaagtattattttccatcaaggttgattaaatatggtgagttggaggagatggtgtcctttatggattggctttaagtacggagtttaaggaaagtatgcatccagtagcgtggagcctagtgactcatgaaagtttctccattaaatctttggtcattgaactatttcagagagaaagggagagattttcagaaaaaggacatatgtatgggagagatttcctgggaatagctttctttgagcttgtttttagtgtgtttccttgcttacagaagaaatcctcttattagtaatcatctgtctttgttacacttggcaaaccagtgtaggtgactttacctcttctagtactgcattaacctatctggatgcattcacttcttgatatgtcttcttgtattttaactcgtccatcacaatatcaatttctgcactcattttagtgacatgtcggctttgcttcctagcattctgtgtgataaaaacatggaaggtcttattgccattgtgaaattttcactcagtaacatcacacaagactaaaatgcttctccacttgtattagccatggtctcttgagtctcctttcccttatggatgatgtttccaagttgaccaagataatggaaataagagccttttgttatccgtttttatttatttgtttctgattacgcaagcaaatttactggaaaacactgaagtgacttagcccaaatagatgccgggcataaaattaagaaaaggtgccttgcgctcaagatcaaatcatataacctataaagtctgaaagtaggttggatttgattgcctagaaacaaagataaagggagattgttctatgccttcataagttcttctattgcccccttctcatatgcaccatgctaaaagggggttgttcgtctcacctttttcttgctatctcttccaaactttttgtgtcagcttgatagcacctcaggcactgtgcttgtaataatccacactatcacaagaggctcatctagtattgaccataaggccttgggccaatgaccattgtagcagaaggtatattttatccttcctggttgcacatgtatcatcaattctgctcttttttttttctaaaaaaaaccacccaatattagctgaattattcctattagatgtcatatgcatagaattcttcactctcattttttggtaatgaaattccatgctatatgcagggtgccttctgtttcccttctgctagctttggtgc

SEQ ID NO: 13722 - DNA, 16941 bp, Vitis vinifera
  Intron number 20 from transcript GSVIVT01012941001 (locus GSVIVG01012941001) derived from phytozome v7.0 (chr-ID chr 17; pos 14067034 to 14083974)
caagcacaagtaaaattctaatttatccttctcccttttttcttttgcattattaactctacggttttaatttttcctattgttgtgtgaatttcatttctttgatgaaaaccacatgtgcaagtttcctttgaattgctacagctatggtgacgcatattcatcttttcatgctgcacaacaaagttggaaacaatttccataattttttcttctttatttcatttttattttctttttctgatgagaaacaaagataattgatgcctataacccctttttcagcctttagtgggaagagttatcaagaatgttgggtacaaggggaatggcgtctacagtccctttttgggcctttaaagggttgttctttgtggactccattgaaagagtagtttggcttcaaaagtgagatggtcgtattagtgagcggaggccatagcataacattaaggagatggtcaacaagtgcttggaaaatttaggtaaggatggatcgaactaagaggctttcctttccatctgtggttttgatttagccggaggtggcttcttctcaaggcaacatcaggtgttgcgaacatgtggcagcaccagggagaagataagaaacaactgtccctcatttcctctcttttcaatttcaaattaaaatataaaagccaaatggtggcttaaaaaagaggacaacccattctcaggggatgagaggcccagcagacgaggatagcggcccacttagttgaggaaaaggtttaagagaaagcaggcccagttctcctttaatatacaaggcccaatttggtgggagctcaaatcatgcaataaactccggaccctctgtcttagcaatagggaggcaagcccatttaaacaaagggagcccaagtaatatattgggccataatcaaatttgaactgtgttgaaacctaattttttgaggaaaataaagcatggttacagagtaaggaggggcccgtactgcaagttgggtcaaccatcgttgattttagatgttggctcatttgcttccaatcttccaaaggcctataataaattataggtttctttttttttaatagttcattaagccttctgggttttctaaagcttataagtaagacaatttgatataaccaagagattaatgaatgaatgaatgaatgaatgatacattataccaaaacttcagcataccttgtaacttccaatggtgagagcccattgtctcttctagctgtgactcttagaggcccttagtgaaaactctaggtttttctatctcttcatttttttcctgtttttattttcttttccctgctgtcctaacagttccttgttcatcttcttaaattctaaattagtgaatgcccaccatgtttgattgtagacaactgcccctgggttgttctacatcatttcaggtagagaaatatatgaggaatccttccaagttgaaaaaaaaataattaaaatttaaatgaaaggagaaaaaaaagaagcaagaataaggccatcaaaccccaacaactggtcacaaggaaatgatttcaagtgggaatatgatctccacaaatccagaaacagaattggtcctcttttaactggttgccttcctgatttaatatcttcctcaaattcagagaaaaaaaaaaatctccatttacctggctagaaagaaaatttgacagaagacttaaaatgaaggtgtaaggctgctaatcatgtgatcatccatgttgtttgatgagagacaactgaaatacaggacaactgttggtaattgaccttcctactaatcactaaccaatggacacttcataaactattctagcaaattaaaagtggaagacttcaatagtgcaatcattttcttttcttttccttttttttattattattataaagactatatgccataacagacattgaaatgtaaaatgtgtactagaaagagttaagatttaagaaatggtttttgatgcctagctcaagtggtaaagggttggggtgatgttgtgggaggttccaggttagagtcccaccagggacaaaaaataaagtgctttaggtattgagagagagagagagagagagagatgaaaagtacaatgtgtaggaagaacttaaggtgggaaaaggaaaagatttctttaagaaatagaagtggggagatgtgggaaaaagggaaatattactttcagaaatagaagtggggagatgaggactagttttcttgtcttttcatgagatgatgcaaattgttttcctcatctgctcaaagcataaaccacaaagttgaaacataatgctttctttagtgacaacacatgatcatcattagtttctattttaagttgaagttcatcattagtttcctattttaagtttatttgctttagtattttgttttaagattgatttcctagtttccctagtttccaattatttttagtttcctattttagttatttcctttagcattgcaaacattatttaaaggcttattgtaattgttagaatcagttcaatataatttatttgaattattctctaattttcagatcctattgtgatctttgtgtttgtttttgagtgttttttcattttgttttgaaacaaaccttccgttgcaccaaaattggtattagagtaaggatttttacttcaatctgatggttgacaatggttctagtgggaaatgaaccatcgacaatgaacaatggtttgaaaaaattgagcaatggctcaacgggatcaatgacactctttgcaacctcacgtagatgatggctgtgttgactgtcgaagggaaacatggacccatggagtgactaccagaccagtgtggtgacctataggagggtggctatgatgattgatgccggccacaaatctggtcaagaatcaacggcgaaggtgcgattcgcgcgggtctagccgtgaattgcgattttcgtgagccccttccattatgggtgtatgagtgtcgaaatcaaggagctcctaggcggtgtgacgacaactacctttggtgaggggtttcgattggcggcaatggtgagttcaaagctggtagtggctttccacgagtggctgcaagggtttttgatgagcaagatgagtttttttccacctttttgagatggtgatgattttcgacttccatagtgaaggaatattcaacaaaggcagcaatggaggctggattattcatctggagaagaagatgatttcccttttcaattatcaagctaacgattagggtcaaaataacaaaaaatttaagatgaaaatggatttaccgagtttcaacaaccgattacacattgaagattttcttgattggtccatatcgtcgaaaactttttcgactatttgaatacttcagaagaaaatcaagtaaagcttttggcgtatgagttgaaaggcggagcttttgcatggtgggaacaacttcaatataattgtcaacggcaaggaaaacaacgtgtttgtacttggcccaagatgaaacagttgttacaaaggcgatttctccctctggattatgaacaatttttgtaccaacaatataaaaattatctgcgagtcaattgcactgtgaacgaatacacagaggaattttatcaattaaatgctcaagttaatttatctgagacggaggtgtagacatcaaaatttttagtgaaataaactctcactaaattggtcttaaaaaaaaatgtggccacccaattcaacaaaatttaggatcgacaaatgatataggtcttacacacatttgacacgtgacatatattaaaaaagtgacaagtggcgaaatttggaagacgacaaaatttagttttggaaataaaatcgaatctttcaattgttgtgtcaaaagagaattaaaaataaataaatactctcattgacaaatttccaaaggaaataaatattcccactaaaatcaaaagagactaaaaaaaataaataaatattcttttgttgacaaattttcttaatgaaaaagacaagttgctaaaatcaaggaaccaaattctttgaattcagtaactaaatcttggggaattccaaaatttacttccctaatttcacttataaataggggtgacttccttcaattaggggatttccttcaatgaggggacttcttcggattgataaaaatgactccacatgggaaacaagacttcatgaagaagaaaaggcttcacaaaatctccttataagttcaagaaattgtagaagaactacatacgtgttctttgcctttttgacaaagttattcaggaataagccactacaggccttcgatcgactttgaaaataaagaaaacatcttcgtcatctacatacgcaatctttgccattcattgagttcatttgggaacaagctacttgtggccctcgattgatctttgaaatcaagaaaacgtttttgttgtctcctaaattgtgatcaaggtgaaagaataaaaggaatttgtttttttgtagaataatattaccacgaagattgtaccctataatttattaattttaataaaaaaaattgtttcgcattatttttcttattgttatgcttacattgcaagacctttacaaaatttgtgcacgtacaaattttaggcacgcttggtgggacatctttgcctcatttctttcgctaaaaaattgatcattattaagatgatatctaaaaaaactcaagctacgcatgtcaaaaagggtgatgacaagattgtcattactcaagcaacacgtagtacctcttcgggccccatgactagtaacaaagggaaatttgaagcaacgtgttggccatttcgtcgaaacttgtagccaagtaggtatagagtgtgacctcttggtcaaacaatttgttcaatcccttcaagggaatgcctttgattggtatatcgaccttacacccaagtgcattgacaactaggaccaaatggagtgtgaattcctcaattgcctctataacacttgacaaactgtaagtatgattgagctaaccaataccaagcaaatgaaagacaagtcggttgttgactaggttaatcgttggcgttccttaaaccttgactgtaaggataggttatatgaggtgttagctatggagatgtgcatacaaggcatgcattagggtcttttgtacattctccaagggatacgatcccacaccttcgaagagttggctacacgaacacatgacatagagtatgttataaaaataaatgaaagtaaaagcatgtctatggaagaaattgaagatgatagcactagagacaaaaacatcactaatgaggatgaaaagagtgtgacatcaaatttcactacaattgtttttaaaccttaacactccagtgttgctctttaatgcatgagcctaaactgcttattgctcctatcctatatgatcttacattgtagtaacaaaaaaaaaaaaaaatcaaacttatgctaaaggaaaaataaaatcttggcaaacttcttaaatcgaggaacaagctctttgcattaaagaagtcaaatttggagatcctaaactaaaatctccaacttctctaaatgtaagtgtttttttcttcaaaataaggcattctcaaaaggaaaatgcaacctagaagctaaatccaaaaatgaagcttcaagagcatgttataaaaacaaatgaaagtgaaagcaagtctatggaagaaatttaagatgatagcactggaggcaaaaacatcactgaagaggatgaaaagagtgtgacacatgaaatttcactacaattgttttgtaaccttaacactccagagttgctccttaatccatgagcttaaattgtatattactcctagcctacaagagcttaaactatagtaaaaaaaaataaaaaaaataaaaaaaaatcaaacttatgcttaaggaagaacaaaaaaaaaaaaaaattcttggcaaacttcttaaatcaaggaacaagctctttgcattaaagaagtcaaattcggagatcctaactaaaatctccaacttgtctaaatgtaagtggtttttttcttctataataaggcgttttcaaaaggaaaaggcaacccataagctaaataaaaaaaatgaagcttcaaaagacaggatcaaattccaaacattcttcaacaagctcatagaagaatattaaacatgatacagaagtatcattcatccaccttcaaagccaaagaagaaaaagtcaggttcttcaaaacactcgaggaaattattgataagtttacttgagatcaaatgaacattggccctccattaaactttgctctaagaacacgtgtttattactcttggattaaagtcaagtctaagcttgacacattcttcaacaagcctatggtatattaaacataatacaaaagtgttattcatctattttcaaggctgaaaattaagatgaattcaaaggaccttcattgtaatatctcacatcggataaggaagaaagtttttggcattatataagtatgagcttgttttaatcatgtagatgcgttttaaagttgtgagggccctttaggcctaaagctaataatatctgcacggttgggtgtaggtcattacaaaatacttaagaaagatcttcacaactttagttgtgaatgagtcatctttgacctcaattaaactttgttctaagcacatgcatttattgcccttagatcaaactcaagacaagtgatgctcttgaaagcatgagccctgaattgcatgacacttttggcctacatgagcttaaactgtgtacgacacaaaaaaaaaaaaaactacgtttggcttgattccctctctttgaagggtacgtaggcaacttagggaaactacccgagttcaataaccatcataagaagaaaaaaaatgtgttgagtacagccttaattttaatttagtgttaaaagttgtacactatgcgtgtcaaagttatgaattgcctacataggcattaagtatagttccaattttaatcaagttttgagaaattggacatcactatgtgcctaagtcaagcgaatttgcatgagtgaggaccttagcacttaaactgcatcaagtgccgaaagtactacaccgtggaacatcaaggccatgacttgcctacgtaggtgttaagtgtagttctaattttaattaagttttgaaaaattgggcatcactacacagctaagtcaaaccaattcgcacgagtgaagaccttagcacttaagtagcattaagtgttgaaagtacaacaccactgcatcaaggttatgacatgcctacatagatgttaagtgtagttacaatttgaattaagttttgagaagttgaacatcactacacatccaaggcaaaccaattcgcatgagtgaagaccttagtattaagttgcagtaagtgccaaaagttcaaaatcgtgtgacatcaaggttatgatttgcctacatagatgttaaatgtagttttgattttaattaagttttgagaagttggacatcactatgcatccaagtcaaactaatttacatgagtgaagaccttaacacttaagtcgcattaagtgtcgaaagtacaacatcgtgtagtgttgaagccatgacttgtttgcataagttttaaatataattttggttttaattaaatgtcaagtcaaaccaatttgcatgagggaagactttagcatataagtgtcaaaaatacgacaccgcttcatgtcagagctacaacttgatcatatgagggtcaaactttaaatattcatttttttttttatgaatgtttaagtttattaaaaaaaaaattcctcctcaagtgttaaggtgatttttttttcttctaaaaaaaatatacctgaaagtaaattcatctctgcaaacgatgaagattgacatgtgttcaagagggtgaggatccattgtgcaactccatataacatatatttatatatgttaaggagtcatccataccgtcatcctcatggtgagtcgtccatacaaagttgtcttcattgtgtgccatccacgtgtcatggtgtggctccattatttgaaggtgttgtggtgtttaccaaacttgatttataaagtgactatcaccaaattcgcattcgaccaggcgatgagtgaaagaaagctttcaagactaaagatgacctttatgagtgactagtgatgccatttgggttatcaaatgtgccaagcacattcatgtggttgatgaaccaggttcttcgtccatttattagaaaatttgtggtggtttattttgatgatattctcatctatagtaagaatgaggagcacttatcacacatcttagggaagttctcttattcttacgagctaataaattgtatatcaatcttaagaagtgtagctttatgagtagccatcttttattcctttgatttatagtgggaaaggatggtattcaagttgatgagacaaaggtgaaggcagttcgagaatggccagctcctaaaactgtgcatgaagtgcaaagtttccactatttagccaccttttatagttgttttattcaaggatttagtacaatcatggtgcctattactgattgtttgaagaaaggctagttccaatggggcaaagcgtaagaagacagttttgaattgataaaagcaaagttgtgcattgcaccagtgttagcactcaattttgagaaagtgtttaaggttgaatgtaatgcatcagttcaaagaaattggggttatcttatcccaagagggtcgcctcgtgaaatttatcagtgaaaaggttagttaacctcgacaaaagtggtctacttatgagcttgaattttatgtagttgcttgagccttaaagcattgggagcattatttgtttcaacgagagtttgtgttatttatggatcatcaagctttaaagttcatcaattcccaaaagatggtgaatcgaatgcacgcacgatggattgcctttttacaaagttcacttttgttatcaaacataagtctagccaatataatgaagtagttaatgcattgaatcgacgagcttctttactagctacaattagcactgaggtggtggggtttgattatttgaaggatacttatgttgatgatgaggattttggtgccatatgggcgtgatgcaacaataacgagtttgttattgacttccttattcaagatggatttttattttgaggtatacaattatgtatccctcgttctttctttgtgtgaacatttgattagagaattgcatgttggtagactaagaggacatgttggttaggataaaacaattagcttggtagaagggagatttaattggtcccatctcaaatgggatgttgggcgttttattcagcgttgcccagtgtatcaaaaagccaatggacaagttcaaaatgctagtctttacactcctttacctgttctagagatgatttggcaagatttaactatggattttgttcttggcctcccaagaactcaacgtggagttgattttattttggttgtagttaattgattttctaagatggttcacttccttccttataaaaaggacttcagatgcttcttatgtggcaaatttatttctttgtgaaattgtttgtttgcatggcgttccttgtttaataacttttgatagggatgtgaaattccttagtcatttttggagaactctagaaattatttgatacttcgttgtagtatagtagcacgagccatccccagactgatgggctaactgaagtggctaatcgcattcttagcaatatgatacaatcagttagtggagataaaccgaacaatgggatgctgctcttctatagattgagttttcttttaatagtaggcctaattgttctaccaagaagactccttttgaagttgtctacactagtgttccaaggcatacagtggatttgattcgttttcctccttctcatgatgttaatcctaatgttgaggagtttgcagggcacattcaacagatttatcaaaaagtgaaaaagaatttagaagaagctaattttcattacaagattgttgtagactgacaccggtgccttaagttgctcaatgaaggtgatttggtgatggtccatctccctaaaaatcattttcctgttggcacgtacaataagcttaaagacaagaaaattggtcctttccctgtccttcagaagattggtgataatgcttaccagattgatcttccagctgatatgaacatttctaatattttcaacgttgctgatatctttgaatgcttttccctagatgagttttctttgcaaccacaaaattctagaacgagttttcttcaagtggaggggattgatgcaacacatgatcatcattagtttttattttaagttcatcattagtttctattttaagttcattattagcttcctattttaagtttatttgctttactattttgtttaagattgatttcctagtttccaattatttctagtttcttatttcaattatctcctttatttttttattacaaacattattggaaggtttattgtaattgttagaatctgttcaatatgatttatcagaattattccttaattttcagatcttattgtgatctttgtgtttgttcttgaatgtttttccgtttcgtttcgaaacaaacctttccctagaaggctaagaaaggaggggaaataaaacattcaaaactggaaataaagggctttttttgtagcggaaatgaaaatagctgtctttttggctagaactttgtcattctacaaaatgagattttatattttttttaaggactattattctttaaaaattttgtggtttcaaaaagcctcatgttttctaaagtgttttttttttttgttatgctttaattttagtttttggaagatttaggagttctatgaaaagaattagaatctctaatataggttcagtttctctttttcttcttttttttcttcctatttttttaaatagtttctttgagtcttttaagttagtatgaggaatcctagtaataatttgcatcctttgcatctttttatgttgaaaatacggtatttttccttggaggtgagactcttagaaggccttattgagaattttaagatttttttcattccttttttttttctcttttaaatgagaattctaaaaggccttggtgagattttaaagttgctcttctttctcttctatccattctttatttttcttagttttattttttgcctactgtgataaccttaagtatttgttcccttgaaccctaaaaaatgatgctacctcaaccttatttgattgttggcaaccgccttaggattcttgttccattgtgagccatgatgcttggtcttgtacaaaatcaaaattattgtagcccaattagcatttataaggcctcaacttgcctttgtcatgaatgcatataccaatggataatattaatagtggaaacaatgcttggttttgtggggaacaaatgaaggaaactttctacaagtctctaatacatagcttaatttgttaagaagagcccacctcatcacatagccatggctctcaagaattggagcttctcccatcactttggcctttcaggtttacttatcaaatccaaaaacatattacctttttttccaaacaaagctcaagcaaatttaagatagctataacccttagtcttgaactccattcctaggtatcgattcaacaaggagagctttgtggcatcattacctgctaatacaatgtcatctaatttgacaatcaagctctaaggaatcccagtcttagtcgaagctccattgaattactcagagcacactctaggtgattgtctcatgccatacatcaagtttctttgggaggtatgattcatcttcactccctaaagccatggatatgttttttttttccttaagatttctaagcaagaaacatttttcacatttaattgggaatagagtctaattttgatttgcaaccaagagcaaacaagaggtggagttcatcttagtgatgtgaggataggtctcctaatggtggctatcatttgtatggataaactcttcaattataagttaagaagatgttatttttgagtcatatctaagtattattcaagattattatttagccaagtcctaatatcctaaaatttgagatgtgaaggtccaacacctagacatgcaaccacacccacccatacctgaacccatgtcatgtagctcttcacacatcctatcctacataaattgcttctttttaccaagggttatcctctcatgagttagtatattgttaaaatattcaagcttagggtagacaaaattatgaaggacctcacaaggaaataccccttcacatcctttaggacctagcctctaacaaattgaatgtcctccaaaaattgaccccctagccctaatttctaatccttaaaagactttcaaaagcaaggcctctaatgaccctaggttgcctttcattgccatagctctaccaactcttgcattatgcagtagcaagatcatagagacaaggaaaaacgtctttcagtgggttctccttataactcatctatccaaccaaaacttgatcctgagtccattttaaattgaaattgaggtcttgtgcttgaactctttccattccctttcaataacttcacacgaacccaccccaaaaagcctctaacaaattgaatgtgcttcaaaaattgaccctctagcctcctttcaataacttcacacgaacccaccccaaaaagcctctaataaattgaatgtgcttcaaaaattgaccctctagccttaatttctaatccttaaaagactttcaaaagcaagggctctgattaccctagccgcccttcattgccataaatctaccaactcttgcattatgcagtatagcaagatcatggagacaaggaaaaacttctttcgatgagttcttataacccatctacccaaccaaaacttggtcctaagtccattttaatttgaaatcaaggtcttgtgcttgaactcttttcgttccctttcaataacttcccacgaacccacctcaaagcttctctgacctctcttatgctccaacctccactccctaaactttccttgaatgaccctcctccacaagctttccatcttatttgtgcatctctacaaccacttccccataatggctctatttaaagtggaaagcctttgattcccaatcccctccaaccaagtccctctataagaattctccttggtttttatttcaatttgattctaagcaccataggtttgacaaacaatgaaatgaactaaatcagcaaacttgtgatgggagtcaatttacccacttagacaagtactagtttcaagaagctagcctcttttgaaattgatcctccacatgaatcccatagtaagagttaaaataagcttccaatggaagtcctatatagatggaaggaaagccacctatgctataacctaacaaagaggctaatctttctagtccctccactcacctaccaaaatcatctccctttgtaaattgatcttcaatgcaaggtaagctcaatgcaaataagtattcatcaaaggtaccttgtcttctccttgcaagccttaagaaacagggtatcatctgtaaaaaaaggagacaaggaaccttcacctttactcctcccttacctccaagcttgaagccagtgatagaacccctttgcaatgctttgaaataaaacaagagcttccatgaccaacataaataaagagagaatgtgtcatcttgcctcaagtccttggaaatttttatgggagtgccattcaccaacactagaaaacttggctatacaaatgtttgtagttgttccagcccatccattgctgccttgatcttgatttctccataactggttgcaaaatagaataaaattggatattgatccaacctttggtttactggttttttctttatccaacttgcatattgatcctactcttgaaaaatggaataaaattggaataggataataaaagagaaattatttattggaacttttcttttatttatttatttttattttaaaattttctttcccttttctgtcgtttcctttctctttcttgcttccttaataaactttctaagctacggtcaaagcagaagtatactgaaaaacttgagagggtgctgttagtaaaggttagtgctgagaatgaatctcccagatctactcaagggaaggaaaggaataactaaactttacgtaggattagtgttagttggaattaagttaggattagtatttgttggagccaaattaagagttgtgaagagagagagaaaagggagaatccctaattattgttattgaaaaactgtaaagaatgcacattggacttgggtatatatatacatgttagtgggacccacaatacaataaggaaagaaaagaaaaaggaaaagtaaataacctaaataactatacactatctaacaagagtagctaattaggttataggagaaattagaattaaattcatgataggttattataatactagtggaatttggatttctaaagaagcccataaataacggctaaatgatgtaaatcaaagtataaattgttaataatattgtgttttcttgtatgctttgcaattctcaatagcaatactccattaattttctttttggtgaaattcctagaaggccttaatgctactctaaggtttccattccttcttctccttatcttctttcgttatattttttttttttttttttatttcgctgccataaactttatccgttagtccattccttaaaccctgaaagataaaaaccctagggttgccctacattagttagcctacctagttggtttagatattaactttaaaaaatgcaagtttcctctcaaaaattcctccaccaaattctgtactacattatatttgaagaaagcacccaataacaaatccatattggaagacaaggaactaagccgctctacacacatatatgaagcacaaacagtcacattctccatattcccttcaccccaccttctccatattccccactggaataatttctttcttatgtaggtctacttttaaattgcttcagagatagcaagatacacttgagatgcagcaactgctcaccagccatgtcacaccataacagtgtcatcagcaaaaggaagaacaaatgatatatcaccaccccgtagctgcctgctcttcccgctctaccaaccagaataaagcagccttgaccaagacgaatagataagggaagagcagatctccttatctcagaccacagaaaatctagaaaataataataatagtcataatctgcaggaactccattcaccaaaactaaattctaacaatagatactgaaattctatacgagcaactgcccatagcaaccctttctctacttcaatccaacttggtggtccagctttttctatttccaacttacaatctcatttggaactctgtaatttagaatatagagttccaatggaaatgagaatagcatctaggttttgtctatgctcagcaaacacattattgacctccaaaccacatgccttagcctgttcgcaagagtgtcagccggaagttcatataaaactcccatgagcttaatatgcctaaattcctaatatcctctactccacctttttgaggaaccaaaactaaaatgtggcttttaaatttttctttgtgaaaacagaaacctagaacttcctcaaaaaccccaaagcattctctttcatagtctcccattttgtttcctaaatgccaaaatagagttgtcagagccaaggaccttatcctcatgcaaatcatgaagcaccacctgcaattattcctcatcaaaaaacttctcaagagtagtcctgtcatcctcacctatagattgatagttagcccactccataacagccttctaacaatctgatcttaatataagaacaggaaaaatggcaacactccttaatgttataagcttctaataacaaaaatcagctacccatgcccccccaagccttgtatgtagggagagcaaattgacaactgctaaaatattctgatttaattaatagtgtaaactcccagcatgactcaccaccacttatcatgaaaccgattgtaataaaccattcaacaagattcaagagcattcatttaaaaaaaaaagaaaaagaaaaagaaaaagaaacgatgacatgttatcattgtcttatgccaaggtctttaatgttcccaatatttttttgtcattatcaagaatgtcttactgttttatcccgtgtttatcttttatggatcaagttatatacttacaatgctattgcctatgtgaagttttaaaagcctttccaaagaaagagatgttcagaataaaatcccaaattcgtgatgagaaccccatatactgctttattataagaggtgcataccgcaggcattgatagaccttgatgcttgctgaggtatttcttttgagagcctcagacttaaaaggcctgttgaaattttgagggccattgttattcagatagctatgtctaacatggtgccgtatgggatcaagatccattattgggcccaacctaagctaggttgagatttatcagccctagcgtgtgttttttgtgcttggtttggggtggtttgtcaccctacacgagatgaattatatgtcatttatatagaattccactcgctcctgtgtaccttatgtgcactttattactatatgtaatgcctgagctccaaaattttcatatcggtttacttgtaaatggaactctgaccagttatctaatgtaggctggccgctcaagctatatctccggagagatact

SEQ ID NO: 13723 - DNA, 4084 bp, Vitis vinifera
  Intron number 4 from transcript GSVIVT01012532001 (locus G SVIVG01012532001) derived from phytozome v7.0 (chr-ID chr3 _random; pos 767252 to 771335)
tctttgatttcttggagatccaccgcgaaattcaggtgattttttggtgtgttgctcagttctcgtagttttggttggaattggaaattaagaggaagggaccgaagttctgaattgtatgatttttatcgtctgggactggagaaaatgaaaatcttttcactaaactgaatttaagtgtcaatttggctttcatttgtctttgtgagattgaggcaaaatctgttacttctttttcccccttctatactttaggaagtttaggaaaagggaaaaatttagtgtcagacctttttaattggttgggagctgattggtttagaatttgtgtgggtagttggagttgtgtttgtaactggaattgcgaaattctactctgttgctggtaaaacaaagtatatgaaaagaattgcaatgattgggggagaaacagaaacgtccccaactcccctgtaattttttattttaagggatcccctgaactggctgtaataccaccatttagcttacttgggttgaatttttgttgtttagaaaataaaacagcacagaacatgaagattttgcggttgttttttatttcttgtccttgtttttcttatggttaaacaggaaatagcatcttctaaatcatggaagttaaatgtcctgaaatatgagaagtgggatggcttggggttttttgtgctgatggaatacaaattggtggaaaattgtgtttctggtattagtaaagatgctacatttgtggtagtgaagttaatcatctgtttgaaagctatttgcatgataagagttaataaggctggtttgtgaaccaatttgttttccccaaaatggtgtcccaaatgatagggaagaaagatgcttatcatattgaagtacagtttgtttttgtggaggctgaaatacttataatcttgtgatgcaccacccgggacaatgttatcaggggttattttgatatatttttagcatatgcttttcccaaacacctagcaatgccttttctacagaactgttgaaaatttagaatctgttctatcttgaagttgagagggcctgtccgattaatgctgtatgtactctattcatgcatcaaattggttttgatcttttttttttcaagaattatgtgcatgcttgtttggcatgtgtatgttttggatgataatcattttccatagaaattttgtttttagttgttatgcgctgttggaaaatgcatttacctgtttttattggattccacaatttttgtgaaataaacgtgtggaattatttatgagaatgactcaagaaacttagaattatttttttaattggctattaagtacgaagttcgaaaaacttacacctaggtcaagtattttcataaagaaacttagtcctaggaaatggtgcgtcacaagtaccaaaagtgtcacctctaaaagaaatgtttcatatgagtctgaagcattggtaagttgtttgtgcgttcccatttatatgtccagaagcctaatttacttgccaattgtctttgtttgggttacaaattactatattcagtatacagtaagttctataatgtgcatggtaaatcgtatttcataatttatttgttgtcctgaaaattcattccaatgctgtgatggttggcttttgtattttgaccaaggtatctatgttgagacggcatggtgcaggtataaggtccatgttaaatatggttctctttctttgaacatgatattggctgtttgagaggattgatgtttggttattagagaacatggttttcatcaatctatgcatccagaaaagtgaagagagaaaatcttttcttgaaacagcatagagggagacaagaaataagtgtgttatgaaaaaaggtgaaaaagacaggaatttcactttatatagggaacttgtagtgtggtggagaaagagaaactgtgcagtttggattgggaactagggtgaaaaagtggcattggaagtgaatttagattgcatggaaaactagggtaaggagaatcaggatgagtaaacttgcaaatatattaggcattgtatagaagaggcatcaatgtttatggtggattttgttgattagttagacactgagtggaggagggagtgttttgtttttctctccctatttttattcttcctttgtctggtgtccattgtatacttcctttgtagttgtgctttaggcactttttgctaatttatacatacaatgcatgcttataaaaaaaattagcatttggaattagagtgtggatttgttaagtaaataaagtaaatatgatattttttaataaatgataaatgaaagaaaaatcatcaaataagtaatcttcctaaaggctggtcaatttgaaatccagattgatcatcagctgagtttccatattttaaaaaatgtgggtatttgaaggattgggcacatgtacacacacttgtatctaaacccaacatagtttcaatggaatgatttatatattttattttatgatttcataatctttctaagtgcaacctaatatcagtatagctgtcagatttcctatcaaaagaaatttatatggcagacaagttaaatatttttttagcaatcgactgtcactgcatagagaaaccaaaaattccaatggtcattgctaatgactgtagtagttgttgctcagcctgaatttcattgttgatcagtaaatgctcatgaagggtctcaacacaaaatatcagtccacaacctagtttccacaaagttttggattagaggatgaaaatcatcacacccccttcttatagttttctgaagcccatttgtattaccctcttacccctagaccactcatcactcccaagagatttacgcttcctgacctcttctacaaatatcttggttttactgctaatgcacaatgtatcagacacaggctggttaatttttaaatgagttgatagttgaagttaaataaagattttgtttttttttttgataggtgttgaagttaaatagagatgtttgcaattccggattcatctcacagaacatgtcttatagttggttgccaggcactggccttaaatcccactaattggaaaattaaacaagtttatttgcaagaggatgtgctggttgtaaggaaatataagtttacaaaaaatggagctaataaagattactgttatacaggagctagtaaacatctttgtgttgtctcccccactccttttcttgttggtcatagtgtgagatttatcacctcacaattcactattattcttccaatttttttatttatgagatgtgtgctagtgtccttaatatgattaatttgttttgcactatttcatgctatactaaagcttgtcatatcttatttctctgcaataattcctcataatcaacctagggtgtgaagttcttaaaaaacacttggatatggagtttttcagtttttgtcatagaggagaagacattgttggtggttcatcaatcaagcaacattcaaagtacaaaaagtgattataaacatataaaaacaaaaataatacagttttatgattcattagtgcagctataataaatttaagtaagtgattatttttagatgactgttccacggagagggtggttgctttttgttttcgtctatcaaaagaaaagttgccttttgttttctctcctcccttttgctttcctgttcgtggcttttgtatgcatcatgtgcatcttgtgtacatgggtgcaacctgtttcaggtgtatataatatattttcttgttttgcctatcaaaaggaaaaaaaagatgattatttttaaatgcatttagaagtaaatgccatccttaaagtatttaattaattcttcttttcattgttctatgtcacagtgagtttgtgcttgttaggggttctactagtttattatgctcaataagtaggtgattatttttatcatctcaagctttgcatgtataccaaagtaatacttaaaactttgaagatagtttccccccccctcaaaattctttccaatcatcttcaggctgagacagatagggaagctggagaaaacaaagg

SEQ ID NO: 13724 - DNA, 14770 bp, Vitis vinifera
  Intron number 7 from transcript GSVIVT01001656001 (locus G SVIVG01001656001) derived from phytozome v7.0 (chr-ID chr1 8; pos 13979914 to 13994683 reverse strand)
gaattcttgacgttgcagtgaataaccttacagatgtaatccctccaacatttggaaacctatcctctcttactgttctcagcctagcaagaaaccaattctttgccaaaatcccaaatgagttgggtcatctccataatcttcaaaaactttagctctcagagaatcagtttgagggaaagatcccttattccatctacaacatttcttctttgatttacttatctgtatcacaaaatatgcttgttggagaaataccaactgatatgggccttgcacttccaaacctgtcagaagtctacttagcacacaaccagccggaagggccaataccctattctttgtctaatgctttacaaattcaattcctagacttttcttcaaaccactttcaagggtcagttcctctacttggtaacatgaataatcttagactcttacatcttggcctggataatctctttttcaccaccaagcttaatcttcaggcatttaattcactagcaaactgtacccagttagagcttctatatcttaatgataaacagctagctggcaaacttccaacttcagttgcaaatctttctactcatctccttgagttttgcatcagcagcaacaattttctgactggtagcattacccaaggatttgaaagatttcaaaatctcttggccttagacgtacaccaaaataaatcttttcacaggtaatgatactaagtgccagaatttaaagaaaaggtctaaaacagaacaggctcaatggtagcatacccaatgagattttcagacttcctgatataatcgagaagtatttggcacataacgaactaagtggttctctgcccgccctagttggaagtttggaacgccttgaggtcctggatgcttctaataaccagcttttaagaaacatttcaacaacaattggttcttgcctaagtttgcttactttcaatattgccacaaacaaactctcaggcttgataccagtttcgatgggtaaattaatagcattggaaagcttggatctttcttccaacagtctgactgggggaatccccgaagagttagaggatcttttgtatttgcagatcttgaatttgtctttcaaggacttggaaggaccagttccaagaaaaggtgttttcacgaacctcacctggctttctcatacaggaaataataagctcagtggtagtgaccctgaggctgcaggaaagctgagaatccccacatgcatcacaaaagtgaagtcaaataggcatttgatactcaagattgtgattccagttgccagctttgctctgttaatgtgtgcagcctgtatcacatggacgctgatctcccaaaacaagaaatataggagaggaacaagtttttcatctcctcttttcaatgtgttgctaccaaagatatcatactctgacatccagcttgctacgaatgatttctctgcagaaaatttggtaggaaagggaggctttggatctgaatatgaaggagttttcagaaccggtgaaaatggggttgtggacccgcatttctcacgtgtgcccccacttgatcggcgagactcgcttttatttgttgaaaattttgtttttagaaaagtcggagtcaccacttattttattttattttaaaggaaaaataaaaccctaaaacatgactccatagtttttggaaaagcatgtctttgaaaaacccgagtctaggtctgaggattaggttacttattgggaaggtacctctaggaggtaacacccctctaagccctacaaaggtctctattgactacgttgaaggaaatgtggcaatcaactgattaattgagggtacctaggtaagctaaggtgatctcaaaactagcatgccaaacaagaaaaatcaatcacgctcacaaaggagagttaggatgcgtacctggaccacttcttaagcactatcataaaacatcaatggttagtttagataatatatctcttagcatgcgttttatcatgaatgatcaaacaatgtagcaaatatcaagacatcctaagcattctcaaacataggtataattcataatgacaatcatatttacagaatttagaaggtatgtggcaggagacgtacttggatagcatagtgtagacccccattttggggctcggtttcatgcactttcatgcagcttgtcttgccaggtgtcacaaccccaggaggccacatggcgtcttttaattggctgccatggaatcagatagtgctttttgatgagcaatcaagaggcgacacctgtgggaggatatgcagaagaggtacgtttctgttacaggggagagggggaggtgcttttttgccggtgaggatttttggagaaagcaaggagcaagctgctacggaaggggtttttcagagagactttggaggagaaatcttttggctgagagagcaagctgcagagggaggtttttcatggctttttaatagagattttgaggcgttttaagctgaacagaaccttaccggagaagggcactctcagggatgaatgcaacaggtatattgtttgatttcggatccttgctatccctttgcatttcttgttgatatctggatattcattgatttgcttggggtggataatgaaggccacttgttgcttgttgagatataaccttgcattcatgtttggtattgttaatctgagcatgtcttgtgtctgttgtgaaacgcccaagaatcatgccaatatctacattccatattgttttttttctcacctaatcagaggactcacggataactcatgaagtgaagcctctgatgatcacttttactcgttttcttttgtgctctgttttctgtggattctgctttgttatggctcctatttgtttctagatcttgctcaatgcaacggctgtgagaaggtatatccaagtctggctgaacactctcacagagatctattacggttgaaaggaacgtattgggttttaagagatattttacagaggttgttttgactgaagaagtaaataagctgaagacatccagagagggaacttgtttgagctgagaagggttctggagaataggctttgtcagagaaggaagaagaacccgagacatgaagaattgcagacgacttgagaagaagatcagctggagaatgtccggatgcatggagctctaatatgcttggcacattccttctggggatttgggatgacacaatggtgccaaaactagtgcctgttttgttcccatgctcacatacaattgtttcatctcctcagatttatgacaaatcttcacgcacaaaagcatctttaacagtttatgcttgcacttccatgttgagtgtgaaaagccctccctgtcttagtcattaagtaagccttcagcctggcagaaagtgaagtggtgactcccattccctaggatcccattacatgatttgccagaaagtctaacagatagcatgttcaagggaatctacaatggcaagcagtgccacgggtatgatattgcagtagtgttgagcaaagctttgaatgctggtgttgatggaattataaaccagcggtttttgacgtggcgccatctgtcgttgcattgctgccaagtgccgttgtcctaggagaactgccaggtgttcctcagacggtgccagcaatgagttaaaacatgtttcctcttggggcatgcgctcttcaaattcctagacaatggcttcaattctgtcatgtggaaatgagacctttcaagcaggaacctgattcatttagtggttctgtggctttctcatcagcagtaacgagcacaatgatgtcaatggcatggtttctgaggctagtatcataggcggcatccacaaggctatgtttgataaagatatctcttcacttggaattgaacctgatcttgggaaggtttcgtcacctggtttgaaccaggctgttcagagtttgctcattggtaagtcatctttaattggagggaggaacagaacaaggagactgaccttattcatattatggatgccatgatggacttgttcaccattccaataggaatcttcatttggacttcaactcaggtttcagcatgtcaacgtggaagcaatagtgactcgacaggtgagaaacaaagtgagaggaatctacagtagaatggttttgtggaagttaatggaaatatcccattagccaagtatgagaacaaggagaaaccttgagatagagaaggagttgggctcttgataaaagggatgctgaaatatcccaaaggaacgttttggagatggaaaagaataatgatggggtgtccaagtaatgagacttgcgagacatagtgaaagcatggtatccagaatgaaaatctctcgccagaaagctcatagaaacctttgaggaaattcactatatccttttgtaccgacttagggaatttcagtccagaaatcatccatccttgcttctatactcctttcatacccacttccatgctatcctattctccataccaccctcctcatgcattgccattattcctattactcttcacacccatccccattacccattccattaattccatgcacatacccatccaatcccactgctacaacctcttctttccctacatcctcacactccaccatacttatcactcatctatccaactcatctctccattccgtatacccgtcacccaccattcatccctcataatttcattaccatattccaatggtcaccaattcagctctcctaccacccggtccactaaagatgcccatatctttgaaacccatcatgcctatatttttcacaccacgtaaccttcatgaggaactcatggaagcttcagctactggcactgatgtgggcccgattgtacagattggtgtgggattctattcaacttacttgatgtttgagaagtctcctatagtggcaccaaatgctccttcgtcaccagctctcaagaagctttaggacggttttcggagaaacttttgcttcagattttgacagtttgtcatcctctgtcggtgcctcttcagcgtgggatcagtggcctgattttgagagcattgggatctactctcactcaaacgaatcctatcaccctacaggttatcatgggctttgcattagttattgcatggggatttgggaaggaaatcttctaaaacgcattgtggtgagtttccacaaagcagatagagggttcgattgcatgcatggcaacgatcatgcatcagagtttcattgaatgagaatgtcccaagatgtcaatgccatggataggtgcacagcagaataaaaccgagccttcccgtcttcctcctacaactattgatgcaactgtcaggatttgctttcactgtcagtagatgggctcaatcttatgggccctgttatgccacgccacttatcatgcgtggtgatgcgtgtagacccgtgaccttgactgatttctggtccacaatggctcagagtatgactaagcgttcaatgacaggaatgctaatggagtccagtaatcaccatacccatctacccgttaatcccaatccataatatccatctctcgctcctttattatccttcaatacccactgttcgtccccccaccgactcgattcctatgctacccagcggctacaccccctacgatgcagtttcccggtggttttgaaagaggaaagcccatatatgatgatggttcagaagcttgtactctacgcttctatcgaagaagggtttcgggcatgaaccttgaactagttgccatctgttatcgcgtcttctctcccgaagtcttctgcaaattctaagccctccatgaatcaattcaacttaccttcggatagtaatcagcatgtgagtcctcagttggaataaagcttgtgttgaaggtgacagtaaagatgagactcttaatgaagacccgtgtcacacttgcttcctatgttcggtgtaaaaacacaggaaaacaaactgggagatagcacccttgctgatgcatgtttacttgaaagggatactcagaaaattgatcagcccgctctcacaggagagtcattctcattaacgaaacattctggtgagggaattcattccggctcaatgagtacgcgaagtcaaactgaagtagtggttactgcgactggagtatctgcctcctttggaaaggcgactcctcatgtggaaacaagcacacatgttgggcattatcagcaggtgtcttgatataagtcaccgttttggttcttatatttaagcacctacaagcgacggccacttgatcatagagttgaagacgcatcaataaggcgcagataaaatcagagggatgagtttcagtataagcggagatgtaaatccaattgaagatgtggaactaaggaatgcttatttcagttatccaacaatgacagaacaactacttacctgtaatgaggtagcatgatgaagcatgggtgtagacttccacgtggtacaggcagctttaatgttgatgtttgaactcccgtagacggttgaaggctgtttcagtgcacagtttccaactggagccattgctcttgcttcagttacagccgtacccaattcagaagggtcctcattctcatgtaatggtattccacaagctaccactgtttctggaaccttatagcagttatggctcagtgataagtgcaaattcctcctaagcgtgatatgagatatcacaagcagtacctcgagtcgggttcaaaatctcggtcgagaccggtacgactcggcagagtcatatccgcctcgaccatggccggtaccggaccgatacccgagttggagtagaaattgtggagaagatcagatgagaggatcaaaacccacgaaaatgaaaaatacagagttagaatcctgcatcttggagttgtcggcgaggtcgaagaagcacgcctgcttgttcggatcgcccaagttcctgccggagatggaactgagcaacatcaagagcagagtcgctggactgctgttatcatcgatgttcagcaatgccgccaccgtcgcccaccattctggcccagcttggccttgccgaacccgttcgcggtgttagcggcctggcgtcaggcgtgacgcagccccgcacctcgtgcccgctcgcgccccaatcgcctgcaccacctgcgactcacccagtcgcgctaggagctcagccattgacgccgccctctcaatgaaatgggtatctttgatgaccgagggttatgggtatctgtgatgaggatttaggttttaaataatatgtttttattttttaattagattatgagtatttggtggggatatgggtattaaataatttgataaaaattataatgataaataataaataataaataataggcttatatcaaataaataagaaatacaaattaaaattaatgaatatattttataagaaaaattatatttatttttttaaagatgaattatggttttattttttttaataattgaaaatattttttaaaaaattcaaaatatttaatttaaataattttttattaaaaaaatttactttttattattttcatcttcaataaaaaatatttatcatcaagtgattaaattaaaatatttttaaagatttttaatattattataaatcatcccaaaaatatgtttttattataatttgaataattttaatataataaaagtttattttattaattttttactctacttatttgtatttaattttttaataatttttataaatttttaaaattattttgagctcttaaattagaattttttgcatatcacccgataccgatccgagataccgataccgatgtgcctccggacctcccgagtcaatgaccgataccgcgactttgaactatgacctcgacaccatattcagcagtccatcagattcaaaattgtagcagaagctcttcattgcctctagaaatccatggaaatcttgctacatatcgccagcagctcatcattcagactgtctgcatagatccatcgaactccccagggatttaggacactaagtgagctgaagatcaagcctacatggctgagatgttgatgcaagggaagaatggtcgctacagttttccagcaatattagcaacagatcgagttactcatgtgttcatgcttgggaaagggtattagggacatacaggaaattacgagagatcctcttcacaggcagagatggaataatatgtagtcagtgctccaggtgccccaagtttacgcttctagtctgcatggcttgcttagtcactcctatgccacatgtcacctcccattccatcaatcttttggcttagaaaataattttctgactcctttcttgcaaataactttttaaacatcaattttcaaataatttcaatattttccatctttcatccttaggtattctttaggttccaaaattgtgtttttaataaaatttgctgccatctctcttcggcatgcaactttcataacttctctgattttaaaacgttttaaaataagccaaaaatcaaatttcgtaattctcaggtgatgggatttatggaattgattcgtgcaaaatgaatgggctttggtgggggctaacatcaaataaattttctttaaaataaaaatgaattttgagtgaagtgtcatgcgtgcctttgatgattttgtactcgatttagtgacatgtgagctatgtttatgctctttattttgcactaaccctctctcttgatagcgcatagtggctcactgctcaagtatacactcattcccactctggttagtttatatgcattttctgactctcatatgtgcatgattgattcgagtattcattgatttcctcattgattgccatgtcagcttcatctcattagtagagacccgacctttagggacttagaggggtgctacggtctttatcgtaccttcccaataagtaacctgacccccgaactcgatccggtttttcgtagatcaccttttccaaaataaggagtcgcacttaggggtttctttcttattttgtttatccttttaaaataaaacaaaaataagtggtgactccaagtcattttcaaataatcaataaaaatcaatttttcaaataaaaatcgagctcgccatcgagtgggaaacgcatgagctgaaatgcggggtccacacatagataacttgtaatgtgctaccacaagacatgagaggttagataacaaacaataaaataagaagtcctagcatgcttgttatctaattagcatagaaaaaaattatcacagtatacgaaaccatcaattatcacttatatcttctatataattcctaaaaaataaatagacatgagttcatcaaataggaaaaggggcaacaaagatgagttttgaaaaatttccttatgtaggggtttcaccaattccccgattgatatatacaaatctagcctggaattatcccatttgtttgagaccacaagcttgtattaatgtcttactcaaaactataattttatttgaaatttaagaaagatgtgaaccgatcaaaacatggttgcacattatttgagaaaatgagattttgattctaaaaactctaaatgaatttttgaaatggatttctaaagggaatgagattttgattttaagaaccctaaatgaatttttgaaatggatttttaaagggatcttttgagaatagtgttatgttttaaaaataaaagaaattaatttaaaaacaataaaacatatgaatcaaaataccaagcaaaacaaaagagaacaaaatcacaaagtagaatttttgacaatcgagaaaattgaagtgatgagaatggaggccaatcttcactatttttcgatggcctctgacaagtaaattttaccaaaggctaccaaagcaataaactattcaaacttagatcaaataaactaacgagatacccaccaagaattaatgacgaatattcaagaaacacatccattaagaataacaatcaagaattagcatgagatcaattaaacacacaaacacatctagattgattaaaatgaaccaaactaaatcaaagcatgaacaataattttcaaacatagaattaactttattaatgaactaatattatataaaatacctaaatcgaatagatgtgtgaaactaaatcagagtaaactaaaggcatgaattttcaaatatagaattgattttattaatgacctaaaattatacaaactcctaaaataattaaaatgaatcaatttaaacgaaatgaaactaaaacaaaatatgaattcagggaatctaatttcgaaataaacttacattattaaaatgaaatctaggcttaaaaatttttttttttaacactaataaaggcaagtctaaaatcaaatatttaacatttaatattaattattttaacaaacaaaaattttacaagagcacctaaacctgaagttaaacaaaaacactaaccataatatattttaaaacgagatctctaacctatagaattaattttattgacatatggataaatagacaacacataaataaataatataattaattaaaaaaaacatgaattaatggaatcaattttctaaataaacttacgttataaagatgaaatctaaggttaaaatgaattaaacactaattaaagtcaatctaaacttaaatttttaacacacatgatcaattattttaacaaactaaaattttaccttaaccacaaattaaattataaaactacttgagactaaatttctaacctataaaattaaactcataatcaaatggataagttgatgacacagacaaataaatatgaataaaataaaatataaatgaaccgaaatacaaactcaaggaattaaataatttttttttaataaacctacgttagtaaaataaatttgagcttaacaaacatttttatcactaattaaggcaagtttaaaatataatacttaacacataaaaataaattatttcaacaaactataattttaactaaacctaaagccaattcaaaccatctttaatagatttttttatttttattttaaactgaatttttaacccataggttcaatctcattaataattaaataagtaaataagttacaaagcattagattagtagcaaataaataaataaacaactaataattaaatgaatcacaactaaactaaataaagatcaaactatattattttttttattcttcaaaagtaaaattacatgaatttgtattttatgaatttaatataatataccaaactaaacctaaacacaattttcattctgccatattaaaacaaaaaatgcatgctggagttagtaaataaagtcaaaccacacaatataataataattccactaaaaaaccaatcaaaccttcattgtaacatgaaaaccatatatataaaagttaaatgctgccatatttaaagagattcacactagagctagtaatgttagtcaaacaacacactataataataattccacaaaaaaaaaaaaaaaatcgatcaaactaattaaaattctaaaaaaaatcaactaaaacaggatcaatcaaaactagagtatatattagttatttatttattaaaacacgaatatatcaacacgaaacgaaataaattaaccaacttaaattctaaaactaaaaggatgaatcatgaattaaaattaacaacctttggatatgaaaagagtggcatggaatcaattgaaataataaactaaaattttaataacatctaaactaaaagataaattaaaactaaattaaatgaaattatgaatttcctaattgagaaaaaaaataaaaaaaatagataatgctaatcaaaattctaaattttaaaccatcatcatgaatttcccaaactcttaaaaaatcctaacctttcaattatcaacaaaaattgcccaaaccaatatttaaaaatctaatttgtcaaactaagaataataaattgtaactacgttaaacaaaaatcataatcttcaagctagaataatgaatcaataaaaatttatttatttagataagaaaaattaattaaataaataaataaataaataatgtctagattaaacatgaatttataataaaataaactttgaaaatgcataggtcaaataggaataatttaaagctaaatttagcaaattgacatcatgaatgtaatgctattggaaataattaaacctaaacaatagataaaatcctaaacaaagtatgaatcgaattgaatgtttcatggagcaaaattgaaatgggatgaattagttcacctttttcaaaacgtgaaggtcattttccactagtaggatttttttaataaaaaaaaaacaattccaatgatgcatagtgtagtgatacccttgcacaacaaattctctaaatgccttttcaaaacgtggaggctactttccactagtagggttttttaataaaaaataaaattccaagtgtggtggatacctatgtactgcaaatcctcaaagtgctgcgtgttagtggagatgaatttcctttgaaaatctggtgcagctgtggtgtttaggtggcgggattaacaagctggtgcggatctccaatggtcataagatgttgccggagatgcttgggtacggcgcaaagtgttgcggcagcacgggcaatggaggatcacgcttcggaatcgatctgtacctatcaggacggaagaatctctccttaaaattctggtgcgactatggtgtctccgatgagagggactggacccaaaattgtctccggaaatcagctttctttccttccttcaccggtacggctgttccggaaattccctcaagggtgcggctttaccttgcacctccaatggtgcggctgtactggaaaaatctctccagcatgcggctgtactggaaaaatctctccaggatgcggctgttccagatcaccttcctctttccctctgatgcgtcctgaaaatctcaaaatggtgcggctggtccaactttgagagctccagatttctgcgtgaagtttttttttgttagacgacagtgggctgagcgtaatgccaaaatcaaatcagtagcagtcccgtgctcctttaaaaaaatccttaattagcagtcgaccgatgaccctctgaaaataagaaaatccttctctctcacgctgtccaactcttcttttctttctttctttcttttttttttttgcagaacggaagcctccctctttattttcctgcactttcattccttttatcgcccactctcccataatcgtcttctccattacgttcaaaattttctttttcattctgaatacaaccctccccgttgtccacatacatgctacactttccattttccatgccaaaccgctttggtaagcttccttcaatcccacattcaactcctttctccgcagtcctggaaggaacaacagcaaaggttttctttcgctgatcaaaatgagctttcaaccttcccgtattcattctcaatctgcagcatgatgattggaccaccttgccaaaagaaaagtctttcctccctctgaaatagaaagtaaatggtaaaataaaaaaaaaaataaataaataaaataaaacaaaaaatcatgtagttgaaaatttcaaatttaagattaaaattatgcaattaaaactaagatatcaaatacattaagtgaattaaaatacgaagcttaagcaatttcctacaattaaagtaaagtaaatatatgaatatatatgagataacaattcatgcaataaaaaaacaaaaatctcgattctcatgcaattgtccgaaaaagtgaataagtaaatgaataaaactaataaatgaataaataaataaataagtaaaataagaaaataaagcacatgctaaccatacctaaatgagcctagaaaaagtcaaagtgtgcctaaatgaacccaaatgtacctaagtgggcctaaagtggtgcctaagtgggtctagggtggtgtctaatgggcctaagtgtatctaagggaaattaaggtgcctaagtgggcctaaggtggtgctcaagtgtatctaagtgaacttaaagtgtttaagtgggtctaagtgaacttaaagtgccttaatgggcctaagtttaaatcagggctgccaaaagttacaatacggttaaatgaatccctcaaccgaagtctccgagatgacttagaaaagataggctacgcgagtattaatgagtcatcagggaattgctgtaaaggacatgtgttaggaggacaaaatggagggtctataggggtcaacaccatttttgcagtgaagattatcgacttacaacaaggtgaagcttctgagaatttcaatgcagagtgtgaagtgttgaggaacattcggcatcgaaaccttgtgaaggttatcacttcatgctcaagcattgacaaaaggagggttgaattcaaggccttggttatggagttcatgtccagcggtaacctggagaaatggctgtatccagaagataccgattctgggttaacttcgactctgatccagagactaaatattgcaatagatgtagcttcagcttaggattatctgcaccatgactgatccacctgttgtccattgtgatttgaaacctgcaaatgtacttttagatgataaaatgggagcccatgtgggagattttggactggcaaggttcctttggaagaatccatcagagg

SEQ ID NO: 13725 - DNA, 2806 bp, Vitis vinifera
  Intron number 1 from transcript GSVIVT01019089001 (locus G SVIVG01019089001) derived from phytozome v7.0 (chr-ID chr4 ; pos 16806388 to 16809193 reverse strand)
ttcgaggacgagtgagtcacttttctctctgtactctctttcgttgtttttgatctgtttggatgctgagaaaatcaaggaaactgaacgaaaatggaactttttggttggatttttgtctctgctcgactgagtagaagttgttcatgttcgtagcctgttgatcagtgaaaatttgtaggatttgattgtttttttttttttttttgcctttcattttttttcttgctttttcccagttgcccaacggagttggattcggtggtttgacggagaactactgatgttgtgtttactatttatacccaatctgtgatcgcgatggtgatgatgatgcggttcttttccttttctttttttttttttgccgagaacatgaagcaaagtgaaaattttggttgtgattttttttgtttggcgtttttattgaatttcttctattttgtttggtaattggaaaaatgagaaactgcttagttgagtggaagatttgatttctattttcctctctaaatttttcttgctttttttcagttgtaagagggctaaggttcgatggtttgactttcaatcttcactattctatttagatggtgatgattacccactcatttttcttctcttttgtccgactttgacttttcggtattatttgtatgtccaattcaatattgtgatagtcatattgataatagtactacatgttttgtctccttcctactgttgccatgtgtttggcttctgagaaagaaatatgtgaagaaaaagttttgctgagaaaatgaaggaaaaggaaagaaatttgaaaatttccagtttgtaagttttattttcttgtagtttctgaagaatgcaaaactttccatggtcggaccttttagtggtgtcctaatcagcatgaacttttctcggtttttcctattatttttactttttggtgtggagggtcttgccttttctcagttgtcaaaaggaattagatttgattctttgaatttgaattttgcacattttatttatttccaatccaatccatgattgtcaaagtgctaatggaacactttatttttattcctattttaatttttggctgttgctcattgtttggttgctgggaaagaggaactggaaccttgagaggcttttttttctacccttttgtttttgtttttgtttttttttttttttgtgaaataagaaattattaattcacttcagctaaagcaatagctgtgaaagaggttgttgtttttggagctctaaatgaaggatgcaagttttgcagttctgatttttctttggtttccccacttttttttccactgaccaaacatacggataattatattgacctgttttttctgtgtgaattacaggaacgggctcttctcatatttggtcactgctgatgatataatttgtcatcttcataaatttgattgataatcttttgtttgtatttggcatgttgctgttctatcaatctcttttgttgttttcttttgctcaaccctctttttgtttgctgagaaatgaagaaaatgaaagaacttagaaagcacccgatgagctgaacctcgtacatctatttggcttatcttatatatatgtaaattgtacttttctttctttgcttttaacatattaaaatcagcccctaaatatacttttaagaggggcagatagtcatttcttttgcattgggatttcaactcttgttgggtccacagtgaatgctgaaatcaaaatagaaaaggtttaatacccttgatagcaatagcactagaagacttttcccctcaaatggcttcaattttgatgatctgatatatggataatctagtaggattccggttactcaaaactgaaacaaagtcctactttactctctggtagcatgctaaatggaaaggggtttgtagtttggttgtaaggtgcagttaatcaggatttgtataatgttgttgttgctatttgagcttccatttttttttattttttttttgttgcttgaaacctatctgcatccatgggtgtaaccaagattggttgagcttgttacagtagttgtctgttatctggttaagggttgaaactcattcaatctcattgattataggtaacctttttttcttctgtccgcttgttctccatgcccttttcacttgagccgtacctcaagggcacattcaatctcattatcactatgatgcttgaggaggccttttaatgtaggagttattttttctagatggacaaacagggataatatattgacattgaatggaagtgtttcttctagatatattgatctatcttccttgggatactacattgagaatttctttctctaatcctctatatgagttgccttttgtgtactcttggatgactgttcagtaattcaatcactgtgttcatcaatcaagcttctgaccgaaaattaatgtgcagtattaggcacaggtagaactactgttggttgaagtggttttatatcttctgtcgatgtgtattcgtttgattactaatatgttttttagtagcttttaatcagttctgtattttaccctgtatgtctgagttgctaaaatgttttgaactttaaaaaccacatgtcattgttttgatgaaattggttattttattttctaatttaattttgttttagtatttcattccatttggagccattttcccttgcttctattccaaacctattaattaggttctctgtttagcaatacaggaagcctatgtttcttcctagttattgtaacacttctttctttctgacccttttcag

SEQ ID NO: 13726 - DNA, 21616 bp, Vitis vinifera
  Intron number 6 from transcript GSVIVT01021593001 (locus G SVIVG01021593001) derived from phytozome v7.0 (chr-ID chr1 0; pos 7711165 to 7732780)
gatacttttcttgggaaaaggtcaaattttcatgtttgtttctttttttatgaaatacgttttactttttgacttttaaggtcagctccttgtagatttgtctcacatcttaacaccatttaaaccctctattcatgctcaaatagagatatacatgcctatgttggagttctaaaaggagaaacaaaatgcatgaaacaacctatttgtttccctagaggcaaaggggatcaacctaaaggcaccaagcttaagagttgtgacctctcatttttaaggaacaattataataccatcgagatcaatgcatcattttttagatatttaaaagaaatatatattgttagggatttagacccaagttagtttgatttatattgttggcccatgtaggaagtcaaagtcaaatgtcatttgaattaatatttgttctttaaattttatgcttatcagattaggagtcttatctaagtttaaaaataaagatagttatctatttggtagttatcttattttttgagtttaaattctggtttccttgattttgaggattctgttgaagagtccaagaataaattatggttgtatataattctttgaagtaatgaagatttaattatggtgcatactagtttttcttccttcccaatgaatggtattaaagtcggttcttagttgaggaaaaacaatggttaaaacagttatggttggagtaagtagagatagtatcatagaggaatctatggatacctctcaaacaccttccacaattgctcccaccatagtcactctagaaaacaccccattacatattacaacaaagaaactgaatgggaagaattttctccaatggtcaagagcaattttgcgattcgaggacagggaaaactaggctacctcaacaacacaatctcaaaaccagaaaagagaaattcttcatccacaacctggtttgcaaacaacaatattgtcatgtcatggcttgtgaactccatgagtgatgatatccaaaacaactacttgtgttatctaatcgtgaaaaaaatctaagactcattgaatctctcttattcagacttagagaattctgcccggatttttgagttaagaaatatggcatggaacttaaaccaaggagatatagacttgggcacctattttacctttctttcaaagctgtggcaagaactagacctagtagatgactttcaatggaagtgtactgaagattgcaaaaggtttaaggcaagaattaacaaggagtgtatttactattttctggcttgactcaaccaagacctcgatgttgttcgtagtcgaattctaaccaccgaacctctacctgaaattgaagaagtgtttgctgaggtacaacgagaagagacatggaaaagagtgatgctcaatccaacaaaggccattgtttcagttccagttcgtgatgattttgccttagctgctcatggagttgatagggcttgtggagatgcctgcaaagatacttgtaatacacgaagaactggtaatctttggtgtggagatgcccgtaaagaattcatattactaagttacatcacattaatatttaaatatttggtgtttaacaatccttgtttccactttttattgtttgattattttctccattatggctgtcaagttgatttatgttgtcagcttaatatgtattgttagggatttggcaagatgtgatacccaaactctttaacatcactaaggctcatatattaacatgacttgacaagtatgtgagagtgggatgcttgtctggtgctcctattttgctttggatattgactattttcatttgttttttttagatgggcaatgaaagagaaaagaaacaatactttttttttcttcataaaaactatgttatatttttgctactaattaacttttaattggttttttttatcatattatatctaagtatcattcaagattatctttagatgaatctccttatcctaaaatttgagatataaatgataacaaacctagaaacatgcccacacccacttaaacccatgtaacataagcactaagtttgatttataatgttagcttagtacgtagtaacttaaacttttaagcccaataaaattacttatattagtttttggttaattaacttaatcaatgtattttgattactaagttacattatattaatatattggtgtatgtggaaaaaaaatgttttttattcatgcatttctaaccaaataatatagtatttatagtgcataatcctacaaaattaggaaactaaattacacaaagtcagaaggttgactaattcttagaaatcctttaccttataaattaggaaaatataataggaaatatacaattattaatctcagaaattaacgaattatacaactaaacaatctcagagaggaattaatttcctagtgttttcaattaaatcttgaaaatttaggagctaactctcttgtatcttctattagattcatcaacatttactcctagatcatcataaattattttcaactagaggagttcacaaatttcttatgttattgctttgaactctacttctacaccggatttgacgactttagtttgtttctttcttttccatatcactaaatttcctctaagaatagtataatactcaaagattgatttgttgtctataattgatctagttcaatctttgtcaatgtaggcttccaaacttaaatctttctcaaagagtattccttttcttggagtggattttagatatcgtagaattccatttatagcctgtaagtgagcctcttttgaggaatgatgaactagttcactacattcaccatgtaggttatatttaagtatcatgtgagacaaaagaatgagtttcccaactaacctttggtatccccttgtctatgattgcattttctaatgtttctccagtcttattattttatttaataggtgtatcaataggcttacatttgagcatccatgtttctttcaaaagactaagaatatatttttttgggaaataaaaataccatttcttgagtgagaacataagtcttttatcttaaattctctatccaaccatttcttaagttttttcatttcttcaatatcatttcttgtcacaattatatcatcctataaataattaaacttgtgattttacctcttgttgatcatctgataaagagagcatgatccctttagttatgtcaaaacttctggtttcccatagctttagcaaattcttccaaacatgctttgggagattttttaggccatataatgcattcatagtctgcatacttcattaaccttgaatccatcactaaaccctagatgtgcttccatgtagacatctctttctaggttaccacacaagaaggtgttcttaacatcaaactactgaaaaaaccaaccaaaattagctgctagtagttcttaacatcaaactattgaaaagaccaaccaagattagctgctagtagttcttaacatcaaactattgaaaagaccaaccaagattagctgctagtaataataatgtctgtatagtattcatctttgctatctaagcaaaggtttcttgataatgcaatccatatgtttgagtatagcatttaacaaaaagtctagttttgtatctttcagaggttctatttgctttatattttacaataaagactcacttacaccccactagtaattcaatatcctatgtcttatttttttcaagagcactcatctccttccccatagctttctttcaattctcatcactaagtgtctcttggacaattggtggaatttcaatcaaatttaattgattaatgaaggtttgatgttgtgagaacaatctaccaaaagatatgaagttagatacaaagtgtcgagtgccttttccaacccttttcctaagacctattagcaaatttaagtcttcaaaaactggtgacaaaggagaatgactacatttggattcaatatctgtcaagagttcaaatttttgggtttacactagaatagggttaactaaccttcttcttaagtgggcttgtaatgacacaacaataatgctaccatttgtttcatcttcatccttgaggattcaaaagtgtcaacccctatatggtatagcggaaggtttgtttcaaaacgaaacaaaaaaacactgaagatcaagcacaaagatcacaataggatctgaaaattaaggaataattgtgataaattatattgaactccttataacaattacaataaacctttaaataatgtttgtaatgcaaaaataaaggaaataactgaaataggaaaccaaggtaattggaaactaggaaaactaggaaagaaataggaaactaatgatgaacttaaaatataacttaatgatgaacttaaatagaaactaatgatgaacttaaaatagaaactaatgatgattgtgtgctgcatcaagtccctcgacttgaagaaaactcgtccttgaattttatggctgcaatttgggccataatatatttctcttcgtttctgatcaaaaaaaaaaaaaattttatggctgcaaagaaaactaatccaagggaggtgtgtgtggttccttgacttgcttaaagaaatttgggcccgttacattggtgaatagtagcttatctttcttagtaaccgaattgttttctgaaggttgagattgtggcatcaagatgatcttcttgtcaaaccaccaaaagacgaaagtattatctcaacccttataagtggcatcaacatcatagtaccacgtcctcttaaataaaatatgacaagtgtccatatccaccacgtcacatacgatctcatctttgtaatacttcccgatcgacgaaggaaacttacaaacttctagcacttgaacttccaagcccttcttaatccatgcaatcttgtatggagaaggatgcttttcagtcttcaaatttaatgcttccaccaaagccttggaaacaacattcttgctactgccactgtcaatgatcacgttgcatactttattacgaatggtacatcaagtccaaaatattttagatcgttgagagtcttctagcttctttgggacaagcaaaagtcgttggacaatgcatgccacttcttctcccacatctccttttgcaaactcagtaccctcgtagatatcttcttcaagaacctgttcctctttactgccaccttcttctgcaaagttaacaaattgtttgtttgagcaattatttgatagatggtctggttgattgcaccaaaaacattttccaacgtttggacacgcataagggtcattatttacttcttcttgttgttggtttcggccttaagcattaaatctaacaagggttgtaattccactttgattttgcgccgaattttaagttgaatgggcatctttattgctattatcgtttctgcctgaagttgttaacccctttggagcagaagaagcttcttgggttggtcgcaaaaagttactttaagcgtgccctgtgaacctattgatttgattgtccactttcatcgttgttagatagtgtatagttatttaggttatttacttttccttttctttccttattgtattgtgggtcccactaacatgtatatatatacccaagtccaatgtgtattctttacagtttttcaataacaataattagggattctcccttttctctctttctcttcacaatcgccaaattaactgcatgtgtcatggtccgaaccccttgaagagctagtcaatcttgaataaccagctttaggcctccaatataatgagcaattaattgatcctctatctcagacaaattaaatcgggcatttaattgataaaattccttcgtgtatccattcatagtgcgatcggcttgtcgacaattttgatattgttgatataaaaattattcataatctgaagggagaaatcgtctttgtaacaaccgtttcatcttgggccaagtatgaacacgttgtttacctttccgttgatgattatattgaaattgttcccaccatgcaaaagctctgcctttcaactcatacgccataagctttacttgattttcttcttaaatattcgaatagtcaaaaaagttttcgacagtatggatccaatcgagaaaatcttcaatgtgtagtcgaccgtagaaacttggtgaatccatcttcatcttaaattctttgttattttgatcccaattgttagcctgataattaaaacggaaatccttttcttctctagatgaataacccgacctccgttgttgcctttgttgaatattcctctgttgtggaagtcgaaaatcatcaccatctcgaaaaggtggacaaaactcatcttgttcataaaaaacccctagatgaaggtcgttgtcgtctagcaacctaggagttccctgattccaacactcatacacccgtaatggaagagactcgtgaaaatcgtgattcacggctggaccaatgtgaattgcacctccatcattgattttagatccaatctatggctggcattagtcatcatagctgcctttctgccagtcgccacgttggtttggttgtcattccatgggttcgcgtttcccttcaagagtcaacccaaccaccaactgtgtgaggttatgaagagttccatcgattccgtcgagttgttactcaatttttttgaactgtcatttgttgttgatgattcgttttccactagaatcgtcgttagccatcagatcgatataaaaatccttgctctaataccaattttggtgcagcaaaaggtttgtttcgaaacgaaacaaaaaaatactcaagaacaaatacaaagatcacaataggatctaaaaattaaagaataattatgataaattatattgaactccttttaacaattacaataaacctttaaataatgtttataatgcaaaaataaagaaaataacaaaaatacaaaactagaaaactagggtaattagaaattaggaaaactatgagagaaataggaaactaatgatgaacttaaaatagaaactaatgatgattgtgtgttgcatcattataagagtaggttcattgactattgaaagagcagtgtttggaatggggggatgaatttgaccaattgggtgctctttcgacttcatcttcatttactgataaggactcctcctgaggatgagagttagtgaataaggattggtttttagcaaaagtgacatcgatagaaatcaaaattttcttagaagtagggtgataacgtttgtatcttttattattattattatttattgatcaataaccaaaacagaattaagagcttcatgatcgagtttgctatgactttgagcatgactatagacaaaaaagacacatttgaataccttacatgtgatcttgctaaacccataaaaatcataaaagaattcacaaaaaacatttactaggctttatttcccaacactttagaaggcaatcaattgattaaactaaatagaaattgacagcacttcccctgatatgatttaggcacatttttctcaaataacaaggcatgcgttatgatgtaggacaaccttaggatggttgcctacactcaaataagtgtaaatggagtctcaccattaaggattacaatacttgcaataaaaaaaaataatattattaacatcaatcaattaattactttgatttacatcgattagccttatttataggtttccctaagaaatccaaagtctactaggattctagtaacatattatgactctaattcttattataacatccaaagtctagtagaattctaataacctattatgactctaattctaattatcttataacctaattagttaattctaattgtcttataacctaatcagttaattcaaatttgactccaacaaatactaatacttatctatcaataaatctttgtgtcgtttccaatcaaaaaaaaaaaaaaaaatactaatattgatttaattccaactagtactgatcctaatttaattccaagtaacacgaatccaactctaattgcaactaatacgaattgccttttttgatgtatatcttagagattcatcctcatcacattaccccatgaaggtggcagtttttctttttgtgacttcattttgttgcggagtatctatacacaatatttgtgttttattcattctccatctaggtaagaggatagggtttggtcaaagtattttttttctattgtcatatttgatactctttattgtttgattgataatttacaaaaagaatataagaatatgtgaattagattattgagttgtgagactcaaaattgatccatggaggtgaccattcttaaatcaaaagatttcttaatgcaaaaaatcctaaaattaagtcaagaagtaagctccaatggttttaaaccaaagccaaaacatgtggaaaaaccagaaaataacttgaaaatatttaaaactgatatcacacaaactgtggaatcaaaattccagtactggaactgatatcagtgtatttttgctaaatttcctgaagtccaataaatgatactggcactgcagcattggaattgctatatgctttgcgatataataacttcaatattgcaaacaaaaccaaattgagcttctgaaaacaaattccagaacagaaactgatagtgctctatggtattggaaatgctgatatcacaacatgttgatggttcctattttccaatatggacctgatactggacctgtgctaccaaaattaagatagcaaatccgatacaagccttgtgatatcagaattctgatatggtagccaaacccgctagttcttacaatcaaatataaaaatgataacacactgtggtatcaaagttctgatatcactaccagtatcaatgattcttgcattccaatacaacaatgatgccacaccctgtgacatcgaaattttgtttttttttttttttttatcagaattgaaattctgatatcacttccagtttttctattttatccattttcaatctgatcatctatttttccattccaaagcaatgcaaattagattaaaatttaaaggaaataaagtatgaggattcatagcatagttatgaaatccttgaaatcaagttcacaagccagttcttatattattaaccaaggtctacatgaatttctcttttggatgcttcttcaaaactgaaactgcaagctgaatggatcaccaagctcttcacttcctgaactaaatctcacaacactccacaaggtcaaaactgaagagaattctcacatgaaaccaacaattctccttttcttcaaagaaaaatgatgctttgctccttttataggcaccaatgtgataccagatcatgccaagtgtcttacttcagatttggacatgtaggcaatccataccttcccaactttcttaacttttatcacatcactaatgcatctccgtgaatccttcaaccttggacacatggcactaaggaaggttttggaagaaatggcagctaacaagaggagagtctcaagacctgcacaaaaacagggattcaaagccgtatcggaaatttcggaattgtattgatttcaaaacaatataaatttcaacatgatattgtaatttcgataagcaataccattccaatatcagaccatgaactaaacagctttgggtgctatcagaatttctgttatggtaacaatggtgtcgaaacaggtattgaattgaaaaagaatacacatttcaaagtggtatcagaaattctgatatgatcaatagaaaaaaacaataccaaatcctatactaaattatgcttaagacccttcatattggaatttcaatatgctgttgtctaataacggaattctgataccagcctctaccagattctgacattatctactgtgcatcgcttctagttcatatcattttttgcccaccttgaaatttgtgctaaattttgcttaatttcaacctccaactccttgaaaattatttgagaatcctcaagtgaatctttgcactcatttttaatgatgaaaatatctaaaagtcaagatcaacactccacatccaaatccaacacatgtgttgaatataatgtatttatagtatattatctttccttgttaatataggtcacatgtatggtagttaggactcctagccttgtatatatatatatctctcaattgtaagtgcacattttacatgaatgagaattaaggtttttctcctttctctctctctctcaacatggtatcagagccaaaggagaaaacctaatctttttttcggtttagccgtgtaatcaattccggcaaaccgtccagtgaccgtgtttcactccggtcccctcattctcttcccgaaccactccggacaacctcatcgccgtcggatctccaccacgccggcaaccttttccggcgaaattttccgacaacctattttccgggaaacgaccacatattccgaaacaccggaggctgatctacacgccagaggaaaccccaccggaaaccggcatctcacgcgcccccacgcattgctcttctccttcggactgtcacccacgcgccggcgagtgacggcgcgtggctcactttctggccacttccgacacctctccaggctcgtccgacgccgtcttggccttctagccctccggcagtcctccccgagccctgcatctccattttttccctgtttttggctttcttgccattccggccacctccgacagggctcccccccatctccgcggcttgggtgctgcttctcttcctctccagggctctcttcgatccaaatacgtgaatatgaccaccaaaaatcaaatctttacctctgttatctctggatctcctatgattacctcagagaaattggttagcagtgagaattatctctcctggtctgcctctgttgaactttggttcatgggtcaaggttatgaggatcacttggttacccaggaggcagatatccctgaggttgaccgcgtacagtggaggaagatagatgcacagttatgtagtgtattatggtaatcggttgatcccaagattcttcttcatcttcaggcctataaaacttgttttaaattttggactcaggccaaaggattatacacgaatgatatccagcgtctttataaggtggcttctgctattgtccatatcagccaacaggacttggatctatctacttatattggtcagattgcctctcttaaggaggagttcttgactgtgatgcctcttcctcctgatgttggggctcaacaaatacagcttgacaagttcttcatggtccttactattattggcctccgtccggatcttgagcctattcgtgatcagattcttggtagttcatcagttccgtccttggatgatgtgtttgctcgtctcctccgtatctcgtccactcagactttgccatctgatagcgcttcagattcttctgtgttagtttctcaaactacctctcgaggaggacgcagtggtactcgaggtagaggccaacgtcctcattgcacctattgcaataaacttggtcacactcgcgatcgttgctatcagttacatggaagacctcctcgcactgcccatatggcccagtcctttgattctccgctgcctcagcctccgagctcctccgcatctcagacatctcaggcttctattgcctctgttgcccagcctggtaatgcctctgcctgccttacccacacatcttctcttggaccctggattctagattctggagcatctgatcacctatctggtaataaggatcttttctcctctattactactacctctgctttacctactattaccttagctaatggttctcaaactgtggctaaaggtattggtttggcccttcctctgccttctctacctctcacttctgtcctttatactcttgaatgtccttttaatcttatttccatgagcaaaatcactcgtactcttaattgctctattaccttttctgaaaaatttgtgaccttgtaggaccggagtacggggaagacgattggcataggacgtgagtctcaaggcctctatcacctcaccttagattcatctcctgcagtttgcatttccactgatgctcctctcctcattcacaatcgtctgggccaccctagtctctccaagttccagaagatggttcctcgtttttccactttgtcgtcgcttccgtgtgagtcatgttagcttgggaaacatactcgtgtctcgttcccaaagcgtttgaataatcgggcaaagtttctttttgagcttgtccacactgatgtttggggtccttgtcggactgcgtctactttaggatttcagtattttgtcactttcattgatgactattctcgatgtacttggttatttttaatgaaaaatcgagctgagttattctctattttccagaaattttatattgaaatccaaacccagttcaatatttctattcgtgtgttatgcagtgacaatgccagggaatatttttcagcccaatttacttcgtttatgtctcatcatgggattcttcatcagtcttcttgtgctcatactcttcaacaaaatggggtagctgaacgcaagaatcgacatcttgttgagacagctcgtactctcctcctccatagtaacgttccttttcgttttttgggggatgttgttcttaccgcttgttatttgattaatcgtatgccctcctctgtcttacacgatcagattcctcacttccttctcttccctgaccaaccactttatttccttcctcctcgtgtctttggttgtacttgctttgttcatattctcactcctggacaggacaagctttccaccaaagccatgaagtgcctcttcttgggatattccagacttcagaagggttatcgttgttattcccttgagactcatcgatactttatctccgctgatgtcaccttctttgaggactcaccattcttttccaccacttctgagtctcttcctgtttctgaagtcttgcccattcccattgtctccccacctgatgctatgccccctcgaccacttcaggtttatcatcgtcgccctcgtgtcgttgctcctctcccttttcctgaggcacctgctgactcacttcctatcccttcggcttcacctgccccgactttgccttctcctaatgacttacccattgctattcggaaaagtactcgctctacttgtaatcctcatcctatttacaattttttgagttatcatcaattatcttcaccctattctgcttttgtttatgctatatcctctgtttctcttccaaagagcacccatgaagctctttcccatccaggctggcgacaggcaatggtggatgaaatggctgctctgcactctaatggcacttgggatcttgttgttttaccctctggtaaatctacagttggttgtcgttgggtctatgcagttaaggttggtcctgatggtcaggttgatcgccttaaggcccgcttagttgctaaaggctatactcaagtttatggttctgattatggtgacacattctcccctgttgccaagattgcttctgtccgcttgcttctctccatcgctgctatgtgttcttggcctctttatcagttggatattaaaaatgtcttccttcatggtgatcttgccgatgaagtttatatggagcaacctcctggttttgttgctcagggggagtctggtttagtgtgcaggttacgccgttctctatatggcttgaaacaatctcctcgagcatggtttagccgttttagttctgttgttcaagagtttggcatgcttcgcagtacagcagaccattcagttttttatcatcataactccttggggcagtgtatttatctggttgtttatgtggacgacatcgtcattacaggcagtgatcaggatggtattcagaaactaaagcaacatctttttacccactttcagaccaaagacttggggaaactcaagtatttcttgggaattgagatagctcaatccagttctggtgtggtcctttcccaaaggaagtatgctttagacatcctaaaagaaaccggtatgttagactgtaaaccggtagacacacctatggatctgaatgtcaaacttgtaccaggacagggggagcctttaggagaccccgggagatatcgacggctcgtaggtaaattgaactatctcactattactcgtccagacatttcttttcctgtgagtgttgttagtcaattcctacagtcaccatgtgatagccattgggatgccgtaatccgcattacatattgcatccaatccagtctttcatgaaaggaccaagcatattgaagttgactgtcatttcattagagagaagatcgcatcaagatgtgttgctacaagttttgttaattcaaataatcaactagcagacatcttcactaaatctctcagaggtcttaggattaaatatatttgtaacaagcttggtgcatatgacgtatatgctccagcttgagggggagtgttgaatataatgtatttatagtatattatctttccttgttaatataggtcacatgtatggtagttaggactcctagccttgtatatatatatatctctctcaattgtaagtgcacattttacatgaatgagaattaaggtttttctcctttctctctctctctcaacaacatgaaatacaaatacatatgcaagtatgcatgtactgttatatcaatgacaaaattagttgtctacacctagatttgtatttaaaagtactctatgtagtaaatctcttcaagtacacaacctatttgtagcctctttgcaacttgcctatgatagcccttatacaagccaatgcagccctcaccctaagctataataggtccatatagtgtgaatggattaacctcccactagtatatgacaatgcattgcatctttaaatggtttttgtccattcttttgggagtttgcattgtgttatgcatgatcatacaatagtatgggtatatctataatttttcttggacaagtataaatgattaagagtaatgaccctagtaactcttaaacctttctaccaatgcttaaatgctcaaggttgttactaatcatgttgaccactttttcctttcaaattggaaataaacattttatcaatgataaatgttaacaaattagttaagaatccctatcaaatacaaaagtcaaaggttgatgattaccttatttttttcattcctatataacaaatgtatttcaaggtctaagatgttgcctaaatatatgacattgaaacaaaaatcatgactaccaaacaagataccatgtctatcatagaatattataaaacaataaagggactgtggctatagttagaccattaccaaaatttcaaaatgaagtgtagtaaaaattttaccaagaacactcgatttgtggtaggagatggagagaggatccatttttgggaagagttatagtggggggactaacctttgggctcccaatttctaggacttttcaaaatagtgacagttaaaaatcttcccatctcttcaattcttgggtttactcatcccttctcttggaactttaatttctatcataacatttctgattctgagatggaaaaattagaaggtctcatgtcttctctttcttgtttgcacttgaccccatttgttccagatgtgagaacatggtctttatctttttcaaggttatttatagtcaagtgtttctttctagtcttgtcccatatttctaattcatctccaactttccctattaattttgtttggaaatctcaagtcctttttaaggttaagtcctttgtctaattagtggcacacgagaaagtaaataacaacgacttgctacagttgagaaggccttacaaagctctcagtcctgacatctgtaagttgtatatggagcatggagaatcaacaaatcatctcttcttacattgtcctttgacaatggggttgttgcataaattagttcaaataaccaaaatggattgggtcccccggatgagcatttttgacatgatgaccattaattataagggattgggaagatccaagagaggcctagtattgtagcaaaccgcttgtattgctttaatttgggttatgtggtgggaaagaaatgttaggatatttgaggacaatgcaaggaattcagaggttctatgggatattattcacttcctcgcttctttttgggctttttgcaccacaacttttaaggacattccccttaatgtggttcaattagattggctagcactgtgtagctctaagggtgtgagttagtatggagatgttttttgtaattactaaatagcttgttgcttttggcattcaatatgtttagctttcatttgtgggattatttctcatccttcttttgtatttcttaatttctatttcaatacaattcattattgtttcctatcgaaaagtgtagtgaaaatttttctatgttatcacaaaaatatgtagaaagagagaatctttgagttcttaactagtattcatgtggaatatgaccaagttcatatttaggtcctagagaaaaaggtcttgtcatccttaagtgaagttttctcaataataagggttaaagaaggatgtcagttagtaattcttgataatctctctatcaaaggttcaatacttatagccaaatcaaacaatggagtgcttgttatgaatcaagggtcacaaactaatagcaacggatttactataaaatttaggaaaatagaagcactcaaataaactatttataaatggtttatggtgcaacatctataaaaagccaaggcacaccaaagagaatttttggaagctttatgaaaaatatctatctaaccaaaataatgacaactgaggagcacaaaatggatggcagggaggacaagcataagtttctcattttgaagaagcccactaagagaatacaacaaataattttaaaagtggaggattcaataaagaggaaattcaacaacttagaaatctcctcttatcactagaaaacctaaattctttgtgctctttggcatgttcaggtaagtattttgattctcatgcttttaatgcctcaaacaattgtttctgaagttcttaggtcattgactcaagcactattgaccatatgacaaattgtttgcatcacttctctacatatattccatgtctcaaaaccaacaagattaaaatagattatagtactttagctacaatagctggtcaccattttttcccttaggttaacctattaagtagatgtctaaactttgacacgacaagaccatgacctatcaacacaaattgctaaccctacctaaaggcttaacatgagagtgatctaacaagttgaagtaacaacaacaagctaatcataaagcttgtttgaagtagtaattaagctaacaaaaacttttaactagaagaagttttttcacaaaaaaaaaatccataaattaaattacgtcaaaattccaaaaaggtattataaaaaataaaccactaataagaaaaatatccaattaaacttgaagaaacttaagggagaaaaaaatactttttttttctatttacattcaaactaattcttacatcaatatttatcaatgttttaaaaaccggaccgaaccggtcggaccgtttgaaccggctgtgaaccgaatgaacaaatcggttccctgcgaaacggtcggttcaattgattttttttttaaaaaaaaaacaacatcaaaacgacgccgttttggagtccttagcctgcaacctccacagtccaaaccctctctcctccccctgcagcagctactgccctgctgccctccgcagacacgtcgcggcccgcaacacccaatcaactcccgtcggtggccgttacaagacgacaaccctccctgtcgtcgcctcttccaatctttccaattccttgccatggcgttggaaacccctccctgcctctggaagcctggaaaccaccctgaccggctagtacccccccactccccgacgtttcagagaaaagaaagggaaatggaaagaaacgaaaaaagaaaaaaaaaattgtcattattcatgcaatgtagtttctttttcaaataaaaaattgtctttctagtttgatatttttctttttggggttcaattaatttggtaggttaactaatttctttactaatttagatagaatttattaattttaaattatatgtaaaagaataaaatatatatttattacgtcaccggttcgaccgctggtccgaccaatgaaccgtgaaccagtaacttttccggttcaatgaccagtccggttctgaaaatgttgatatttatacatgaatggctgaggtcatctgtcttagaaaaagaaatctaatccttgattttaggagaaagtctctcataaaatcaaaaaataaaattaaaatagtaaactatatgcagtacagttgtgcggtacaactatatgcatggctataccttctagatttccacactccccctcaagttgggttgtaaatgttgttttcagcttggatctcaagtcttcaaagttacttctagaaagtgtcttggaaaaaacgtctgttgtttggaaaattgttggagtgtaaaccaatgaaatcgtccctttttctattttctccttaatgaaatgacaatttatttccacatgctttgtccaatcatgatgaaccgagttcttagcgatatttatggtagcttgattattacaaaacatcttcatagaatattctactggaatgctcagctcatttaagagtctctttaaccacattccttcacaaattccatatgtcataactctaagttctgcttttgcactacttcgagctataacaaattgttttttattttgccaagtaaccaaattcccccatacatgggtgcaatatgtgagcttctttggttgaagattattcttaatgatcctaacgttaaatgggaagaaacaattaagttgtattgtgacaacaagtaagctattaatgttgcacactatcctatccaacatgatcgtagaaagcatgtggaagttgatagacatttcatcaaagagaagttgaaaaataacttgatttgtactccctatgtttcaatggaaggacaactagcaaatttcttgactaaaggacttccaagtcaagcattccagatgatcacaagcaagttgggaatagacaatatttattcaccagtttaagggaagtgttgatggatcaagtaagaatccctatagaatagagaagtcaaagattgatagttagttgattttcaaattcaggaaattactcttttttgcctattttcccatgtaagtcagattccttgattccgtaattttaggacaaatatttggaaagttagttttttcctttttctattgtgtatagacacctatacacttgtacaaatattttttttttttattattggaaacaagacaaagatttattgatagataaaaagaagtacaaagagaaggatgaggaatcctcccaccaaagaaagctaaactacagtaaattacactgaaaaacaagcgaacactctaaaaggaccattccttatggagtacacaccgctatccaatcaagttgtatcacattaaggggagtccccataaaaaccttgggacaaaaagcccaaagagaagtaaggaaaacaatagagtcccaaagattctctaaattccttgttttatcctaaaaaatctttgcatttctttccccccacacaacccgaataagagcgatacttgcagcttgccacaaggctatccccctcttagaagaaccaaaaccattaaatttgatggacatcatgtcaaagatgctcctcggggggacccaatccatcttagctaactgaaataacctgtgccacaactcaatcgtcaaggagcaatgaagaaaatatgatctgctgattccccatgcttcatgcacagaatacaaatatcaggactaagggctttgtagggtcttctcacttgtagcatgtcattagtattcaccttcttgtgtgccactaaccagacaaaggacttcactttgaaaggaacttgagaattccaaacgaacttagaagggaaaacctgaggagatccaaaaaattgagataatgctagaaagaaggatttaactgaaaaaagccctgaagaagataatggccaaaatctggcatctggagccgaagaagataaatgcaatccatcgagagaccgcatgaggtcttctaagtcctctatctcagaatctgtcaggttacgacggaaaattaaattccaagagaaaggatgagtaggaccgataactgaagaaatagatatgtttttgtccaagactactctaaatagtcttggatattgggttcccaaaggttggtccccccaccacaaatcttcctagaaccgaattcttttcccatttcctaccacaaaccgagtaaatgaggaaaactcctgaaagacttgtgtaatagccttccaaggacagcgatgtgaccatctgactaaagtgttagcatcccaaccattggagtgtgaaccataaatgcttagtatgacctgatgccatagagctgaaccctctctagagtacctccacagccatttccttaaaagagcgaaattcctcagagaaatattcccaaaacccaaaccccctatttccttcggtttacacacaacatcccacctcactaaatgatcttttttgccttccccaatccctgaccataaaaaatccctttgcaacctctcgatttttgcagcgactgaaacgggtaacttaaataaataaagaaagtaacagggcatatgggtaaggcaagattagataagatttatcctctccctgaatgataagtatgtcttttgccatccatctaatcttcttgaaattctctcaatcactggatcccaaaatccacctgccctggggttcccacccaaaggaagacccaaattgagtataggccaggcagaagccttgcagtcaagcgtctcagccaaacttgaaagatgagcttgatccaaattgataccataaatattactcttgtcaaggttgaccttaagcccagaaatatgcccaaacgctaacaaaagactcttgagagtctgcaaatcttcctcccttgtgttagaaaagaagatggtatcatcggcaaattgcaaatgagataccctagttctgtttctacccaccctaaaaccctccaacatatttctctcttctgctctcaaaagcatcctactcagtacatctgctactaaagtaaacacttgtacagatattcaaaatacaataatacacatattcaacttcaataaatcaaagctacaaggaaggatgagctatcatgttgactttctaatgtattttttgtgtaagaaagcagtcctaatgttcagtttttttttttttcccaggcaaaaaaacccactttatcaaatatcaatttgga

SEQ ID NO: 13727 - DNA, 12629 bp, Vitis vinifera
  Intron number 2 from transcript GSVIVT01008518001 (locus G SVIVG01008518001) derived from phytozome v7.0 (chr-ID chr1 7; pos 1165561 to 1178189 reverse strand)
tgatcgtgggaagtgacttgctgtcacttcctcttgtcttctcattctgcaggtgatgggatgtgggccatggctgcttgttgtgattgcgtgtaagactcgctttactttaattgaccatccagaagatttatatccggatggctcatgctgactatccggatgtgttgtggagactatccggatgtgtacgctctgccagcgtcgtttgctcttccttggataggagaagatgaaacgtcgtttgcctttccttgaggcggtccggataggatgtctacaccatgcatatccttaggggaatccggataatgatggtccggctgataacacgtgccacgcgtcactatgagctgcgtgccacgtgtttcccaaggggaggggtccctacacacgggtgttcccatctttcccgcagcggaggtggccactgcccaaatcacccatgaacttgatttggtgcaccaccgccagccaagtacttgataatccaagttttatgtatgttcttttcctagtctattttttgagttaaaaatagtaaggagatatatgtaagtatgcatgtagccctcccaatccccttctcccttgtccaaattaccatgctttgatgaagttatgatattaatttggaaatctaatcttccatgttttgtaggcctaaaaaatacatatttttttaccaaaacatcccaaggggcatttatatgaaagataagtatttttatgggcttacaaaatatggagaattagacttttgaatcgaagattgtttcataactcttaatcaaataaccctttgagtgcttgaaacttgttgcatttgaggacaaaaatggaaggagcttttttattactttagaaaggagttaggaacttaggaagcacaaatttttatttaatagcaagtgaagaaaagaagatggtcttttttaattggggtgcgtagggcggctgaatccatgggggccagcttgctactgcactctctttttaatactctttatttcgcctataaattgcactcattcttcttcttcttcttactcttcaccttcagcgtcaccacactacttctctcattattcttcatcatttcttcacttataatcagttctgcctcatatacattaattcacctgctctattattattattcattacttcttcatatctttctctctctccttactacaactagattcttgtttgtataccatgtcccttccgggaaaagcaagagttgtcttttttttggttttgatcttccccatcataccttttgtatcttcaaggcctttgaatggtgtggagccaattgcaaggacccctgttcatgcaatatgggttcgtcatgtgaaagctcctgtgccaccctctgcacattctctttgcacctgtctccctcgcagcggaggtggccactgcccaaatcttccatgatcactctctatctgctttggtgcagcaccatcgatttgaagtacttgataatgcaagttctatgttcttttcctagttttattcttactttaaaaatagtagtggttaattatctatgtaaccctcctagaccccttctccctcatcccaattatcatattcttcgatgaagttgtggtgtgatccctcttgtactttcaagccttacaaattggtgtttaagcaggtgatttagaactagttttctattttttaaaaataaaaaacttatttttaaaattttaatattattggattgttttctagtttttttttttaaaaaaaaacaaaatgaaataaagttttattttttatcaaacaaagagaagttgctttcatcaatttttaaaaacaaaaagaaaatataaataaattaaaaaatataaaaaaataagttaaattaaatatgatatcttttttcttctcttttcacaatttgatatatatactctttgatcacgggtgctcttttcatgaattttctttgacttctctaaaatttttcatgaaataattaattttcaaatgaaactatacttgatacataaaatttattgatttataaaaatgatcggaaactaaacataaatttaattaatactaaaagttatgaaattcaacaatgttaaaaagttatacccaaaatttatttctaatgttttaattcatttcttctttgcatataacacatttttacaaattttttcaccagataaataaactccaagttaaataataatttaggtgttggattcatcgagcttagaattcaaataatgattcaattaatactaaaaatttatatacaaatattggtttaaaataactcaattatttctcttttcaaaattcattttaaataaaatattattaacaattattattattcatttttattaaaataaatcagccgtgcttttatgagaatgttaacattcatatttgtataccatatactaaaatagtatattttttattaaaaaaatgtaatttattattttattataaaatttcatattttaataaaaaaaaaagtatttatttttcaatttatttataatttataattacaaaaatattttcatttttaataaaatttgaattgaatttaattaagattatataaactaaaattaaaatgtttttacaaaatcaaaatactagttttgtagcacatgcaaggcacgtggacaagataggtaataaagttgatgttatatttatattttaattatttaatataacatcatgaaagcgcattgacaaaaaagattctgggtataatcaaaaggttgagttggaattagggttagtaaaaaatgctggagaagattccaagtgtaatcaaaaggtagagttgggattagggttagttacaaggggcgcaagtggtgtgggcaaaggacaggtgtttgctattaaagtaggaagggatgaaattacaaaaatatcattcttaatgggtcaacgtaaataatgtttcgagattgtgttgtggcaaattggcaaatatttagagaagataaggatgaaaaaggttttaaaaaaaaagctaccacaaaaccatattctagctttttatggtataaagatttaaaaaataagcaaacggagacgaatcagcctttactttttatttgtttattccctaaggatgtgagaaaaaagagctactaagattgcgatgcatgcagcatggtcaataacggcgacaccatttccttttcatacacattctatataataattgtgctgacaaagagggtggtgcactttgttcctttacaatcagaggagagtcttgatggactgtccgacgcgtgtatattttgattttaggtagtggacctttagatatataatatatatgatttaatggcccaaaccaaatccaagggatttggctcttgccataacagtaaccctttcaaccgttgtaatctctcctataaaaacgcacttactcttttgttgttattcattactttcccttaaaaaaacacagttaggttatgtttggttcccgataaaatactaagaaaagaaaaaaaatgcaaaagaaaataattttttcatgtttgattgtcttatgaaaaatataaaagaaaattaaatataattaaaactaattaaaaatttatatgtttttaaattatttaatctttatattgatgagttgaaataaataaaatgaatttgaagtaataaaaaaaataatttatcaacttttaatctattattttttattttcctttactttttctttctttctatttttcttttgtattttctttccttacattttccttcaaattttttgaaaccaaacataaccttactcttttgttgttattcgttactacctataaaaatgcacttactcttttgttgttattcattacttcttcattcctctctccttactacacgtagatgttctttgcatgtagagcatgtccctttcaggaatagcagaagttgtcttctttttggttttgatcttcccatcatacccctgttcatgaaataagggttcgccatgagagagctcctgtgccgccgtcttcacattctccttgcacccatctctcccgcagcggaggtggccactgcccaaatcacccatgaactctctgtctgcttaatttggtgcaccaccaaccaagcacttgataatgcaagttgtatgtacgttcttttccgtttggtttttaggttaaaaatagtagtgggatgcatgcaaaagtatgcatgtagccctcctaatccccttctcccttgtccaaattaccatgctttgatgaagttctgatgtgatcccatatgggttcaagcccttagaatattttatatattaattgtattgttaccattttaattagtttttatttagaattctaattatgaattaattgattaaaaggataaaatgatcccaatttaaaaatctaatcgcctaaataatacatatttttgcagcagcgttttctgttgatacacttcgttacccacgagctgaaattctctttcatgtatgcttgaggcagcaaagcttgtccttgaacatggcctcatgctcaagcattgtcatgctttagtacatccttatcataccccgtatatgcatctgcaatggcccttggcatgctcccattgtaataccgcccatttgtcaatgtctcgtctccatgataaaggggtcagctaccatgcccacggtgaaaaattcatagactgcagtaccccattttacatgattgcctcactagtgtccagagcatcaagtagaaatttactcatcctcatctgtattcctccattgcatccttaggcgtttcaatgtgacccgcatggcttacagatatccaggaataccaaaatttcaatgcagtaccgtggccaacatttggaaccaatagattggagcacagttgccatcacagaaatcctccattaagttcatttccccccataacctcactcctccagtcccagcaacttggccattgatgatatcatcccaccttcaacaggaaacagagaagaataaaaacataaaaaacagagtatgaaccctctatttcatggatcgtcaaggagctaggaccaggtggaatccacaggaaacaagagcatgaattttatatatcaagttcagggaaggagcaatgtatcagatatttacaagagaaaataaagccaaaacagagcatgcatgtagagagttagatccagcaaagcaaacgagtagcccttgatgtccacaccaatcaacaaatcaatgctcagaaaagtagctgaaaatgagggacaagaagctcacagtagttggaaagctcccctcaagcaaagagttgcttggcttcaagttctactttccttcccacgaatcagcaagatctccccatcttctgctggctctctcagcttactctaaatcttctgctcactctctcaaaaatgtctttctcagcttactctccccctctcagaaatggcccccctttcttctaaaaaatctcccatttccctcctgttcagctctcttttctcaagctcctaaaacttttcttgctgccccctctcactcccccaccatactcagctcttttcccctccctcagctctctcgttttcctactgttcttgcttgtcctcctcccccccccccccccccaagcctctccccaacggtctctgaatcctctccttacgtgccaccggttggttcccccctcgtaaaagtccctacaccactctctaaaagttctccctaaaggtcaaaaatccccctctgttggaggatattctttgccacgtgtcacccggacccaggagaacatcctctccacagctccttaaccccagctggcctaaaaagaaaagccctcttacttgccaaaatgaggggtcaggtatttataatttatgtaaaaaataagcatttttcaggcttacaaaatatgaaaaattagacttctaaatagaagattatttcatacattttaatgaaataacccttatttaaagctcataaatattaaagactaattgattgaatgttttgagtgtttgaaaaccttatcgctgaatatttcttgttgcatttgaaggacaaaaatggaaggggctttcgttttttattagaaagaaagttagggagcccaaatttttatttaatagccaagtgaagaaaagtctaggtctttttttaagtttttaaatgggtgcgggagtaggctggatccatagtgcccaccttgctactgcatctccctttttaactctttttatatcacattcacctataagtaccactcattcttcttcacttatgatcagttatccctcctatacattaattcaccggctctcttatcattattcattgcttcttaatatctctcgccttactacaactagattcttgtatgtataccatgtccattctaggaaaagcaaaagtcatcttcttgttggttttcatcttccccatcataccttttgtatcttcaaggcctttgaatggtgtggagccaattgcaaggacccctgttcatgcaacatgggttcgtcatgagagagctcctgtgccaccctctgaacaatctccttgcacccatatccctcgcagcgaaggtggccactgtccaaattctccatgatcactctctatctgctatggtgcagcaccagcaatttgaagtacttgataatgcaagctctatgttcctttcttagtttgatttttactgtaaaaatagtagtggttaattatctatgtaaccctcgtaatccccttctccgatccgtcttgtagtttaatttcaagcccttgtatgatatgtattgttaccattttaattagtctttagaattaactccaattatctttaaagctcgtaagtgatatcaaagactaattaattagatgttttgagtgcttgcaaggccttatctcatttagtggaaaaaactgtttgaaaaaagtttaagaaaagaaaaatgtccctttttatcacttgaaaggccttatgaattctatattcaaaataaacatcagtgatgagaatacaaatatatgaaagataatagaaacaagtgagataaacacagaggatatgataaaaaataagttttaatggccgtgagttagacatgtgaccactaattattataaattagcaataacttttccaaatgctccatttgttacaactttagttcctaatgagtatctctatgcaattaattctattaattcattaaagaaggatacaacaattaggaatatattaatttcataattcccgatttcacaagtgaatgatagagatattattagactcatgcctgacaaccaatcaagaaaaaagattttatattatgaccacctatcaaccaatgcattgacagtcttaggattgaagaagcatggatttgagttaattaagtcatagtagttttgatgaaccggtcatgatcaaggcatttttatgaaatacttttgtttttttcaacttgcataagaaaagatagacaaatgagcccttatcgtttagttgtttattccttgagctactaagattgtgatgcatgatcaataacaacgatcccaattcctccttacctctttcatacataatctatataataactgtgctgagtgggaagttgggtgcaccttgttcctttacaacctatggcggagaagagagaattgatggactgtccgacgtgtacatgttcaaatgcattctttttctctatatgaacgtccattcgatgaccatttagttagatgaccttcaagaaaagagagtatttttatattgtctcctgttagattcggatcattcgttctggtttcagtcttattcctgattgtgggcaccactgtcagaagaatccgaaatttgttgctattggacaaaacaaaaccaaagttggtttttccttggttcttgttataacatccttttaaccattttaatttctcctacaaaaatacacctactcttattcattacttctccatctctcgccttactacatgtagattttctttgcatgtataccatgcatggttcaaagtcgcggtatcggtcattgactcggagggtcccgaggcgtatcggtttggtatcggacgataagtaaaataagctaattagaaaattcaaaaaattataaaaatattatgtaaatcatcagaaaaatatatacaattaaataaactcaaaaaattaataaaataaaattgtattacatttaacattatttaaatagttataaaagtatttgctcaaagttatttataataatgctaataaaaataaatatatcggtcttgaaatcaacttgaagtcaactataatcaatatgatctttagaggtaagatctatagacgggggtgcataaataaatttttttttatcaatttagactaatacatcaacataattattattttaagcaattacttaaattattaacctccttccgaggtaatattaatacattattcttatatgattctttaaacaaattttaatttaatttttttatatataattaattttaattatatttgacttttttatatatatatttttataaaaaatcatgcatgaaaattttatttttcttaatatatttttgaagaaatcattttttttccataagcttaaaacaccaaatttttatttatttatttttttatacagaaatacatggaccacaggcttttatgaattgaacttgggttgggcctaatctggtgggctgaacccgtaaaaatatgtcatggtgctgagccacataggatcaaagacctatcttctcctatcttccctccactgaaagcaaagagtgcgatctgtagagagtgaaaccgccatggccatctctctcttctcctatcttgccctccaccgtggacgctcacgacgttggttctgccggtggtgccatcaaatcctattttcttcactgcacaaagctcttctctgctcccaaactcggaatgagggttgtttagccagcgttcagtcaccgttgcggcaccagcagcgcaccaaagatgaaaaatcttcactcctgatttctctaaaaatgttgattcttgttgtgatgggtttcagaatctgttgattttttttttttccgagtcgactgagttaactcggaatatcggtcgagtcatccgagtccaaccgattcaaagccgagtttaggtataaaatgtatctggtatcggactcgtcgcggtcggcgtcgaggcggatacgactcggccgagtcgtaccggactcggccgatattttgaaccgtgcaggagctctctcatgacgaacccatattgcatgaacaggggtcctggcaattggctccacaccattcaaaggccttgaagatacaaaaggtatgatgggaaagatcaaaaccaacaagaagacaactcttgcttttcccggaagggacatggtatcaaggttcaaaatatcggccgagtccggtacgactcggccgagtcgtatccgcctcgacgtcgaccgcgacgagtccgataccagatacattttatacctaaactctgctttgaatcggttggactctgatgactcgaccgatattccgagttaactcggtcgactaggaaaaaaaaaaaaaatcaacagattctgaaacccatcacaacaagaatcaacatttttagagaaatcaggagtgaagatttttcatctttggtgcgctgttggtgccgcaacggtgactgaacgctggctaaacaaccctcattccgagtttgggagcagagaagagctttgtgcagtgaagaaaataggatttgatggcaccaccggcagaaccaacgtcgtgagcgtccacggtggagggcaagataggagaagagagagatggccatggcggtttcactctctgtagatcgcactctctgctttcagtggagggaagataggagaagataggtctttgatcctatgtgggtcagcaccatgacatatttttatgggttcaacccaccagattaggcccaacccaagttcaattcataaaagcctatggtccatgtatttctgtataaaaaaataaaaaaaataaaaatttggtgttttaagcttatggaaaaaaaatgatttcttcaaaaatatattaagaaaaataaaattttcatgcatgattttttataaaaatatatataaaaaaaaatcaaatataattaaaattaattatatataaaaaaattaaattaaaatttgtttaaagaatcatataagaataatgtattaatattacctcggaaggaggttaataatttaagttattgcttaaaataataattatgttgatgtattagtctaaattgataaaaaaaaaaattatttatgcacccccgtctatagatcttacctctaaagatcatattgattatagttgacttcaagttgatttcgtgaccgatgtatttatttttattagtattattataaataactttgagcaaatacttttataactatttaaataatgttaaatgtaatacaattttattttattaatttttaaaataaaattttttgagtttatttaattgtatatatttttctgatgatttacataatatttttataattttttgaattttctaattagcttattttacgtatcgtccaataccaaaccgatacatcgagatcgatacgcctcgggaccctccgagtcaatgaccgataccgcgactttgaaccatgagctcctgtgccaccctctacatattctacttgcacccatatcgctcgcagcggaggtgaccactgcccaaatcctccatgatcactctctatctgttttggtgcagcaccagcagtttgaagtacttgataataacccccttctccctcatcccaattaccttatgctttagatgaagttgtggtgtgatccctctcgtagtttcaagcccttagtattatatgcattgttaccattttaattagtctttataattaattccaattatctttaaagctcataactaatattaaatactaattgattaaatgttttaagtgcttgaaaggccttatgtcatttactagaaaaaaagctaggtaaagaaaatgaaagttttttttttctttgttctttgcaataattgatggataataaatagatagttaatttatgtttaaaactacatattggaagagagtcaagcgattaaaaaaaaaaatggtaaattgtttttttatattttaaatttcatattttccataatttgaacattcaaaattattattatatataaattttacattcaaaataaacatcacttaatagaatacaaatatatgaaacataatagaaacaagtgagatgaacatagaggatacgaaacgaaaaaagataagtttttatatatacgagttagataatatatacgagttagtaattttcctaaattctcaatttgttatgactttaattcatgatgagtatctctatgcatttaatcccattaatttcataaataaaaatatacaacaattaggaatatattaatttcataaatctcgatttcacaattttcctagattctaaattctaaaccaaaacaaaggtgtcattcaatgccacattacctatcacccacctagggatggcaacagggcaggttcaggacgggtcgccccgatcccaaccccgccccgtttatttgaaataattctcatccccatcccatttaaaaaataaaacgagacggaacggggcagacggatatgataaattcccatacccgtcttgtttaattttttttttaaattacttttaaattttttaattatattaaaataaatatattttataaataattaaattattatattttttataacttattttattaaaaatattttattattatctatatattaaaaataataaaataaaaattaatttaatttaattttaaaatttaaattaaattaaattttatatataatcggggcggggcggggtagggcattacccgaacccgtcccgagttttaaaaaaaattcctaaacccgtttattaaaattaaaccccgtcacattaagggcggagcaggacggatacctgaaaagacccatcccattgtcatccctacacctacccacccaccaaaaccaatcaagaaaaaagagtttagattatggccacctatcaaccaatgcactaacgacactaagattgaagaagcatggatttgagataagtaagagtagttttggtgaattggctggtataatcaaggcatttcacaaactcaacggaattaaatgaattttttaccgatttaccacgaagtcaatggaccttatcgattggttgagttgtactagacttgaccataactttgaaccttagctcaccttcacccttagatagcattagaagcatcctaaagggaacaataactctccaagttgataagatattaacttaaaaataagagagaaaataagaagaattcaacgtaggagaaactaatctttaatttctttgtcaaatttgccttcttgtctcattgtaccttttccaatgagaatatatcaattaggttataccctttcct

SEQ ID NO: 13728 - DNA, 7448 bp, Vitis vinifera
  Intron number 10 from transcript GSVIVT01011543001 (locus GSVIVG01011543001) derived from phytozome v7.0 (chr-ID chr 2; pos 12689086 to 12696533)
gatttgaacctgcatttagaaagtatcctctagaggtatgctttattctttctgaataactatattttgaaaattatcccgcaatctttttttttttttaatctttttgacagaaatgtctttgtttatgttatgccatccatctacctatattatagcttacatgaactgaattattctcataatttatagatacttttacttaatgtggctagccaaatttaagaaccaacctttagtctcatacatgccattcctgatatctaggcataatgcttctgtcggtttgagataattcttgggctcatttaatgtagttcttaaatgtttatcattgacttcagatattggccgtcaagaatattaagggtgtcagcatctcaaaatatgtttagtttcatgagcatagttgttaaaggtgctctttaagcatgcctaggccaaaggcacaatgattccctagctatagtgagttgcctaccaaagcactccttgttggaaaggcacaccttgtcttgtttttttttttaaaaacactttttatttttaaaatttctaattgcatattgaaattttatatgatttcattagtttttctataggatgtgtttcttttcaatgcttggaatcttgaaattttttgtttcatggattggtcatggagcatattttataaaattgatatgtaccttgggttgtaccacactttgcttgtgtgtgtgccttatggtgtgtcttgcatcaaagccttagaagacatttgcaccttatgtgcttgctgtcacggacttagtcttttcctaagctcatgcgacacttaaacaagtcaagacacttgatcttgctaagtcagccttactcccaatacctagcttgttaggctaagatgcttacgacttggaagctttagaaggcgtagtaggcaactcttaaagaatgaaaacttttattgctcaaaggaagctttacaagtgctttggaaactcacttgcttggtgccttggccaaatgaggcctcacctatttataggcaccaatggaactctttggaaccttggagggttccttacaaatcaagaatattctaaaacaccctataccattctatgtacaagcctatgtacaagaatatacaaaagatctctagaattctctagaaggccttggactcctttcatgccttccaccatagtgtagagatgtgtggacttctctaggcatttctagaatcttccacattcttcctactaatggctaagtgtaggagtctctagaagcttcttgggctctatataaacccatggggaggctcatttgaagcatcttgtgacactctccccacctaagctgcaaacatctttgttgctcctttcgcttgaaaccgctcaatatgctcctggaactgccatagtgcatctgttggctcccaactagcctcgctctctagtagtccattccatttcactaagtactccatagcaggaggcacacctcatctcctgatgactcgatttgcaaagatgtgttttacttccttgttataggaggtcacgaccgtcgtaggtgccctcttagaaaaccctcggcttggatcatccttgttttcatgatatggtttcacgtaacttacgtggaagatgggatgaatcttcaaccttggtggtaactcaactttataggacaacttgctgaccttcccaagtatggggaagggtccttcatacctcctcacaaggccctcatgcactggccttagcgacttgaattgttgaggaaggagcttgaccagcaccatatctccaaccttgtactctgtgtgatgtcgcttcttgtcagctcacttcttcatcttcctagtggccttatccaaatatgagcgtgctatgtcaacttgctcgtgccacccttttgcgaacttgaaagccgctggacttctcctcgtatagcctattgttagtgtgtgaggagttaatggttgttaccctgtggctagctcgaacgggatcttgttggttgcctcacccctttgcaagttgtatgagaactgggctatatctaacaacttagcccaatccttctggttggcactcatgaagtgcctcaagtaaagcttcagtaaggcattcaccctctcagtctacccatttgtctgtgggtgaaagcttgtggagaagtaaagcttcgaacccataagcttgaaaagctccgtccaaaacttctctgtgaaacgcagatcgcgatcactgataatgtacttaggcaacccccaatacttgactacgtgctttaagaataaccttgtcgtctcctccgcagtgcagtcggtcggggctgttatgcaggtcgcatacttagagaacttgtccactactactatgatagagccattatcctctgacttgggtagcccgatgatgaagtccatggtgacgctgtcccatgggcgctctgctattggtagtggttccaacaggcctctaggctatcgttgctccactttgtcttgttgtcacacaagacaagtcttcacataggccttaacttcatcccatatttgtggccaatagtaagctgactcaagtagtgccctcgtgcgttgttgcccagggtgtccaacccacttggtgtcatgacattccttaatcagattccgccttatgtttccccatttaggcatgtagagtcgtctccccttagtgtaaagtaggccatcctctacccaaaaccacttagttttcccttcatgagccagaacgatgagactcttagccactagataatgttgcaaccccttccttagaagatccattatgtcttcttgaggctggctcgtcatggatgctagttctgccttacggcttagggcatcggccacatgattagcgcttcctaggttatactttagcgtatagtcgaactcagctaggaagtcttgccacctagcttgcttaggacttaacttcttttgtgtttgaaagtagctagtggcaacattgtcggtcttcactatgaagtgagaccctagaagatagtgcctccaggtgctcaagcaatggatgatggcggtcatctccttttcttgcatcgtgtagcatctctttgtgtcatttagcttgcgactctcgaaggcgatcgaatgcctatcctacataaggactcccccaatagctaagtttgaggcatttgtgtgtacctcaaaaactttggtgtggtcgggtagtgccaacaccggctcctcagtcacaaccttctttagatcttcaaaggcttgttgtcaccttccatcccactcccatgcctcttcttgagaagattagtgagtggagctgcccttgcgaagtacccttgatgaaccactggtaatagttaaccaagccaaggaaagaccttagttgaggtaccttagtaggtggatcccattcctaaatggccttcaccttgctgtcatccatcatcagcttaccatctttgatgcgatgtcctaggaagctcacttcttccttagcaaaggagcacttcttcttctttacgtataactcgttctgccttaggatcttgaagaccttccttagatgctctacatgctccttcagggtgttactgtagatgactgtcatccaagtacaccaccacgaacttgtctaaatatgggtggaagatcttattcatgagcgtgtagaacgtcgttggggcattggtgaggtcgaagggcatcactaggaactcgtatgagccatacctggtcacacttgtagtcttcgacttatccccctccgtaatccttacttggtagtagcccaacctcaagtctagcttcgtgaagtatctcgccctaccaagttgattgaacaagttggcgatgagtggaatagggttcttgttctttattgtcaccttgttgagtgcccggtagtcgatgcacatccgttgggacccatcatgctttttctgaaacaagattggcgcgccatagggagccttggatggttggatgaaccctgcgttcaacaactccttaagttgtctccttagctcctccagctcgggtgataccattttgtatggccccatagtgaggggcttaactcccggctccaactcaatcttgtgatcctcctttcttctaggagggagtctcttaggcaacttgggcggcatcacgtccttgaactcatcaaggactcccttgatttccttaggcatgggttctcccgacccatcatcctgttcttccttaagggtggcgaggtaggtcacctctttcctctttaaccccttctttacttgcatagccgataacataagggtcttgggcgaaccttcggtgatcgtagggaccatgcatgacttctcctcctctaggatagccattgagcctaggaagggtactggcacgaccttgaccttctgtaggaagtccatccccagtaccatcttgaagtcgtccatgagtgccactgtgaagtcaacccttccttcttaagagccaatgtgcatagccaccctgcgagctactccgtgtgatggcttggtagttgaattaactaccttgagccaacctccttccttggatgcttagagctctagcctctttgcctcatcctcctaaacaaagttatgagtggcaccagtgtccaccagggccttggtgtccattccatttacaagggcctctacatacattagccctttgctttgaggcgtcttaggcactgacttggccttaagggcgtttaggagttgtaatgatctcacatgagcattaccctccttctctttttccttgatcatagcatttagggcttttctcttggggtaatctcgcgcctagtgtggcttatcacataggaagcaattggtcatgggcgtgaactcctttcgtttatctttgcccttaccatccttgccactaaaggtcttacttgatccttttttaggagtgtacccccttgatcccttgtctcccccgcctttggcatgattacccttggaccgtggcttgggcttggaggagtctccccttttatattccaccaaggactctgctactgccatggttgtggctaggtcttaaacaccacgtctcctcaacttttgctcggcccagctttggaagttgtccattaagttgaacagtagctcctcctcggacatgttgggtgtctcaagcataagcgtagagaactctttgacatactcacggattgagcccgtgtgcttgagacgcttcatatttttcctcgctaggtaagtcacatcctcagggtagaattgccttttgatttctcacttaaaggcatcccatgtgtctatggtgcacgtccctttttctatatcggtaaaccttcgatgccaccatagagtagcattatcagtgaggtagagggttgcggtgcgtaccttagttgcttcatccgtcagtgcgatagcctcaaagtagcactccacgtgccataagaagttttctagctccttgggatccttcttgtcactgaacgtgtgtggcttgggcacctccacccttggtgcctcatgagtggccatgactcgtgctgatacaacaatcttatagatggtaagctcttgtcgaatctcctggtctcgggcctccatgcacgtagccaaggcctccacccttgactccatactagcgaacatgctcatgaccttgtcttggaaggacatgaactcctcgtgtgacaccggctgaaattgtgggcctagcacccccttatgagggtcttgaatctgctcccttagatcccctaagcccttctccatgccttgctcgatcaagtccacccccttctcgggtgtctaccatggctagctccactttggctagccttgcctccatgttggctatggcatcacgagatttatccttcctgcccctgccccatgcagtaggcttgatcttcctcccacgggtttgctcgctagtctcctccacgttggagcccgacatgcttcctttactatgcccgcttcgtagccgtgctctaataccaattgtcacagacttagtcttttcctaagctcgtgtggcacttagacaagtcaagatagttgatgttgctaagtcaaccttactcccaatgcctagcttgctaagctaagatgctcacgacttggaagcttagaaggcgtagtagacaactcttaaagaatgaaaacttttattgctcaaaggaagctttacaagtgctttgggaactcatttgcttggtgccttggccaaaagaggtcacacctatttataggcaccaatggaactctctggaaccttggagggttccttacaaatcaaaaatattttagaacaccctacaccattccatgtacaagtctatgtacaagaatatacaagagatctctagaattctctagaaagccttggactcctctcataccttccaccataatgtagagatgtgcggacttctctaggcatctctagaaccttccacactcttcctactaatagctaagtgtaggagtctctagaagcttcctgggctctatataaacccatgggaaggctcatttgaagcatcctgtgacattgcacccttcaagactatgttcacaagtagcttcttaaatgtaatagaacaccaaactttatattgggaaaatggtttttttatgagacattttagcttctagaaatcagtcttttttcctttttctcctaattgctggggggaaaagcggaacatgcatttgttgtatctctgaacatagtaaacgctcaaagatattttagtaatacatccatgatccaactgccaacacttgcctctaggactgcatttggtgcagcagccttcttatgcttgtagaaaggagttctagaccttaaaaacccatttggacaataccctgatctgtgatggagctggaagttctgtggaagcatgtacaagaatgaagtgctgggttgttctcaaactgtgctttcaggaaggtggatgaagctgttcgtgatgttctgagaagagagcgagatagctctgtcaaatgcattctaattcttcatgaggtgtttagatgtccatcctaactatttgtactgtcattgtttttcagtaatggtcccacttgtgtgcataagtggtgatcagtacacaatgaattgtttcaaatcccataaaacatcctccttcctatataggcactttcctaagtttgcccctagcttgcttgtagttgaatgtgaccgtattcgacccacattcaaagggatcaaagtgcttctttaatctagatcacttgtctatggtagaagctctggtgcatacacattgctcaagggaggtgctgatctgttaatctatttgtattgaataaatttcaacatgctttatcctcaatattttttaagttcgttggcttttagaagttatcgttttatgcattctttcacttttgtttttcaggaagcc

SEQ ID NO: 13729 - DNA, 9312 bp, Vitis vinifera
  Intron number 1 from transcript GSVIVT01015410001 (locus G SVIVG01015410001) derived from phytozome v7.0 (chr-ID chr1 1; pos 3367515 to 3376826 reverse strand)
caggtgggttttcctttttcctcttttgcatgtagttagtgtattgaatttctttgctcttttgttcttagttgtgaagcataactatactttgctgtattatgtttgtgaggataaatagtaaaataagatattgtttacatgactcttacttcgatgcctgatctctattatttacttgttggatatatatgaatggatgatttgttggaatgttctattatcattgcatatcatgagattatgcagctcattgttcaaggaagtacttgacatgctttttgtctggtacttcatatctcttgccttcgtatcatgttacttggaatttgagaaaaacctatggctgtagatggagagtaataagatggaaggatttgtctagtcacacaacatgtgtggcatagttatgcaggtaaatacttattacatatttatattcataaaaataaacttacagtgcttagacagcacatatgtggctttctcatgtgttgatacatttcaatgttggatttggttgtgtgctgtgcactgaaacaagacatccttttcatgtcctgagagatgaagaatgagagtggatgcatgtgtctcactgcaagagggagggtttttccaaccttccaaaaaatgtattagcaaagagggattggagcactcaagtgcctagattatatttgtatttctattccagtattttggtgcttctttaactctattacatttgttgcttacgaggtcaataacatgaagaagtaccaagtaggtggaatagcaattcattttaggtagattttctaatatttctttgcttggatattagtatgcttctattatgttggccaactggttttaccataaaagtgcatacaatatatgatgcctttacttgggatgaatcaacatgtttcttgtagttaatgtaccttttcttggattgggagtgaactcttcctaactttttaaatatgtgacttttgcttgaattttggaggtctagtagattcattggaatctttgaattaaactcataataattgcactctcaataatcgacccaataactcaaaacgcaccattcatgcatattattaacttggctgccttttttggttctccttgagtgcatgcttaaactaatgcattgtcattttttcctgctctttttgtctgcctagtaagcatcaaagttggtgggaacttgagttttacctaaggatttaattaaacagtagctatgaggtgggttagaattttgaatttcaggatatagcaggaaaaaattgaaacatacatgcatacatatttttatgattgtcatggaagctctaagctgtatgatttcaagggttgagcaggaagggttcattcctggcttcaaggtcaggggcggaaggggtgaaggtttcccaagtatcccatctcttgtttgtggatgatgttcttctttttttgagagaccagtttggatcgactaagatattggaggtggattgtaggaggcttcaaggttgtgtcagatctgaaaataaacctacaaaaaagtgaacttattctagtgggggaagtggaggatgtgggcagactgagatctttgcttgggtgtaaggttgggaggttttccactcctacttcttattttattttggccttgggagcacctcataagtcttgtgtttgcatgggatgatgtttaggaaaggttcaatagaagattggcttcttggaagaagtagtatttgtcaaaaggaggaagattagatcttttgaagagcattttcccaagcttaccaatttattctatgtctgtccttttttactatgccgaggaaagtgaggatcagattagaaaggattcagattgattttttgtggggaaatctttgagaagccaataagattgcatttagtaagctggtctaagctttgcaaataagaagttcagaggtttaggcattaaaagactggaggttcttaattaggccttacttttttttttttttgataagtaaacacaattcattaaagaggcaaaaaacctcaacgtatacaggacttataccaggcagcaaaggccaaaaacaagcaaaagaccaaaaaaaacaaaccacccctcaactggaggcaatccactccaggaaatctaaaagggaattcagcttctcctccatatacaacttagcccaaccccagatataacaaacaaaagaatatttgaacctctgaattgctaaaccccccccccccccctaaaagctaatctattcctttccttccaaaccatccaaaaaatgaataatggaatggaactccagaattttttcttttttttccccacaaaagaacctccccaactatataacacctccttttaattaggccttacttggctaatggttatagaggtttgtctttgagcgagagtgcttttggggaagatcatccaaggaaagtttagggaactagttagggggtggaacacttgtgaggtgagggagacttttggtacgagtctatggaaagacatacgaaaaggttaggaggaatttagccataggatagctatttgggttaaaaatggtagacaaacaaaattttggtgggatatgtgagtcggagagatctatctgaaaggagcatttccccgttgttcaaactagcttcccataagaatgctattgttgttgacatgtgggaaaggaaaggtaggggaggttagtggctggtgcattttagaagactctcccaagattgggaaatggagggggtttctcaatattgggaatttatttataaaatgaaagtgcgagaagaagggggaggtatctttagtttggaaggataatgggaagggaatcttcaatgtaaagttgtacaatagttcatgatgtgctgaatctaggggacttcctagccaaagaaatatggggttcctgagctctaatgagatcacatttttttttttaacttgggaagtagtatgagggaagatctcaactatagctatgttaatgaataaggggcggatgatggttaatggctatagcctttgcaaaaagagtgaagagtttactgattttgatccactatgcaaggacaaagttgttatggatgtttcttttaacaatttttggtcaaaaatgggtgtttttaactatagtgaggattctactcctagattggaagtttaagggtttggataagaagagtcgtcatatttggcaaatggtgctctatgttatgaaaagagtgaaatcaaatctttaatagaaaaaagcttgcagattggaggttaaaagagagtttcattgaatccatccttgattgttctaaagtactgttagagatgggaaatttcttaatgacgaccttcataaatagttttagttctggatagtttggttttaaggttgtttttttgtagatacctgctattattctatattttatattattttttgtgtacaattcctgtatacatatggtgcaccctaccactcttttaatagattctttgtttgcttcccaaaaatatatatatatatatatatatatatatattaacagagcaatgcttaataaaaagagacacgcccaatgtacaccatagttcaaagtcgcggtatcgatcattgactcaggaggtcctgagacacatcggtctcggtatcttggatcggtatcaggtgatacgcaaaaacttataatttaagagctcaaaataattttaaaaaattatgaaaattattaaaaaattaaatacaaataagtagagtaaaaaattaatagaataaacttctattatattaaaattattcaaattatagtagaagcatatttttcggatgatttataataatattaaaaatctttgaaaatattttaatttaatcacttgataataaatatttcttattgaagataaaaataataaaaagtaatttttttttataaaaaattgtttaaattaaatagtttgattttaaaaaaaaaatattttaaattattaaaaaaataaaaccatgattcatctttaaaaaaataaatataatttttcttataaaatatattcattaattttaatttttatataaatattcatttcctatttatttgatataagtctaatattcattattcattttttatcattataattttcatcaaattattcaaaacccaaatactcattatctacttaaaaaacaaatacatattatttaaaactcaaatcctcatctctgttaaatacccataacccccatccaccggtcaaacacctatctctctcaagatacccatttatcctctaaacccaaatagcttgaaaaaccaacaccaaccctagcaggagagcctatcatagagtaaagactagtggatcgctttgaactgatagttttattaataaaagttttgttatattgtatttaactttaggaaatgaagcacgtgtgaatttaagacaaaattaatttctcatatataccacgtgtgcagaaatagcaacaactgcctcccaatttctgaaaacaaagaagtttggaattttatagagacaacggagagagaaggttgggtgtaagagctagggcttttgtacttctctctacgattcaaattcattgctgaatatctacctggtaggaatcctctaatggcttccccattctcttcatcggttccaatcattctaagtttcacactctctacatgttgtttcttattctctgtgtgaatccatgcctagggcttcaattcgactttctctattttgcttctctctcaagatacccatttctcctctaaacccaaaggatgaagatgcaaatagggatgaagatgcagggttctaactgtctgtattttttattttcgtgggttttgatcctctcatcttctccaccatttctactctaatattaccttttttttccattaccaattacccaaatagcttagtctcaacatgatcttagagttgtctcaaagtttccatgggattcactccgagactgttcatttatcttcaattcaaccgagtttgttcacaagttgacaaaatatccaactcgggtatcgatccagtatcggccatagccgaggcggatacgactatctcgagttgtaccggtctcgaccgagattttgaaccctgatgtacacaggtggtatacaaaaggtttcaaaaataaagataaaaaacaactaaataaaatagtccacaagagaaccatgcattgaatcttcctttgccttttcttcatcggcttggttttccatcatagaagaaggtttttcactaagtttggattctggaaacacccactttaacccaaaaattgataaaaataagattccacaacttttttttggtcatattacaatgaattaaaatgtgatttgttgtttctttactatctttatagaggctatgtctgttttccatcatccaccctcttctcatgaggatatatatggttaagattctcctcccaaactacttcccaaggggaaaaaatgggacttccaaatttctttagtcaggaacatctttttacttctactcccaccacataaagaactatagttggacttaacacaaaagtatgataggacttatcatagaaggaaatggaaaatacataggaaatagaggttttgtgttataggataagactttttacataagatataacataaatcaatattgggagtatataataatgaactacaagcatagttattaacttgcaaaacatattgtttgtgcctaattgttgtattcttctgtatcatttctcattatgtgttgtaattggtttattaagaaatagatggcaaaattgcatacatatatgaaacacatggatattgaataagaaaaaaccatcgtatgagtacaacctgtatcaatacacctatataccaaaagtttttttatttttttattttttatctttatcgataatggagatagatcaagaaacaccaaagaaggtgtaacctatatacacatgaagtatattctaattgcgcctagtttgactatacaaggagtgataagaaaaagaaaatggtaaatctccttatccacatgtgctacctaagctgatgatcgaaaaaatatggtgtcacatttttttttcttgattgtaattttaattgctcaccgtttgtgatcaataatcattcacatgcattgttgcattttccttttttttttggccttttgctagcaagagttgtgacactcaacttttaccaaaaggattaattaaatattgggtacattgagggtttaaattttgaatttaggatctaaaaggaattgaaaggaatacacaaagaatgaagggtttgtgttatggaaccttttgcataggtcttattgaaaaacccaatccttggagtatatcagaaggacctaaaagctagttgttgagtaaatgtcttgagtatcgttttcctatttttttgtgttgggtaacctattgtgtcattgttgtaatcttcattttattttatttttattttttatttttgttttttgtgtgtttttttgtatattggaaataaagtaaaaaatatgcgcacacacatgtatattgcaaaaaagggttagaatatgatattgaatatcattcattgatatacttgaattcaaatgaagaggcctgagttgatgtgagacttgcttcatttctatgtttatttttaggcctactatactgacgtttttaaacccgtttccatgtataccctagggttaggcctacatggtgaggtccctagatgagctttaggagaggttatacttatataggtttttttgttccttttatatagtccttgtaaaacggaggtttgtttgggtcttttgaacatgtttgtatatcatagggaggcatccttctcatgtttttattcactttaattaatacatctttttttttatatacaaaaaaaaaaaagaacttgaatacaaaaaagttccagcgcctatgttaacaaaatactatatcaatatatatgtaaaaacatagcatgtaaaaatatatctacatatctggattctgtgacgtatacgtttgagtgcaatgtgtctttggatatttgtgggatgtgtgtactatgtacataaagtaagcaagagtctttgttttatgtccagcatcttcaggttctgtatccaaaaatcatcttcatcatgtcctggaatctcatcattcaacttgtatccatgtgtccatggatacacgtggactgtggacaatgtacaccaattaagcagaagtctttgttttacactcatcatcttcaagttctatgcccaaatcattctcattgtctcctggaatctcgtctttgccacttgttttcagaagtgtagagaggcaataaagaaaaactacctttgatagcttcttttcctgtaaagaaacgttaaagcaaaacagactcaagtttggaggttttgtagaaagagaagttttaaattttggacctctgtagactgagaagtttggaatcttgtgaaagttggaatatggccctgagacccaatctcaattcccctttttacttgaaagaaaaataaaaagatttaggaataagagagtttagtcttattgtttgtgctggcgacccaactctatcatgtaatacatcaaaaatattgtgcaatacatagtgtataacaataatcatatgttttaacaaccctgaggagtagctcagttggttcggccttgggtttgctccctaatggtcaccagttcgagtcccctcagggctactggaggtttacccggtcgttaactttagggccccgtggaattagtcgaggtgcgcgtaagctggcctggacatccacggttatcaaaaaataaaaaataaaaaaataatcatatgttttaacaaccacacaagtgggaggaaaattcaacattttcttttctttgttgaagcatcagctatcagatgtgtttatgtatccttgaaacctgaatttctagattggaagtagatacgactcagtgctatgcaataattgcaaaaattgacttgagataattcaagtaagcccaacaaagccttaatccaaattactttgcactggctacatgaatcctttttttacattttatgttgcatggttatttttaaatgagccagactaccttcttgtcaggttctaacttaggatattgcaaaatccgagtggaagctcttttgatatgctctcatcagtaatcaagtcctattataatgaaagaatgcaatatatgactttgtagctacgcatcataaattagttaatgaccgggtagattcctggagtactttgtacattcactatcactgtgtataagtttttattgcgaacttgcaattaagagataacctttctagttcttattactccttatcttgttctggccttttctcttttcttttttattttttaattttttataatgccataactaattttggttataagacttgtacttagcacattcacacttcagtttgtggcatagcactagtagaagtgatcatatcatggaaacagatttaagatttgctagatggaacaaaatgtgcctttcttgcatgataagaaaattttctagtggtgtttacctcctgttttccgtttttaaaataaaaataatatggactttcatacagatggtagagacttagcttaaagagataatgatctctaaaaactgtttaaaaaaatgaaagtattaaaaattttactacatcaaatttaaaattttgatagaaaatttttagaatataatattagtccctaccttttgtcttagagttactatattttatatggagttgttattgttttttgttttaaaaacaaacaaaaagcaggaaatatattcaaattatgacaaatattaatgtttgcacaggatgcaagtattgtattaaatttgtagaatgggatgatccggaatctttcttgagcaggtccccccaatccacatatatggaaggagaaggctctttattgttttcaactacataaactttgctgacttgaacctgtagtttattactttttcatccttttttttttatatataaacttataaaaatcagtataaatatgatttggtgaactgagctgcctatatataatgggacttcccaagatattgatggtagattgactattctatgtccttccataacataagataatgtcaataacaatttgtttggattttacttgttttctcagcagttgaagattggacaaggcattataacatccga

SEQ ID NO: 13730 - DNA, 1152 bp, Vitis vinifera
  Intron number 2 from transcript GSVIVT01001176001 (locus G SVIVG01001176001) derived from phytozome v7.0 (chr-ID chr7 ; pos 1057563 to 1058714)
gaaggactattttgttgtgcatcttttagaaactggtaagaggctttgagaggtcttgatctcatgtaaatgagctatttctttattacagttgtcattggactcagacatcattttaacatcgacaagttcacaataatgtacacctttttgggggacaaataggagatattatggtgcctttttatagtaaattcaccgtttcttagtcttataatctttattatgaggtttttctgtttatttttttggggttaattgcttccttggtacttttgagttcctatttacggtggtgggtgttaatggttgatgacttcagaacttggagatacaacttcctaaaaatttttagatggttaccgatctctagagttgggtgtgagtgactttatgtactgctctaagatttttacaatttttgcataggagttgatctttctttttcttcttaataagataagtggctctttagctgaatcaggatacctatcacaagttgtgaagacaattttgattttccaatacatcataaaggggtgtaaatatttaatgtcattttctttattcatctatctctgttttttaagtggttattacaatttcacgataattattatcagttgtactttgttgaagagtcatagcaaaactgtttatagtgtacctaagaattccaaaatgctcaattatgtaacttttatgattgggattttgtcaagtagatttgctgcaggaacatgattatcagtcaggtacacatgttagatctgtggatgctatggtttccataattttaccttttgataaaatatagttggagttaatagatattttagatatctactctcccttctgcccctgcaccgcccgccgccccccccccccccttttcttcctccttgtgcgggtgggtgcatgtgtgtctgttgcacgtgtcatagtagcttgttttttttgagttctacacatgctttgagcttggatatgttaacctctccctctccctctctctcccacatctgttttgtgcgtgcacacatgcaaatagtagtttgattctttggagttccacatatgctctgagcatggaaatgttgacctctttttgtccaatttctaatcatctttttcttttttacatttttaggg

SEQ ID NO: 13731 - DNA, 2988 bp, Vitis vinifera
  Intron number 11 from transcript GSVIVT01010835001 (locus GSVIVG01010835001) derived from phytozome v7.0 (chr-ID chr 5; pos 23218447 to 23221434)
aaatcaggtaataatcgcagagatctcattggctgatatatttggaaacaacaaatctggatgatgacattttgaattaatacaaaattttcattacttggcaaatttgcagtgtcaataaccgtcttttttttctttttggcaactattaggattatgttaaattaatagaagagtatggtgaaggtactcttcattctaaacaaccaggagtacagaagttccctcaacacacacagtttggtggagggagtaacacacacacacacacacacacatacaaaaggagggatgcacaaatctctcactatgtcaacagcttttctatcctagcttccttttagcaccttgtgaaagaacgctaaaaaaatgtttcatttcctccacctcatgtaaatccaaactctctccttcagttaggggtacaggcaagctgagccaaacttgagtggaattttggagtgttaaggagcatgaagccaggttgaagttttgaagatttgatttgttaaggagcatgatgtgtgtattaagtccaaatcctgcaaacttaagcttttaagaaaattgatagttcaacatggtatcaaagcttggtttggcaagaggtcatgggtttgagccacatctccataatttacatgtttgtttccccatttgtttgttggatatgaattcaaattcagtctatctctgtttgttgaatatgaatccaaattttgtctatctcttcacatgcggttatggggtcgcatgtgagcgggtatagggccgcacgtgagggagggtgttaagaagcataatatgcatattgagcctaaatcttgtgagcttagacttttacgaaaattgatagttcaacattatctttggattttcgagaaagaaatccaaaaaaatatgaccaaaaaccactatatccatgggcttttttattttttgttagccaaggcctagaacctattcccaacatgcttggtttagctctgaaattggtagattcatgagtgatggctcaatagattcttttcaatttaacatggggaatcctccatttctggttgagttgggaacaaattctcaaattactcatacaccagtctcttttatttccaagatgtgtttgcgagtttgcatgcaggtgtgtgcttgttgagtttgaacttctcatgtaataagccacccatgcctccatatgctcaaagatagcatgaagaaatttgaaaattaaattggttgtcatttagctagaataagccaaatgcactttaacatttgtggtgtgtgtgcaagctgcatgcaagtgtgtgtgttgagtttgaacttctcatgtaattagccatccatgcctctgtttgctcaaagatagcatgaagaaatttgaaaattaaattatctgtcatttagctggaatgagccaaatgcactttaacatttgtggatggtacagctggagcttcaaagatagcataagataatgaagctagtgattccgaaatagatcattgaattgtttttcctaacaagaaattctcttctatcccattttccttgtatatgaactttgtcatttgctttttgcatattaaatattgcctgtggtgttggcttgtagaataaggaagctgcccacttcctatttgggtctctctttgggagcatcttataaatcttctagggtggggaatgcaatagaggagaggtttaggaacaaactagtgacgtagaagagacgatgcttgtctaagggaagaagacttacccttatcaaaagcacattatcaagccttccaatttatttcatgtctttgtttgtcattccaagaaaggttagtttaagacttgaaaagatctaaagaagagacattttgtggggagtgggtgcattagagaaaagacctcatttagttaattggaccatagtccacttaggaaagaaggacaggggtgtgggaatttgcaatctcttagtcttaaacaaggctttggttggcatggaattggagatttgctattaaaaagtaatccttatagaaacaaattataatagggaagttcaaagaggaggaaggggtggtgtttgataggggtgagagaaggatatgaaatgaaggtgtggaaaaccatcagaaatgaatgggagggcataaaaagtaggtctcacttttcaattgggaataagggaaggattaaattctaaaaagacttatggtgtgaggatttaaccttggaagaaggctttgtgaacttattctcttttgcttctaacaaagatggatgggtagcataagcatgggagtaggttagggaagggggtggttggagcccccatttttcaaggcagtttaatgattgggaacttgatgaagtggagattttcttctggaaattataattgttgtcaattaaaagggaagaaactaaaaagcttggagggccactcccttgtgcttgttttgaactttttggaaggaaaggaacatgaggtcttttaatcatgttgagtagtcagaccaagcaatcaaatctgattttatatatatttttgtgaatttggatagggtgtacatagagaaccacaacgactatggtagattttgtgaattggctaagcttaaagaaaagagacgttttttttggtcctcgcctacactgggtgtttattgtttgcttcttgtgtactatgtcgtgctgcctcttaggcacttctaatatattttctcatttgcctatcaaaaaggaaacctagaacttgggggaaacactggctacctcttttgatgagcaactaagaatatattgaaagtgccaaaaaaaatgggagacacttgttacttcttaggtgtttgtgatttgactctttttagcataatcacaattcatgcttctcttattgctaactgttgtttctgctcatttagaacaattttatgaagttgtggttgcatacttcatgcacatttctgacctcacatgttctttgcagga

SEQ ID NO: 13732 - DNA, 15652 bp, Vitis vinifera
  Intron number 3 from transcript GSVIVT01008370001 (locus G SVIVG01008370001) derived from phytozome v7.0 (chr-ID chr1 7; pos 2747537 to 2763188 reverse strand)
tgcactcatagtctaatgctctctcttctcaccatcaccctgagaactaactgggagctggaagtaaagcagtctttccctactttcgtcttcactttttttgttctctttctgcacttcattgaaattctatcccttaccttttctaggcaaagaaggcaacaaaatgtgtaacgcccactttcaatcatatagatattgtccgttttttatccaaaggggcctcacagctttaaaataccgatttccaaccctgatgtaagggtttgtttggcccagggtgtttgtctatttgatctcgtaatcccataaaacataacaaaaatgttaaatcaatatgagagtatttgtgatattctatatcagataaggaagaaaattatcaagtctatatatgtatgggttccttttaacttgtagacaagttttaaagacgtgagaatccctttgagcaaataatatctacattattaaatatggatcattacagaaaaagtgtataactccataatccttgaaggcttgcagaagactaagtttactattaatccttcacaaacatcattatgctcattgttgggagtcaggtttaactctcaatgttttgacgtacttagagtgcgtttgacaatgattatagaaagtgtttttcggctttataatacttgaatgatgaaaactttcaattgttataaaatttagaaacacttcttaaaatcactaccaaacacactcttaattatttagtttggatttcccctttactttgtgtctcatattcttgtgaatttataattaatctttcatttttttttatttggatatacttttgtaagattttcctaaatattcttttttgaaaattttctaatattagatcttttataaatatttatccaattaatattttatatgagatatttgaaaagtataaaaagagattttgtaatagagaggggtcctttttatatgtaaaggcagcttgatatttgagggttttagaattgtaatttttttataataatagtgaaagttcatggatttttgtagattttaagtgaagtcaagtaaatcctttttaaattgtaaattttctagtatttgtgcaaaatcgtatttggaacatttggactttgaaataaaattatgaaaattgataacacgttatagatgcatgaagctacttaaaagagggaataagtaatttatatttatttacattgaactcaagtttattggttattattaagaccatactttgttcaacttttatcataaaaatgtagattttattcctctcaaaatcaagtttttggttatcatttaactccacaaggttgaaaatttatctttagaaaataaaaatattggaaaatcaaaggagacttgatccatgttcaaatcatttctaaaagtttttgtaggtttaaaatcatagatttaatcaataacatattaaatacattaaatatgaaaaaagtgtaaagattcaattaatccaaagcaactttctccaaggacttataccaatcaaatctatatttttcttccatgttttcatgtcatataggttgagttcacttagaataccatgtagatggaataatgaaacatggtattttaaaaaattttaataaattattcatttactagctaattatattaaataagtttttaatttttaaaaaatagatataaaagtaaaaaaggaaaaaaaaaaaaaaaaagtcaactaaaaggcaaacaaacaatcaaaatttactctgaatatggctatttatagagataggtggagtgcatgcaatttgtacttttataatttaataggaatttgataggaatttcatgaaaaactcatgccagataaaaagataatcttcatgaaactttttaaaatgcaaattattattgataagaactatagtcaatataatgagattccaattcaagtactcaaaattgaatatggtaccaaagaatgaagatgattattaggttgaaggaaaaaaattggtaatacaagaaaattaatctcttttataattaattagaagtattgtctatcatgttcaaaattgaacatggtaccaaaataactttgtagagtcaatataaatttatgataatgattttacacaaataaaacatgcatgatcatgtagatttgttcttatcataaaaagtctcacatgcaacacatttttattaaaaatcatcatttttgtatgagaattcaattacttatattttaatattagtgtttttcattttatgatcaactataataaccaaaaaaaaacaattgtgtgcaaattatgaaactaaattgagatattggagaaaattaaagaataaaatgtgggtcataggcagggatgaaaaaattgtgaaatgttgtgtttatttcctcaagatttgggctcctagtatagaagcatttttcgaaattgttgacgacattttggtatttataggttttttttcagatttataaagtttggttagatcaaaccatcattccttttatatgttaaaaatgttagtaaaagtaattaattaattcattaattaatatttttctaaacttttatataaactaatataaatgtatgtaaattttattgagaattatgctgatggagatcagtagaaatgaaatttgaaaggccgatcattttgtgatcttataattttataagttaatttatagtatccaataaatttgattttcattcacaattacaaaatacaagtcatgatgaataaggttaatttatcaagcgagaattcaaatagaaacccatttattaattctgtcattaatataacttagtatatgaagacatattttatagtttgccttttttaagttttgctttttgggaccaatactgtaaagcaattttaaaatcctaagtatataatgcagtaatttgttagtttcaatatttcgtgagaaaataaatgtaagaataaaaaaattggccaaatgaaaatatcaatatttgcgaaaatataaacaagttagttttaaggaaatatctataaaaatattcattattccataaaatttcattaaaaattgaaaaaagaaaaaatcccacgacttgattaaaaatatggaaaccttttatgaaactttaaaaagcaataaaataattaataataacatattaaactagttttctagtaagaaaataaaatatttgtgcaataaaattattgaaattatcaaaacatgagtttgaaaataaatattaaatactaatatgaagataaaaatattattttaacttattatattatgtttaataccaaactaatgatcattattcatagtaacaatagatccaagattaaattaagatgaattaattttaataatgataaatctaacaaaatttaaacatatttaaatatatttaccaattataagtcatatttagcatacatatttctacatgaaataaataattataataaaatattgataaaaaaataatttgtgttaattataaccaggaaggatagaaggggcttagaatgaatcatcctaacctcgaaaaagtgtgtttctttacgcacatttaaaataaaaatcataaaaatgaaaattttataaaaataatcaaaatttcatacactttcatagaatatgagatggtcaaatgcaaacatttgatgttaaaatatacaaaattttaattatttttaataaatattttgaaaacaaactatcaagatatccactttcgttgattattcataactttttctttacattcaatattgttttttctttttcttattttttttctctctttttttttcaattttcttttaagtatgagtgtatttggcaatgattttgaaaatgtttataaccttttttatacttaaaaaataaattttttaaatgttagaaaaactaaaaatatttctccgaatcactaccaaacacactctaaaaatgatacaaactctcctaatctcctttctaccacatgtattcaatttgtccacgcatgtctggcatgtcaaatatgtttttatgaatgttttagtctcaatttgtagcttaggaacccaatggcccttacttggtggttgaagtttttaaccaaaataatgctatttaaaaaataaatataaattgatatatgttataaaacgaggataaatgcaacgcaactcaaagtagagataaattatatattactctaacaatatatataatgaggggaaagaatcagagaaaagagttgagaaaatgagagaatggagaaatttctttcttactaaaggatacatattagaggggatggaaagccctttcataggctttccaaatgacttccattaataaatattgatggaagtcataaataatatttaattaacatttattataattaataatgtgatgacattcattactttctgttataacaatatctaaaataattcctattttagttggtttgaatgatcgtggacaaaatgtgaatggagttcttctaatttttattttatttttgtaagataatcacaattactcactacttatatttattatgtctttggtttttgttccttacctttatgtgggtgtttgagaaactaacttaataacttaaaagtaatttaataacttaatttaagtcattaagtaaattaagcgtatttggtaaaataatttaatggtatgacttaaagtaaaaaaaacaaatttaaataataggtaaaaacaattaacttatcttgaagtccatatttttattttatctttttatcctcatttaccctaattatattatctcttttgactctccataacctttattgttacttgatttcattcactctagttatattttttgaggataattatgttaatttgattatttaaaataaattttaagttaattttatcaaacgaccttaataattagagtgaaaattaagtaataaattttaaatcaataatttaagtatattttaccttacagttaacttaagttattaagtatatttctctcttactttgcatgttgggaagtctccaatacggtgaatttgtattaatctgtaatatttttttataaggatgtacttttgtaagtacttttgtattattattataaaagaagtattcctttttgaaattttttgcaagattaaatatttttgataaataatatttatatttatttatatcaaattcaagtttattggttattattaagcccacacttggtccaatacttattataaaaaatgttgattttattcctctcaaaatcaagcttttgattatcatttaactccacatggtcgaatttttatctttataaaataaaaatattggaaaatcaaataggacttgatccatatcgaaatcatttttaaaaccttttgtaggcttaaaatcatagattaaatcactcacatattaaattcattaaatactaaaagagtgtaaagattcatttaatccaaagcaactttctcctaaggacttataccaatcaaatctatatttttcttcgacattttcaatgtgttaatttaattatcatacttctcgacagattgtcgtataggttgagttcacaaacatagtattttaaagaattttactcattttattaaataagttttttaaaaaaaaattgatataaaagttaaaaaaaaaatcaactaaaagacaagcgaagtcaaaatttactctgaatatggctatttgtagagataggtggggtacatgcaatttgtaattttatattaaatataaatttgataccaatttcatgtaaaactcatgtgagataaaatataatcttcaggaaaactctttcaaaatgcaaattattattgataagagctaaagccaatataatgaaattccaattcaagtattcaaaattgtatatggtaccaaaacatcaagatgattattggtttgacggagaaaaaaaaaagtctggtacaataaaatctcttttataattaattagaagtatagtcaatcaagcattttaatcaaatcttttgctagtgtcgaaaattgaacatgaaaaaaaaacaaaaaaaaacccttattaaagtcaatataaatttatgatgatgaaagtgagttttttacacaaataaaacatgcctatcatataattttgtttttatcataaaaagtctcacatgcaaaacatttttattaaaatcaccatttttgtgtgataattcaactacttatattctaatactagtgtttttctttgttataataataataagaaattgtgtgtaaaatatgaaactaaattgaaatattggaggaaattaaagaaaaaattgtgaatcataaataaagataaaatatcataaaacatcgtcaatatttcttcaaagttttgggttttggtgttgaagcgttttttagagtttttggcgacaatttagcatttatggggttttttcagttttgtcatggttgtttttgtcaaatggctacttttatttttcgtgacttggtcaaaaatttcgtaatcagacgagacttcaaacagaaaccatttattaaagcaatcattaatataactagtatatgaagacatatttcataatttgccatttgggaacaatattgtaaagctattttaaaatcaaaaaaataaatgtaagaataaaaagattggcttatatgtaagaaggatgaaaatatcaatatttgcaaaaatataaaaaagttggttttaaggaaatatctttgaaaatattcaatattccataaaatttcaataaaaattgaaaaaaaaaaaaaaaaaaccttcacttgactgaaaatatgaaatatgagactttataaaaaaattaataattacacattaaactagttttctagtaagaaattaaaatatatgtacgataaaattgttgacattaatcaaaagcatgagtttgaaaataaatattaaatattaatatgaagaaaaaaatattatttcaatgtattatttaatgtttaataccaatctaatgattattgttcaaagtaatgaacagattaaatttagataggccaattttagcaatgataaatctatcaaaatttaaacatattaaataaaattgtaaaagataagtcataataaatacacatttatctacatcaaatgaataattataataaaatatttataaaaaaaaaaaattgtgttaattatagcaaggagacatcggggtgactttggaataaaatcaatttaagattaattattctaattttggaaaagtgtgctcctttatacacattaaaaaaaaatataattttcaaattttatgcactctcaaaacaaggtaatatatgggatactaaagatgatacatttggttcaaaagggtacaaaattttaattatttttaaataaatgtattaaatttgtatttgtcaaaatttggtttttattttgtctttttttttctttcaagtgtatgaaaaagacaatctttccactcttcctagtagaaacattttgttaaatatggatggtaaataatcaaaatattaaagaaaattggaaaaaaaaattaaattatatatatatatatggaaagtatctaatttcattgattatttacatttttattattagagttatctagaagtcaattttaggaggtgattttaaaaaaaaaatttgaatttttttaaataggtatttttcccaaaaatctacgaattttttaaataagatgcaattagatggtactaatattttcatgtattcacattttggaagtttggctaaacgtgtccagtgtgtcaaatattcttttatgagtgctttagtctcgatttgcagcctaggcgtccaatgccacttcttgtcgcatgagcatcggaagttttgaacaaaaataatgttatttaaataataaaaattaaatataaattgatatctaaaataattcataatctagttggttcgaatgatgtagacgtacatgtgaatggtattcttttaattttatttatttttgtaacataatcacaattactagagtctatgactatattctttcacatttttttgttatttttcttttttgctttggttttattacttatctattttattaagttaaaccttttgaagtttttttaaccatttttcaattaattaataaaatatattatttaattaaaaataaataaaatagatttgtcttgaaggtaattctagtaatatattaaatgattaattaattcattgtccattatccaataaattaaagttcttcacactagataattttacatcctaagatttgaattttttagcgatacaaacatatcgttgtctcagtataacccaattacatttaaataaaacggacttgtatattttaaaatatgtcaattggataatttccttaaaaacttcataatagagtattaattaattcatgacatatttatctttataggtggaatgggaagtgatgacaaaaataatgcaaattccattattttgatatcttttatttgatttttattcattagaaaataagatcaagttacatgattaattagtctatgaaaggacatcactaaagactattagacttgattaattcaggctatgaaacatttaatgactagtatatttattacaattgagttttatataaataaatacaagatgaaagatagaaaataagtttgagttcatgtttgcaatttttatattttgttcttccttcctccatatcaaatttcagaattattcaaatctttcatattaattatcaatctagtaattacaattgtcataattttattcaaatctttaatattaattatcagtctagtaattaaatatatatagagcatgttcaccttaaaactttaaaatgattgtaataatgcttgatgaatatttttcatacaacacctatgcccatcatacaaaccaagtactcactcctccaaaatatttttattagaatcacaattttctgatgagaatcctactatttatattacaataacagttttcagtcttcatggccaattataataataatacagaaaagattgtgaatgaaatattggaggaaatttaaaagataaaaaaacatcatatataaatatctttaaatatttcatttttagaattatatttgacaagattttaaaatagtatttatacaatttagttctcttgtcatatataaggaaacaaattcatacttccattatcaacttcaaatcttatggcaatttagacatctaatctatatcatatttttgtgtaaatagggcatttgcattattggaacgaaccaaaaaaatcaaactattatataatcactacaaaataaacattaaataaagaaatccttttttttttagtttttcagcatggcttgattgaggaatttcattatgggagtttttagatttttcttaataataaccaatattgtactccttaaaaatacaaaaataaaataaaaatacatctaaaactaataaattactttaaatacttcttaaaattcatttgatttatttatatatatcaattaaataatttaaagttatataaacttttaactaattttaattattattcatagtaaatcaaatatgaaaattctttttttttttttccattttttctaacatacgatgacaaaagtagatgatggctacttcatattaaattcaatgcatctacgtggtggaaggccattcttggagatcaagtagtgccttgggcctagaaaaaaatactaatttgaaaagtcaaagttgaaacttcatcccaaaggtgtcttcacatgtgtttttcctatcactatatgtgtaattgaatttggcatttacccaataatgagaagatgtgaggaagcaccatcttcacccatcactttcttttctttttaatccacacattccaggaacccacaaagagataaaaggaagcaacagcatattgtccacacatttcaaataaaatgacaaaactcaattgtcatgaagagttgaatctacaaccacttaatttggatgcatgcaagaagtttaattttttttttcttcttttattgataaaatgtaatttataaatcataattttatcaaaatcatatcatgaagcgttggtttaataacttatcattatttttctcagtcaaataaggttcaaataaatttgagttgaatttggttcatgacatacaacaatattaagtcccttcaaccccattttgtagttagaagataattagtagtataatgatataatttgtaagttgactaactcttattttagagctatcttaaattaatattttgtgttataaggttgaaaatttagtatgacttaaaataaatttaatttaattgatgttgaatttaataacttaaaaattattattcaattttattttaaatataagtcatatgtgtattaacttttaagaagtatataagcttgtttttaagttcaactaaattacctattttgttaaaatagtttaatatgaatgtaaaaattttattataaattttatttaggttaatataaattttatgttgaataaaatttttataataccaataatactcattaaaattataattttagcttcaactcaactaataacaataaaaaccattaagctatatttgactttcataaaatttaagagaaataaaataaagagtaaaagtagaagaaaaaaataaataaaaaatatatttaaattcaataaattatttttatataatatttgaaactcgtttcatttactttaactactatatataaacattaaataattttaaaatataaaaattttaaactaattttatttatatttgattttctttcttcttctttttttatagtaaaaccaaatataagaataacaattttttttaagtacttgtcaagatcctaacacgaaccttaaaattgtttagtaaaattaaattaatttttcttaagttattaagtttgacacattttttttttatttacatcaagtaaaagcaaagaactccttaaaaaagagagaaggagttggtaattatggtaaaaggttaggagaaaataagagttattttatttttaataaatgataatttttaattaaaaaaactagttatttcttttatttatataataaataactttatttaatcataaaattatatatatatattaaattcgaggatctaaatttcaatatgagatgataaatctcaacaccatggttttgtaattgagttttatataaatagagggtaagagagaaaataagtatgagccttaagaaataagtatgcaatttttatattttgttcccctttctctattttgattttaattttcaaaattttatagacatactcttgatgaataatacatactcatgatgaatattatttataaggacagcgtccatcatacaaacctcctctactttatcatacatactcacccacccacgtcaaacttatttttcatcagaatcacaattttctgatgggattacaactacttatattgcagtaacagtttcagtttcttggcaattataataataataccaaagaaattgtgattgaaatatgttactaaagtataaatattggaggaaactaaaatttgatatttcagttagtgtaatcaaaacctgaatcattaataacctcaaattgtttcataatcttgtactttcattaatttatgtattatttcttaaaataactgctatttaacatctgagttgttcttggaaatggttttcaaaatcaattttaaagtctttttttaaagtgtaggttttcatggaaataatcacaatcttttggtttcactaaggatgaaaatttcagaaaatattgtgaatatttcatagaaattttggttattggtggccaaaaatttcgattattgctgctcaccggaaaaatatttgaatagaaaagttgatatagctttgcagattttttgtggatatttcaggcattttatttttgagcaaatccacccttatttactgctaacattaattatatactgaagttgatttcttatttttttttaaaaaattgtagaaatgattatacattttaatacattcctagaaaataaaaatattgaaatgaaattttaataataaattaattttaattatcttatgttcaaatatcatttcattaattatttcaaatctcatttcattaattattaaaatataaaaaccattatcaaaccttttttaatctctttatatattaattgaatataagataaatataaatttgaaaataaaattataaacattttaaaaaaaatcataaatatatcaccatttttttttttacctttgaatacatttaaattaaataaatatctaaaaatatgttttcaagtttcatgtattattacttaatattgcacaaattatatatataattttttttcaataaaataatttaaatatgtattattttttttttatcatttttttaatattctctaattttttgatgagttttcatcatttatgtcacaccgattttttttttttaaatccaactatgaatatatctataaaaatcaagctttgaaaatctttatatatatgagtaaaagggttctaaataaataagagatgccagaaattatgaaaattatatatagaattaattaacaagttcttacttgatttgagccatacagtcataacatcaaatctcagtccactactttacacttactctaattttttttttttttttttttgtcaaatataatgttgacattattgaaataggggcaaaaaatcaaatcgtcatacaataaataaaacaaacacggaactctttcttactatgccattaaaatagaagcaattttcattgtggatatttttttaaatactagaagtccatgtctggctgcttcatattaaattcaacttatagtctacttagacagaaagccattcttgcagctcaagtaggtgtcttgccttagaaaaagccttcacatgcccaactactactcttgtttttgccatcaagttgaattcaatttagacatttatccaataatgacaagatatgatcatatgaggagtcatcaccattcactatcactattttttagtccacagattccaagaattaaaccacaaagagacgaacaaatagcaacatactgtccatgcatttcaaataaaatgacaaaacttaattatcataagctattgaatcttactttaaatattagacttaatttgactgcatgcaagtgaagtttattctttttcttcttttattcatggaaaaaagataactagtaatataatataatttgtagacatactctaacttttactttagttaaaagttagaccttattaagttttatataaaattgaaaacttcgtggctaatgacttatcacttaaaatgcctcattacttaaaacttatcacttaattttattttaaatgataaagtcatatttatattatcgctttcaacaagttataagattgtttttaagctttataagggtatcttaatttacttattttgataattttgtcaaaatagtttaatatgaaaattaatatatatatatatattaaaatttatttaggctaatgcaattccatgtttaataaattttagtcaagtataatcaggctttaagataaactataatttataaactttaatttcattaaaaacatatcatctaacagtgtcaacatatcatttttttttaattaatttattaaaagggataaaaaaaattatattttgtaaatctaccctcctttattttttgtattaataagtaacatttttttgacataaatgctcctcaatatagtgattatttacatgtgtatttaaaaaaaatggtcatttttaaaagaaaaaattgagggcatttttatccaaaatgggtatttttagggttgaaaaaagtcgaagattaaatttacaaaattggatggtttcatcctttaatcaaataactctttaaaaaaaaaaaacatatcagcttaatttttcttcaatcaaataaagtttgaatgatattttgttaatttgtatctcacaaaatttaataagttgtaaaaaaaattaatttgaatttatagagtaatgttctttttttagcaaaaccaaaattattgtgtatataaacactcgggctctattgtgatggacatccggtttgtttcattcaggttcgagtttagtatcttttcatttgaaaccattcgatgtaactaagtagaaacatttggaataagcacacatctaacaacttataaaatgtggtcatacgacgagttgggacgttataacaataaacatgtcctcaaaatatatgattgtgatatcaggagtataccaataagttgaaatagttggttttgccatcatggatatttgtttgaggaaatcatatggttatacaccaactacaaacaatatgagattttagaactttaccttctcctttctaattttagtgtaaaatcaaaaaaaaatattatctattcatgcactctaatggtgttttcaaatttattctacaattacccttaaaagtaaaggataaagtaataaaatgtattaatataattattatttaaagtcatcaaatatattatttgtgggagagtattttcatttttatccattatatatttttgtttttatttcatttgttatattaactatttattatatattatcattttaagtttaatacgtaaataaaaattaaaatcaataaatatggagaaattagagagtaaaaataaatttaaattaaagaaattttataagaagatacatgagcatattaaatatatatataaagtaaaagaataaaaatagtaaaaaaaactataatatgtgacaatgtattatggtagcaacagagggaaaaaaaaagaaaaaaatgggaagatagcaaatggtaagggagatatattaaggagagaaaaataataaaagtactttgtcctttactttttgaggataattatgaaataaatttgaaagcaatgcctgattaagtgatatcttttcccattttacactaaaattaaaaaaagaaaaaatgtaaagttttaaaatctcacgtttttttgtaggtggtacatggttattccctatttctttcctgactcaacattaacattttgtgcaccaccaaccatgattggactggacaattttttttcctttccaaaaatctccctctccctcgataattagtatcatttccccaatatatataaatatctatttattactgtgagtcagagccttccaacagtcaaatatggtagctgccctcttcatcttttgtctttttctaaattattatgtatttggacaatcatatggaaccagccccactgcttttggcctgtacctccaaaatatagccaatcacagactgccacattcaaataattctaaccttttaccattcaatgtatgggcattttaggcattacaagatttcgattgtttatagagcaataggcaccgctgaattggccttctcctctgcgagtgtgtgtgaaggagaag

SEQ ID NO: 13733 - DNA, 4274 bp, Vitis vinifera
  Intron number 1 from transcript GSVIVT01037060001 (locus G SVIVG01037060001) derived from phytozome v7.0 (chr-ID chr3 ; pos 8247676 to 8251949 reverse strand)
ggccaagcttgccttatatttttattggccggttgatgttgggctccggtctcttcttcggctgggctggagattccgtgccgatacccagtcccatgctagaggcaggcggtttgggtttgagttgggtttggctgggcattgggcttacaaatggtcatgactttgtgttttgaaacttctggttactaaaaacttgccaacattatcatcatggatccttaaacaaccaaatttaataattcctacgtctattttaactaccaataagttattacatatattttaatgatcaacgattcagtcattgaagaactcaaaaaagtcttatgtagaaattaaatatgaaaaaaaaagttcaatgaggataaaaattttaagttgttgatcggattaatcattaaactgaattagttatagggttatgggctgtggtttaatgattgaatagatggttggaccgtggcccaaacgatgatatcaacatcacattataaatatataatttatatattattaaaattaaaaataattataaaaaaatgaattatatgtgaataattaaaacttaaagtatttcgttaattttatttttaattcataataagaataaatgtaaatatattaatattgtttaaattatcaaataaatatatttctattatatacaatttttagtgaatatatctcataaagtaaatttatctatacagatatctaaatcagagagcatatatccatttgtctccatatattcatacctatatatgtacatcaacactagccattaaaagattgaagcaggaacgtaaaacaagtagattttattttttgacatctttccattataaagtttgtaccaaatatgagcatggttggtgttggtacactgagaattcactttctttattccggaacgtttccttcgtttttattttctttcacgagtccacgtgtcatcttctcagtggaatggatttataacaatttataacagaaaatgttctattaaatcttaacaaatatatttacatggtcatagctatctatacgtgttcttatgtacacggattaatgtttgtgttcataagaacacggattaatgttcgtgtccattggaacatgacttgtcccgtgtttataagaacatggattattgctcgtgttcataagaatatggatagttcgttttactattatgtttactttagattaacaaatttattattgatctaagtctatatactttttaggatttacactaatctaaaaaactcgagattaccctcaattcattctaaggatgactcaagtaaatatgacaaattaaggagaaaaaaaacattttttgcttctatttagaggtacaaattgtatacaaaaagtagtatctaaaatgattaaagaggtctttatttttttaactcaattttaatattttaaataatttatttttaaccttttttttttctcttacttattacttatttaaaaaaaaattgattgaaaaaaaaccaaaatattttattttttactaaatattaaaaataattttttgaaccaatcaaaacacaatctcaatatggtccttgtagtattaatatttaatacttaataattaaaaaataaataacttaatatttaatattataaagttgtatttataattaaattaaatttaattttatttacatttaaataaaaaaaccaaacaccatctagattatcttatttatgtggttcttgttccattattttgtatttacttttatttatgtatatagttaataattgatctaaattttattatattaaatatcaaatagatacttaaaattttgcacacattaacatgtaacgatagttttcatggttggcggtaataagacaacaagagcccaaccatgaattaaaatattagcttttatagatatatcgataattcgattttacagatatattgagaaatatcatcgaaaattttaataaaaaaatattgataaaaccaaaattcatttaaatttataaaaatattagagaaaacttaaaaaaaatgataagagaaacaataatatacctattatagttatttttatgaaaaactagaaatatatatgtataaaagtttataaatatctattttcttgtatttaattatggtatatatacgggaaaaaatcattaacacatcatggttctatatttttaataatcatttaaattaaatgaaaaataaaaataaaataattaaaattgatttatttgataaggtactattttataaaaagtttaaaaacatatataatatatacacttattcatgaaatatcattaaaattcaaaataggtgatttggtttgtttgcctgacttttaaaccttcattcaatagttcaaaaattgataaaatcccaaaaaatctagaaattttcttataaattaccacatcattttttttcgacttttcctcataattttctttccctcacattttccttcaaactttctaggaaccaaacatagcttatgatttgaaacctcaaggaaaaactagtttttcactgagtaatgaaaatgcactattctagaaaattactcaaacttgaaaacttttagtagattttagtgttttattgtgtatttatcgtactacagttgatggagaatgaagatttcgagttagcttgagcttgttatttgaaagttcatttttcttctcataacttagaaattggaaaaaaagaaaaaaccccattttaacttccttagaattaatctttgtaactattttaatatatcactttttagtgaatatatctcataaagtaaatttatgtatacagacatctaaatatgtgtataaaataagtattgatattgtcatattttgcagggagagtcctaggttatatttaaaaaagaatatgggaaatcctagccaggaggaattaaaaccttgattctgattccataaatttgcatggaaaatacctaagtaaaatttatgttaattatagtggagaaacttgtttatccaaacagttctgttaattgttgactctttctccataaagtttagtagtataatttgcagctccatttaattagttgactactattgtataagctgctcccagataaagaagatagatatgtaaagcaagtggctgtagtgcagacacttgccagccatatgagctattgatttggcagaatgtttatccaaacagttgtttttagccccatttattatttgactgattgttgcataagctgcaggtaactaaagaaggcaaatgtgcaaagcaaccagctatagtggagacgaatgaaaactccgtatgatgctgaaacatagtaccagatagctagcaaagtcggtgcctaatttcaaccaagcagcagaagacttaaaagtcattgatctttgtttgcatttttggcagccctttccttctcctccacgatttgctaagctgcagcttcaaagttgtcagcacacacatggaaataacttgggatttgttgttgaatttgttgcactccaccctagaaattgttttataaaaatgaccacattaccactccattagttgagctttttttctggcagtgttgcttccagattggacagcctacaacagggcgcttttgacttaaaatttccaatatcgtacatggttattgttgtagtatgtggttcatatttgaacgaaaagatgaatgaagaaaaaatgggcaaatgccgaagcaacaacatttgccatttaggcttgtatttcttttgttgtggggtgaatgataggttgggggttacggggagcaacgccccctacggtatggtccaagggtatttttggaatttttatttttaagggataatataaatactcttttatgtaaccctaatttgatacatagtgaaaatccttttctttattcctatggacataggcaattagtcgaaccatgttaaatctgcgtgttcttttttctcgttttactattatttttcactataaattgttgcacgaatttcaacagttgtgatgtacgaaactcatcatttaaagtcatctagctctatgtgacgaatgggtccagaaatcttttcaaatatctaaagataagctctttcgtcaaaacctttcttttttcttatgtattgttgatttccttcgtcttaaaaactagaagaaattattattattatttttctataaatagatcagcaatagagaggtggggggtggagagcaacaaagaagtagtggg

SEQ ID NO: 13734 - DNA, 12199 bp, Vitis vinifera
  Intron number 1 from transcript GSVIVT01000883001 (locus G SVIVG01000883001) derived from phytozome v7.0 (chr-ID chrU n; pos 3425023 to 3437221)
gcggaagagggagattgcaaccagggttctgccaggtacgcttcttgttcttttttatttatttatttttattattttggtattcacatttacattccactctagattctctggctgttttcgagaagttgttcttgctgattggagtggacattgagggccacttatttgcgttgttgaatcgaaattttccttcaagcttgctctgttacgattgtgtttttgatttctcttattcttttttataaatagctgaaacaaagacttatgtttgaactttaatgtttatggaatcttgatataattttaactaagcttgtcttagcgtgtttaaattcttcagagcccttttgaaaataatgaaatgtggcttatctgcttacccacctttatctcccttgctttgtttttcttggattatttttttcttctttgcttttgcatccatatttcttccctttctcctttggtgttctgggccatggagaccatgatggcatgagtatttcatgaaaggtagaaactttataaaggctgtatagaatgtgggccgtttgtggggtttggcacatgatagcagattgttgaatcaaattgggtatttcctcttcaaggcaagaaagtcgttaaactgggttcccgatgtgatttagttagatgcagaagttgcttcaatttttggggttctctgttcgtgatattctgggctggaatcctagcgggatcagtacaacacctcttctcactgctactgttgtttgtgttcctacagaagtgcacgctgaagatattgatgaagtcgagttcaaaatatctccaggtgagatcacagccgttatgaagtaggtttagaggaacccattgaaattgaaagatgaggaaccttcaggtttcagtgagtcattaattctagcattttaataattcaagatatgaatagacaactcagattgaaagctaaagcatattcttgcatttgaggatgaacctgatcctcagccaattattgatgttagatcattgatatattatggtaaatctcatgatggaaatgcacattacttcaggatcactctttttgttactgctattagatcctattacagtgaatcttgcttgcttcatggtgtgggatagatgctatctaagggggcagtataactggagtaaatgctgaagtgcacaggagtagtataacaggggcagttgcaactctgaaacagagaatgctgtttgtcatgaagatgaagcctttttttttggagaccttttctctgagggtggtcggtctgtaagatttatagatggatgtgatcaagcccctgctttagtcaatctgacttccaattactgcaatatgccaattcaagctgcttcagaagtattgggatttctaaaagactgtgccttttctctagaatggcacacctcagtttatgaggatggttgtaaaaagcttagtgggaagcacatggatattctgctttccatactcaattgtcagggtcgctattctgaagacaatttctgacagcattacaggtttacatgagcaaaggaagactggatatgtccatgaattttgttttgaattgctgcacaatcttctcacacgccatgctttgtttgattcacttgaagaatacttttttgggcaaatcattaatgttgatagtggttgcttcatttacaatgatctaaccctaactttgttagctcactttctcacttgtagagtaggttcggctggtagccaattgaaaaacaacattttacaaggaagatatagatttcattgttgagaagacaaaagctctctattcaaaatgtccaagcctcaaggaaccttttttgggactcttccctctatgtttcacattgagattctccttatggcatgccatttatctacaaaagttgaaaacataatgaatgcatagaaccccttgtattgttgatgcaatctgatagcatcatagccatagaatcaggtatttatgcttttgaaggattattggatggtgaataactagtggagcttgcaacaacttgtgatattgtggatcttattgttagcttggcttctggatcaaaccattagctcactgagatttgcatctgtgctcgcacaaagctggggaaggatcgaactcccctcaagctagacactggtcaaagctagtattattgataattgtcttcagctactccctgttgcacccggttcattatgcttttcaattagagaactgttatgcaccctaacatatagcagtataatttctaaaggctcagctgctgcaagaattgtggaaccctcctttttatggttttgcttcgtccagatttcagtatgtggggacagcatagtgctttgcaaattcttgtaaatattttggagagatcataaagccttgcaacactaaaaattactcctagccaagtcattgaatcactgatttcatttttttagaacccatatctcaagcaatccagcagctaggcacagagttactatctcatcttcttgcaccggaacattttcagcaggatattacaacaaaaaaaaaaaaaatgcagttgtaccactcgttcagctcgcaagaattggaatattgaacctagcagacaacaatcaaggcaacagagaacatctctataagctggccaaaggcaattgcaaatatttaacagttgtcacacccatagcagttgattacaatgtctaaaaaatgattttgatcgcctatctattggagaacaatcagaaccaatgcagcatggtcaatgacattctcaatcacaaggcaggcctgcatatcaggcaacttgttgcatgaatcagcatgtccaagagaagttccgtcagtcagagcagaggacagagatattcaatggtggtagggaatgtcgaaccaatatcttcgactctaggtacacaattgtcaatgcagtttccagccaagtctcctaattataagtcttatcatctcaaggagaattacagaactctcctcttacaaggacaactgaactctgaatcgcacttatcaaaacaattcggcaatgttaaagagatggctaaagaactggatacacttttgcaatgtataaaagggccaggtggtttcagggatgcctgcaccatattccagagaagttcagttatagaattagagtaaggcataggcacaggcaccctttctgaaaaactgctgaatgtggtggagcataattgatcaatagcatggggagtttcatcatctgcttgataagacagtgcaagttttggcaaggaaagcatacatgcagggaattgataagcaagccactgatagcagaatattgggacctctagagtcggtagaagttgacttctgaactagaactgaagcgatgaaatatattaaaaataaactaggatctgacaaatcagctgatttaatcagagaaggctgtggatccctttgacatattttctgagaatttgagccatccagacaagggtatttgtgttttaactctgagaattttgtgtcactatgaacctctgaatggtgaaacaaatgttcagccagttgagaagaaaacgcaaactgaagtttctcctacttcttatgcagaaatacagcgcaataatgttcttcacatcctcttctccattgaagatacacctctttcaatttctaccagtaggaaagtcagtctatccatctctaaaatacagagggacctctctactgctaggatttgtgaagcatatataccagttcttttgaatgggattattggcattatccataaccgatttagttatttataggatctattgcaagcaagggaattcattgataacttgctcccctttttatgaaagaaagctcagaattctgatgcatgtgtggaagctttgcaagttactcgagatattatacaagtttcagggagtgaaacttctccaaaaagatttcgaatgctgtttcttctcttctaatttccgctaggactggatatgcgtttggctatttgtgatcttcttggtgttcttgttgaaaccgacccttcgatactctgtggtaaatcttataagtgaattgaatgcgacccctgttatggaaatgggtggcctagattatgacaccatagttcatgcttatgaaaagattagcatggagttcttttatatactatcccagagaatcaggcactggttattttgtcgcattgtgtatatgatatgtcatccaatgaactgaccttaaggcacagtgcatataggttattggtttctttgttgaattctccgtccaaactctttagacttgaagtgaagagtgactgcgaaatgtctgaagcaatagtaacatccatagctgatggttatttggactgaagcatgcattcagcgcatgataaaaaaattccttttggaactggcagtatgttgggcatagagtttgctaagagaggttctgaaactgttgaggtggctctctatatttgattgaatgcgagacatcataagaatgctgtaggggagaagaatgctgcaagtctgggttgatgggcaactttaatgatggacaatatgaagttgctgcacaacttcattctcaagctcagcagatttgtgttgttctatatcctaaagatgctgcagaaagtggaaagcttttgtgattgaagcaatttttttctatgcagtgcctcacttcaggacattacttccagattcaaggagaggaaatatgggggcttatggcaatggtctgaatttcccaacaagatagcagtacagtcgaatgatacacatcctacccttgcaattccagaattgacgcgattactgatgaacgatgaaggacttggatgggatgaagcttgggatatgacatcaaaggtcatttgtatatctcatatggaaattgagcttttgtgttctggagatcatgtcccaggtttgagaacctgctcaggttggcatgcgaagatcaccaatcaaatacataattggcctttgctcctaaatctagcaaaaagaaagaaatatttagcatttgttcagttcgatggtggcaaagtctttgaatatatcagatttagccatcatgggaggagctctaaaaactgaggatatgattcttcaaccttcagtactccagttatcagaaatggcagcctggagcttgcagttggctcatcagaaatgggagtgctagctccggcaacctggccatttgcaatggagatgctgccttgtattagaagccgatgtcacctccagcatcaccaattccttcccatgtccacctgtcactccagaatgaccaactgaatgaacttgtggtgaaaaatcagcaaaagtcagcaagtttcagctgattatataccaatgctcaaaacgatcactcctgtagcccaactgacaaccaagaacctgtaattgggcgatttaaatgtcatatcaaggatcgtgagcgcacgaaatgctgatccacaccaaagagatagcaaaataatgcttatgttcccataacacgttcccataacacatccatacagttggaataggccaaacggtcactcaaccgctaactattcgggaagatcttgacagctccaaaagacatcagtaatgagcagatcatccaactttgcgccctccatgtggtggacctagttcatagaacagagaagagagaagaagccttcaagaggaataagaggatagtggagcttggtgtcttcttggtagccactctcgaaagtccagtaatgcaggatccatcagaaagtctctagcttactgcccatttgccttcacacacgcgaaacaggctgctgaatcctattgactgagggttaattcctgattgtgggtaatttgatacgcctgaagaatgaagagttatttgggaaattggacatcaaaaatcaattaagacgggatgcattcagttgaagaaattttactgtgagcaagttgacaatagaaacagaattcaggatttcaactggacaacgggtaactggttacgtgtataaagtggaaaataaatggatctggttaaggatatcgcgtcatattaaggctcaactatttctacttgatacgtcatgtgaacctaataaacttcaagaattccagaagcactgtggagtaggaaaagctgtttctggttatgttttaaatgtcaataagaagctttaagacatgccaataaaccgccaaggtgcctagtgaaggttgtgacctatatctagatgattttgggatgcccagttgcaacttctgaacacagggaccttttcgaagagaaaacaacaacaaatttcagcaacaacctcatcagtttcaacagcagttcgttccacgtcaacatcaacagaagccatcagaatcaattccagcagatctattctgaagaccattctagagcacactaccattttcctcttgcaccctcctgttttcctcgtgcttttacgtgttttgaattgtgttttcaaaatcgttttcatccaaataaccctaactttagagaattatccccaaactctctttaggcataatatccagattttaacataccatttgctgtcattttcccttccggcatgcattttcatcattttcaattattttcatgattgtctcgattttcaacaagcatgaacaagcttcatgattccaaacaatggaattcatagaatcaactcatgcgaaattaattagggctttggtgggggcccgacattcatgatattttcctcaatattgtttgtttgactgtgcttcctctatgtggatacatgagattgttttacacttattattgagctaaccttatttctcattttagcgcacagtttgctatccaagtatgctctctaccaccacacttttcgaaatttcatgaatatgcatgtcattaccctcgtttggtgtcatacttgattgttttgacatttgtttgattgtttgatcatatttgatgaagatgcatgttgtgtgatatatcatctaaactaatccattgatgttttataatagcgcctaagaagtggtttaggtacacaccctaactctcctttattgtgactgatttccttatttagcatgttattttctgaaatcacctagcttacttaggtatctacaattaatcaattaattgccacatttcccccaatttagtcaataaagacctctttagggcttagaggggtgctacctcctaaaggtaccttcctaataagtaaactgatccctggacctacactcaggtttttcaaagtcatgcttttttccaaaaattatggagtcacattttagggtttttttattttccctttaaaataaaaataaaataagtggcgattccgacttttttccaaaattaattttttcatcaataaaaagcgagtctcgccaatcgagtggggacgcacgtgaaaaatactggtctacaatcactttttatatacctttttcaaaactcctctcatcaaacatagatttgtgggtcggtcgcctatctcatctatgccattccctttgggcaatcgatagatatcgcctaggttatcttttacatcatggctacatattgttagtcgtctcatcttggaagccttcctttcattctggttatctcccacatcctagttgatctagttttgagattgattagtagctaggtatgttggactgtatgctctcatcagcaagagttcatggtctaagcatgttagccatatgtttgcctcgattgctttgaaggttgtttaggagaaggaggagatctatgtgatggagtaggatccacatgtcgagttgagtgatgagcacctaaaacccatacctagagggtgtaataatcatgagagagcaagctcttcatgatcatcattcggcccttggtccttgtttgtgacgagtttaagcttttataattgatagattctattaactagcttcacttgtggatagatgcatcaagtactcatgtggacacacaccatcacaagtttatgaagcatatagatgcttgcttttaaggtctcaatccttgccttatggttgatgtctcagagtgctttcgactccgtaaacttcatctaatttggagttttggttgttctatgcttatgtgaattagttcctttttgcactaaagtctccttagctcagtttatcctatatttgttggtctggatgtactttttttatcctttgtatctaaaaccttttgatcatatttagatataaatttacatccattattttttttccctgttttttttttcttgctttatcattctctttgtcatttttatgacaaaaaggaggaagattgttattgattggttggttgattgcttgttagatatccattgtatgcatgactcacattcatttaccctttcactcttatcataatttgatagaattaatgagttatatatattttttcgacacattactttacttgggtattttgtttgttggtgtgtgcaagttacaagtattgaggtattgctcacctttggatgtggtttatcatcatttgcatgttagaaaatgaactggtttagacgagacttattgagagatttgttaactttatttgagagtactagggggaggggggcttatgtaatctatattttgtcacaaaattgccaaagagggagattgttggtatgttagcttatgtggtttaatattggcaattttttcccatttattttaacattagaactttctctagattgtgtcttgctttccatttgagactcgaggttgttgctggatcaattgggattacataggtaaatagagaaaggctcgggaaaggcaaattggtgtttggtaaggcatggtgtagataaaatttttttaaaactaagtgaatttttttttaaagtgttttgaaaatccctggaaagagtgttcaagcgctcctaagagcactcagtgctcaaagggtgcttgagcatttgtgatagaattctctagaattttggagatatgtcttttctgtgtttaaaagttctattttttgaattttttagatttggtctattatattcctaggcctatatataccttgcataaacaagtttttgatgggatgctctgagttgaaaaaaacctaatttttcttcttgtccttaaactcttaaagaagcttgtagttgcttttgctgtgttgtgaaagagatttgtatccccttaagcattaaggtgagatcttctaaaagcacatgaggtgttgtgtggcggatgaaagtggattttaggtaccaaggagtaagttttaggagtagcttttgctaggtaaaattgtgtactatactttcacatattggattgtcaatttgaggtctttgaccccttggtttttacatccacacatttgtgtggatggtttctatgtaaaaaggtttgcctcttgtgtgttggttactttttaagtatctctaatctaaaaagtgatagttaatcatttaagttttttatttttgggctaaaaagggttcaaacactgattcatcccctttaggtgttatccatactagatcatataactttcaagagatcataattaagtaaattacaagtgagcttgattctcctatcaatacccaaataaacttgagtaaattaatagctacaaaattagcatacaagtaaaacggtcatttagaccatgtaatataggttgattatccaagaagaacattccatgagactcttttttaataaatcaagggatctttaatttgatgattctcatgggatattttttaacatattaagctaaaatcataggtcatcccattcaattccttctagtaaatgatgttatgaatcttatacctattattatatcatatttaataatttttgtagtatcaggtttcaccattgaagcaaatttcataattttagaaaatactaaattttcactcaatctatgtaaacttaataaacaccaaaaattcctttattaaatgcatttcataatttacataatgtcaatacacataacacaagaagttgaatattaattaattaaaacttccacaaatttaaaagaccacacacaaaaacaacacacattttaacaaggatataataaggagtagaataaaatgcattgacaattagctcatgtctatgaataaaaaagagaatgaagaacgatagtgctctcaaatgagggaaaaatcattagaaatttctctaataggagcaacatttgtagtttatctcaaatgaaggaaactataaggcaaatccaatgttcctaaaaagaatgaagatgataagaaccaaagggagtaatatcatttcaatataaatgaatataaaacttagaggcaatgtctataacatatattttgaataaaaaaggcaatgtctataccttcatcctaattttggactacacacttaaaggaaagacaataataaaattattaaatcaaacacaatcatttgggaagttccttagtacaaaatgataaagtaaaagaagtttgatcacaatcgatattcattttactcattatataatatatccatgtgtctatgttttattagttatgaaattaaatatcattttgatcaaatgacgatgattatacattcaaaaaacatttgagatccccaaaataaaaggattagttattttctaagaggaaactaaaaactcattgaagaaaagagaagcgcaaagaagaagcacaaaaagtctagcaaaacaacattagatatatggataaaagtaagcattacgtaaaatatggcagacccctcaacttcatttattacaagggaagtgggcatatcaacttaagttttggtagaacaacctcagcactatcacaacacaaaattgaaggcttcttctcatatatatatgttaaatcaaatttcatcctcaaacttggttatattttcaactacaatactagactcttgatttctttctttggtttatccattcttaaagaccgtctagttgtggataaaaagtcaacattgtcgaatgacaatgatcactaaggtagtgtttgtttttttttttttttggctttttgttgaaatcaatttgtttttagaatttaagttgtttgtttttctactttttcatgtcttattataaactttttactaaatagaaaaaaccaaaatatgtagctttttctaaatagaaaaaataatatattggtttatttttttactttttaatacttaataaaaataaatactacaaaaacaaataacctaatatttgatactattaagcattaaggttctatttagaattaagtaaaaagacaaatgccacctaagacaacaactaacaataaataaaacgataatagccaaaaaccaaacaataaactaattgtatagagtttggttttatttagatgtcctaattgctcataattacctataaaaaaagttttagcactcaaataacatcaaatttattgagaatcctatatacatatatatcatttcattaacgttgatatgatatttcataatttatataacttcattagtaatccaattttgaatttactttttttttcttttgctttaacttctttgattttcttgacaagaaataatattacctttaaaaatctaaagatagaaaattaaaaaataaaagaaatttgagatttgaagtataggaaatttttagaaaatctaatagttatgtgaactgaaatatatatgcttttaataataaatacttttatgtcataccatatttgtcaccgactatatatgtaatttgtgatatagaatagttgatctaaaataagtaaccaaagataaaattaaaaaaattactattttttgtggccaagtcttatcgttataataaaataaataaatactttcatgacaaagaattttattataaaaaagtaaatacttttataattttaaaattttattttttgtgatggaacattattgccgaaaattattcatcattaaaaaaattatgacaaaatatatatatatgtgtgtgtgccaagagttattcatcattaaaaaaattatgacgaaatatatataattcttttcttattcatagtttaatataatccttggctttattttgtagacaaggcatcagggatcttcattcttgcccgatct

SEQ ID NO: 13735 - DNA, 4726 bp, Vitis vinifera
  Intron number 4 from transcript GSVIVT01021781001 (locus G SVIVG01021781001) derived from phytozome v7.0 (chr-ID chr1 4; pos 7487129 to 7491854 reverse strand)
tgtttgcatcaattggcagttttttaggccttgaggtaaacaatgccccttttttttccccttacctaaagaagtttcatggattgaactttgcagtttggcttaaaatgttcttatttattagtggtctgcagcaggggagggcacattggaaattcagaaatgttttgatgtcattattccttggcataacttgtagaagacttaggggttgtttgctaatcaatgttaagtcctaaaaactaagaaagtaagcggtctttgtaatttagtgcatctaataatgtaaagcagttacaaagtaaaactaattctcctacagctgactcgaaattttcagagacttgacttaatttaagcatagtaatgattggtggtttttaatgtttcataacttttagatgctaattttacccttttcttaaaccaagccctgttagtcctcaggtctttcacacattgaatctcactggtaacaggcatctccatgctctactgactattattcacttttcgattttgatggtgctaaagagttgtcttatcttgagaaaacagtttgattacagggaattatcatctctatctcttttgtgttcttttttataggtccaggttctgtgttaaaaggctgctctagcctctattgatttatttgctaagctaaggatattctcaaagactgaattttctttgtcatgtaaatgagagtggttccaatgtcacaattttcttctcatatctctgtttgattcatctgtaattaggtctgcacagaaagtggctgttatagtggaatgatgaaaccctttccaataggcaacaatgatatattaaaggtgccatgaagggtgaaacaaataaaggaactccaaaaaaaatacaaataaaggaaaaaagcagccacaaacatgatctaagctgactacagccaatcaatgggatccaagccttagagcacataaataaagagttcatgcatagagcttttaaacttagaattgaatgttccatggagaatcctccccccacgccacttggcaagtgaagaaatccaccttacaaggcacacaagattcccacgccaagaaaaaggagaaatgctcctagaggagagcaccttgaagaaggatttactgaaaaacatccttgctagagcaattctagaataaagagtcctccatatcctatctgatgttgtaattgtggatagtgactaagaaggttggtacgagcttgagttcctaattataaaaatttatagcaaaacttgaattccaatgcccacacactaataagattcctatccacatcgaggagaagaactaggaataggaacttaagcgctcatttcccacacacatcagagtggaagatggtcctctgaggggaccaaaatggcagttgatctatggaagacattccaccccttcttgatagcagcccatggccccttgcatctaggacccctacctccttacagctccacctctctctaatgatgaaatctccacacccttctgtacatagatttcttcatgaaggatagatagtcataaattttatggagataatactatttagagaattttttaaaatgtcatcatagggtgtatgggaaaatttataaacaggtttaagaatttaagttttacttatcaaatggttttaattgtatttagacttaaatttccgttggtgcaaccattcatcaaaacctctatgatattctccttatttacctaatataagactatcatagaatccccctctactagaaaggttggataaacccttagccttagcaagctttaggccttcgaacaaggctaaaagccctgcatcatttttttattttatttttgataggcaaaagagcagtatggattaaggagccaaaaaaggccacacaaaacatacagtaagtatgcatttgcgccgaaaagctctaccttaatgggtagacccactcctatatttcttgaggatgctcttattgatatttcatgcatggctcaacgttgtgttattagttattgacttggagggttccaaggcacatcagtcttggtgtcttggtttggtatcgggtgatacacataataagatagattaagaagttaaaaaatttataaaaatattatgaaaattgttttaaaaaataaatataattaaataaactttagaaatcgataaacttaaagacatactaatataataataaagggaatggtttcaatgtattattaacaataagttagcatataaaataatacaccatatatgatatatatatatatatatatatatgatacaattaccatatgaaataatgcattaaccaaattgaagcaattcaaaccatagcttagtatataaaataataatcttcaaattcccattcatgacacacatgaccatttgtagtcataaatcatttttatataaaataatacatttaccccttttatcttcaaattctcaatcccacaccacaaatagaaagcatacctagttcggtagaggtagagaacctcctttgaagtccatgcccacaccacaccagtgacatcacgaagccagagcaaagagggagccaacatgctgaggtcatttttgatggaagaatttgatgtttctcattggttagacaatcaccacagcaatgtgttgacaggaagggatgtcttctttcttcatggtttaggtcatggattttaaaactcttccttttgaagaaaatctttgattttttagagatctctcaattttgattactccttgtgatttgaaaggggaaaaaatgattcttgggtaaaacaagggaatgcttggataacttagatgattcaaccaacttaacttggaatctcgaccagtcaatctagtttaatcaattcttagccgagtttatgattaagatggtattgggtatcagacttgtcacggaaagatccgaggtggatacaactcagctgagttgtgctacattgggtcgattctttgaaccttgattccatgatgctccatgaaccttccccccaattcataactcttctgcgtcacccatgcaacccatcaaaattcaacttgatgcttcccattaaaggagcatccatgtggggagtatcttaaccaaccttgctgatatgcacactaggttcaagactagcactgcagtcatgcaataggcaaattgcctaggtcaccacccaatgtaattgcatatatagtatgttattaacaacatcatatggcactatcataaaaacctaaaatcactaattataattatgtcctgggggaacctaatatggctaccgaacgaatgctagttgtttctcctagtatgcataatggaagattctctgtgcagatatactataaggctctgaacttggatggtagaatctcttttccatgtagatagatctggtgatcacttgctgctccaattttttttcttttatttattttttacttggtagcaatttgggagaggattcttttcttcttctttcctttttgataggtaacttggagaattttcttactttgcatttagcaaaaagaaaagatattagcaaattggtgttgtttgtgtaagcaagatgatgaatcagccatgtacttatctgcaaggggtgagaaggattttgtggtccttttggttttcaagttttggtattccatgggtggtttctaagtcaactgtggatggtggatacatcaaacagttggaaggggagtttttttgtaaggagacaaataaagatggcatgcaactctactgtacttgttttggtatactaggacatggtagaagaatttttttatagtatagaccagtatgaattgaaggtaaaaattgtttttttgtactcgttttttgtggggactgatagttctatggagatgaaggcttttctttctagattttattgatgatgtaagttttccttaaggtgtaaggagtcttctttttgtttgagaggacccttgtatgcatcccttctacataggttgcattcgcccctttttggtgctcattttgtaatatttttgttgaaggggaaacatgtaccgggcattaaaatccaccacaaatactaagctattagaattaacttaagaataaatagaatacttgtaatgtggtagaacaagaaagccattttagcattcactttaccagccctaaaagttatctggatgggttagaacagtttcatgtttaagcactatgtaatgatcatcacatttgttacaagaatctcagaggaaggagaaagggagagaggggagatacagcagggaaaaaactgaaaacagccaaggctgtagctacacctaagatgcatttgtattaagaacagtgttgaacttgcagattgtggtttgtagcatggaaataattgtaaataggagtctccttgttacatattcttaagtgcttcatattttcagttctagatgggattttgccaattttcaagttagataaattttttctgccatatatatctttgtgtcgtttccaatcaaaaaaaaaataaataaataaattttttctgccatgaacttagatttagcaaactattcttgtaaattggaactgatcaaatcaagttatctgtttaaaattgtgcagtgttgcctttgtatgagaagagcagactgtcttttatagaatcataacaaagcaggattttatttttgcaggtgt

SEQ ID NO: 13736 - DNA, 3559 bp, Vitis vinifera
  Intron number 1 from transcript GSVIVT01020785001 (locus G SVIVG01020785001) derived from phytozome v7.0 (chr-ID chr1 2; pos 2029205 to 2032763 reverse strand)
gcagccttctgcttgcaaactaccaaggtaaccctttttatctctctattcttcctcaatgagttgttttttcttggtatttatttttaaatattttgtgttggtatacaaaactaaaaattaaaaaaaacaaaaaacaaattcagatgttgagagtggataattttacatatttaatattatggacaaatgattacataaacttaagataaaatagtatatctaaattattcttcttctcttcaaagtagaggagaaataagaggcatacaaaatagctaaaaagataatataaaaagggaaacgcaaagttgagatattaattttaatttacaaattaatcttctttttttgataatgagaattttttactttaatatgagaaaataatagaattataaaaattataaggttatttgattaaatggaccattgaaaacccaattttgagaatccaacgggtcatcattttttagtcttattttaacaaaaatactcttattttttccttataaaaataatatttaaaaaaaatatttatatgtaaatatttgaattaattaaagatatttatataaaaaaatgagttattttttaaataaaaatatgaaagaggttaaattcatatacctagttataattatagtgctactattttaacctctggactagaagaataatataatttgtcgtaatagcaaaagatgccttttttttttgttattattttaggtttgacatactatgtggcctctatgtcattatttatattatggtaggggaccatacaaaattaaaataggaccatgaatctttttataattataaaattatgctaggtagatcataattagtgatcgaaattgcatgaatagtctaagatgtaattagtcaaatactttttaatttaaggttctaaaaaaatattaaagaaagaaaaaaaatgttaagaataatgattttctcatatttggttcactataaaaaatatgaaacaaattaaataaaatataattaagattagtaaaaatttatctattttaaaatagagaaaagtaagtgaaaataatttaaataagcatataaaaataatttattgaatttaaatatagtttttatttttcctagctttttatttttttccctcctattttcttggtaatcaaacataacctaaaattttccattccttttctttctggctttttttaatacattaaaatgtattttattttttacattatatctttttcttggctgagaatacacatatcaagtacaccaaccagttaaactactataaatgggattaagtgccaccaacatgtcatttacacaaggaattaatacatgctttaaaaacacaatgatttaatcacaaatatgttagcatgtcaatttctaaaacttatattaattaattttaatacatgcttcaaaaatttaatgatttaatataatccgttagcatgtcaatgtctaacttgcatttctttcatttatctcttaagggtcaagtcatttgaatataaaggagattgtgatatcaattgagttgactcattttaagcaagaaggaaaaaaaaaaaatccaaatattaaaaacaataaagataagaagaaagattggtttgtcacaatattagtgtttttcttttacaagaggtatgcctgaatttagaatttggaatttgctttgttgaaattttataaagaatgtacatatttcttaagttcttagatttttctttaggaaatgccaagaaaataataataaattaatgaactaaattattaatgaaaaaaaacattgatgtggtaaaaaaatatatcaactttagtttaaggtaggattaaagctaatttttacatatgaattatatatcggattatcatccatatttttactagcattctaaaattaactatatggttgtcaaacttattttcattagaaatgattttttacaaatgtttcttgaggggaaaaatgaaaagcgatcactcaagttcttttaatatttttttatttacaaattttcatctttaaaagaaatcggtttcgtggagtcaatagcataacttataaaatatactaaaaataaaaagcaaagctcaaagtctcagtgattctttttttaatagaaaaaaattaaaatatttaattttttatttaattaaaaataatttattgatatcaatcaatataattaaagtgagtctattgataataaatttactttaattatattgattgatattaatagattattttttaagtaaatagaaaaaactaaataatttattttttttattcaattaaaaaacaaatacatcttgatattcatgaacccttaaaaaaagtattttatagcttttttgttccgtgtagaagtttgcttaaactctctgagttgataaatgctagctccaaagtcgctttcatggacaaagtttttacattctgcatgtaacgtgacttgaatattgcagactcctaaggttgaaggaaaatgatattctgtgtgtgtggaccttttcagttggaaactcacactcatgacatcgacttcataccaaacattgtttaaaaaatctcatgtccaagtttatctagcctctattttcttatcctctctctctctctctctctctctctctctctctatacatatataaagtttaattatttgatttgtattttctttgacttattacaataattttgtttggtgcagcttttttattattatttataatgttattttattttataattatcgtaatgatattttataatatgtttggctgctgcactaaagtatgaagtagaaggaagagatttataatttgtcaacttttttcatatctcattaatataggtaggaccccttctagaatgtccttttcaaaatatttacaatttaatttcatgtgttgctagatagcagtatcttctctgcacaatttttaaacaaaagtttgaataaagttatgataatataaatcaatgacaaaattttatataaatgaataataacaagattaagcatataaagttttaatagagaggtagttgatgaattaatttaatgatttaatataatttaatgacttgatttaaattattatacatattaaatatgttatcaaaataacttaacaatattttgggatgacaacggggtaggtttattgggtaagtgtctcaccttgcatctaataagacgagtttcaagtttaaataaatggttttgggatgagcttggaaattgtttttaaaatctaagatgggttcaggtattgtcttgttccgtcctaatctatcttgtcctgcccccatctcgattatatataaaattaattttaaatattaatttaatttaatttgtattttcatatttttaatatatatagataatagcataaataataaaaaaactttttaataaaataagttataaaaatttaattatttttaaaataattagatttattaacgtttggttttattgataatgtagatttagtggtcaagatttcttggagaaattaagag

SEQ ID NO: 13737 - DNA, 1689 bp, Vitis vinifera
  Intron number 1 from transcript GSVIVT01037526001 (locus G SVIVG01037526001) derived from phytozome v7.0 (chr-ID chr6 ; pos 12236467 to 12238155)
ccgccattgccctctctctatttctgggactcaaggtatgtttctcttctacagttttctggggttcattgaatgtatatgggtttggattttgaaattggtttttgcttcaaatgcataatgggttcagcatatctcgaccaatttttttgaatgatgtaaactgaaggaaatataattcacacttgtgccaaggaaatggtgggtccagttggttgggcgtttgtttcgaattcatactggaatagtatttcgagggagcttcttttgggttcctttgttgaaattggtgtcacggtatttctattctttgttccaaacaaggactttggtgcgtttggaaccctgtaaaatgagagtggttatgtggtttgggttgtacctgatctctgtattacggtaatggatgtctgtttgattcattcctttgggaaggcattttgtaaaagactggtggttttcgataatatattttctgagttgagaggttctctacttgttcttgtttgggtgtctttggatacaggttttatggcttttggatgaatccatattgtttatgatgtagagaatttccattccaaacttccagactctgttttgggatgactatttgatgcagttcttttattttccatgtctttttcttctaccattttcttcctagtagaggcccatgtttttgtaatctctagtttttagtagagtttggtgattgttttcatggatggaacgagttatatatatatatatcatacggctcctccattatgtgcataatgagaataatacatggaatccaaaaaaaatggaaatattctcattataaactgggctggactagtgtttttacaagaaatctctagccaaccttcctgcaaaagatcttttcttaacatcaagtgtgttcgtgttggtactatactagatagaaagggtaactcgaacaatttctttgtcctcaatgccccggaatttccaagaattagtcacttcaacaggcttcgatggttatatagttatccaaagtacgaatgagatggatggttgttgtctcaaccattcttgggcaatttggcaaagaaaaaattactcgaataaagggcaagattaagacagatacagatcaaactaaagatattaagacatatatatatattaatttatccatgaaatgttagtagtttaaggtgaaaggaaggagagacaaagaaagagaaaatgtgtggaatggtgcagggtccagggagtgttggcagccttagtcataatttttgaaaataggaaaattttgtgatatattttcctcattaagataaaacaactaggaagaatgggatcataatcaataatcataccatgtgatctattttgtggtgtaatgatcttgcttggaggttcaaatgactggttaagatgggattaaaaacattggccatgtctagtttataatggatttggaagcttgaaaaatatttaatgtgttcaacaaattaatggtttcaaaatattatgttgttcgcgcagaaatttcttttcttttctcaagaaaacttttccctggaaaagttttttgttgaaactagtagattctttattttggaagcttttgttctattgtggtttttgatcaataattggtgggattttgcagggagatcctgttccttgtgagcggtgtgctggaaa

SEQ ID NO: 13738 - DNA, 2561 bp, Vitis vinifera
  Intron number 9 from transcript GSVIVT01018883001 (locus G SVIVG01018883001) derived from phytozome v7.0 (chr-ID chr4 ; pos 19002916 to 19005476)
tcggactgcagttacagaactgaatctcaaataaggtaagtttatcaactgagctcttcatgcactctgttttcctttttcttttttcttttctttcttttctttctttttttttttcccctttttctttcttatcaaaaacaaatctactctgttttccttgaactatcataattacagagttcactcattgaatttgttcccaatctgataagaaaactcatgaatgatgtgatgtgaaggaatattatctccattgataattttgtcatgataaaagcttcctttgttctatatctgatatgctgtaagtctagactgttagacattatttgagttaggttgtaatcccatttatatattatttctctggctgttcacttctaatcggctattgaattctagtttcataaagtggaaatattatgtctaatactatttttacacggactacttggattgcacccccttttttttctaggccatataagatggtatcccttttgactattggaaagcaagaaaaaaaatactatgttacttggatatgacacaatgaaagaaaaaccaattagaagcaaaagttaacatatccttgattttaaaaaataaaaaataaaaaactttctgctctccttggctgaagttttttttttttttgatagataaaaggatgtattttaaacaagaagaggaagcaccaaaaacagtgcccttaaagtatagggagtatacaaaaacagcccaaagtcgcaatccaagggggaaaagatagaaacacaccaccttcccttacttagagcctaaccaatctaagaaacttacaaaactatagacaccctaaccgaagactaaatattacatacaaaagaatatttcagtttttgaagcgaaagctcctcatccccaaaagctaacaaattcctttcctttcagactgaccaaaatatacataagggggccaattgccgttggctgaagttgggtgatgcaaaagaagagtatcacacccttgatttaaatccaaatggttaacatcagaagcaaaatgagagtattcaatgaggatcctatactcacatttttgtcctatcgtatcaactcaagtttgttgggtgaagttgaagagtccgggtaacacaggatttgggtaaagggcatacctaaaacctttattcgaatctcttaagaacatgaatttgaaaaatacttggaaattacattttgtttagtcaatattacttaaccaagctaaataagataatcaaatcattattccttgtcatatcagtagtttcaaactgggaatttgaactaattcttatctcttgaagaaaatggtgtttatgttgaccttcattcggttgaacaaagtgtgaactgatgatgatgccacaaatctcttctaggttatggattatttagcaaataattcttgcaacctatgctgggttaagaagatggggaacaaatcttatattttagaagcgtttatcttcatatctcacttaatgaggcttattttagtttatctgatgggtattctataatgtgtcctgtatcaatgatatttttgaaatcatctcattgtgatgagtagattgcctctttcacttaacatttttgtattgtagagatcatgaggaagtaatgggacattaaacacatgactgattgctgttgaagtgttcagttccccatgcatgatgtctttcttccatcgaacttttaatgttgtcagagtgtgggaattgagattggtgtcacactaactgcagggatgaagtattttgtgtactaggaaccccaaagctttaggagatttgtgttggagtcaccaactagttcagtttggctgggttttgtcagttataatctaggttgggatgaaaacttcccagaccaaactctactattaaggggtaaccaataccaagaaatttgttcacaaaaaggttaaagaaacatacaaaatgttctatatatttttacataagaaactaattaactgggctgggttcaagtggattgccttttggaagcctatatattagaatataaaagataaataaaagaaaaagaaaagttgattgccttttggaaactagcttagacataacttgtttataatctgtttcaacttgtaagctggcccatttagcagaacattgatcctaaacctgtttcttggcacactggaaatttcgtgtcagatttgcccaactctggttgtccaaagatggtggatttgtattctttggagccagaagaaatcaatccataaaaatatatgcttggaagaatgcttacaaatattttaattggggatatcaaattttgtgcagtacatgtaatatctcattaaaatactactagaaatatgtccgacatgaccaaagagccacaagtaattatcacatgcggtataccatgatttgcatatttacgttcattttttcaccaagtccattgaagattcacctaaaatgatttccttacctcccacctgccctcttcttttgtgatatgtgctgctgtctaacaaacaaatttgatgcagg

SEQ ID NO: 13739 - DNA, 2107 bp, Vitis vinifera
  Intron number 3 from transcript GSVIVT01025634001 (locus G SVIVG01025634001) derived from phytozome v7.0 (chr-ID chr8 ; pos 13445924 to 13448030)
acaaggagggaagcagctcttattcttggaatcaggtaccttgatattttctactgacatatgagtttgattacttttttattttttattttttatgagacccaaaacttggggtaccgaccatacctgcaacaaccactattttctatgataaaactgataatacaagttttgttcttttcctgtgttaggtggccacgacatcttgcatttttaagtggtaatgaataagagaattatgttggcattggtagaattatgaaacacttgtgacaaagttctaccttttggacgttgcatgcttgttatttatatttatttgtctgtcagcagcctaatacaaaacttgatgttatatttttttatttttttggtcagaaaacttgatgttaaatttattggaaaatagagtaaaaataagaggcttggtgttagaaaatgttaagattactacagcaaggggatgaggataggtcttcctataaagaaaggataatgctaggcctattaatatgttgctacaaaaaggactgaacagtgcaagttgcatattgggttggagggtcaattgattatagccatctacagccatggcctattaaattctctgaaacatctcaaccatgagttatgccaagcatcttatgttcctaaaagtcaagttggtttgggttttgcttggtttgttaatgatttgaaaaaatcaaattaatttttgggatgagctctttctttgggggggagtagtatatgaaatttctgaatgatgagtgggatgcacagggtgtggttctttcaaaaaaatctttcagggtgagagttctgtttagctataggttctggttttatgtttttgatctaggaatctataaaacaagacgtttcaaaactatgaatatatcaatatcttcttttaaaagactggaaaagactccaaggtattccccctgtatttctctcatatgcatctacatctaacaatgcggttttcttacacttaacagagacacctgtaaaaatgaagaggttgtaaagacgaacctcctttagtagagccatttcgttaactggttgcatttagttacttagattcagccaaaatgtaattttgttggtcaggtaggttcctgaacttgatcaatctgaaaaccaacttgatttgtattgtcaagagcaggatgcaccatgatttgatctctagcaaatgcccatcatcatgaggatgtaactaagtcactggaagtttctttacttttgattattaacgctaaatattcttaataaattgctctaaaaaatttctattttcagtttgggtgggtttgacttaaactcaacccattactggtttttgattgttctgcatgtatttactggggatatgtgtagaaggtcaaagatgataatttccattctctatgtttgacttgtaaaactctacaatatgagatacatgtctgcttctacagagtagtattgtcgtgattaagaagctgccattttgttggagaggaatatggccaggcaatatctactagaaaaactaatgaagctagaaatatattttttgatcccacattgactccattgaaccttcctgctggttggaatgaaggccaggaatggaagggcctaacttgatttgcttctaaacatgaagcacatctcctggatgagtgagtgagatctctggagttagtaccacagatttgaattcaagtcagcagagcttgaaaatgtttttcatcttcttgcttatcaatgaaatgatgttctaaggatgcagaatgtattctttacttgagttgctacatattgcttagtcactgccactggtgtttcacatttttttctttccttgtcttttttaaccatgactgatgaaatagtgcaaattctctgttttttttccttctacctgttttactccttgtatacctctttaatgacattctcctacccctcctgcctgccaaaccacactccacttcccaagtttgatatattttttccttaattcaccctgtatttcacctattatttattaatttattttttaaacttttgaacagggaaagcactccagcagataaggtcaaggaagcac

SEQ ID NO: 13740 - DNA, 5778 bp, Vitis vinifera
  Intron number 1 from transcript GSVIVT01013621001 (locus G SVIVG01013621001) derived from phytozome v7.0 (chr-ID chrU n; pos 1786562 to 1792339 reverse strand)
tacacactgtctggtggaggattccattttctttgaataaattagtaagggattgattcacaaactcacaaccattgttagagtaaaaaaccttaacttgagtattaaattgtgtggcaatcattttggaaaattgagaaataacatgtagaacatcatttctaggcgtaagtaaatatacccaactcaccctagtgcaatcattaataaaagacacaaactatttatgatttgaagcgaaagaagtagaaaaaagaccccaaacatatgtaaaaacacgggtaaaaagaatcaaacttttattgagaattattttgaaagacacacgatgattttagcataaatgcattgttcacaccttaaactagaaactgaaatatttcaaaactactgaggaaataaatgttccaaatgagaaaaagatgggcgacctaatcggcaatgccataaaagaatcttttctctattagacgtgtctcttgctacttgaaagacacaatcagattcaaattgtaactcccttgccccttccaagtattgaagatgatgcgaacctcaatcgacacgctttgagacccaacaaacagtattggaataattgcccaagaaagctaaaatacagatttttgatagaaccctgacccaacgtttataagtgaaacgcgaaccaaaaagtataagtaacagaccttgacccaatgattacaatggaatcacgaaccgaaggtataaattttgaacgccacaaggaagaagtcctgataagttcacagttcttgaagaaccaaaagaagagcaaagcctcaccttttctgattgttttattcaataaaaattatcccctattacaatgagtgcatgctatttatacgtcatgaaaaaaacttactaaatattaaaacccttaataaaagttgatttggtctgaaattagcagatccaaaataggaaaatagctaaaaaacgtactaaatattaaaaccctaaataaaggttgatttggtctgaaattagcagatccaaaataggaaaatagcaaagaaacgttctaaataataaaagcctaaaattaaggtagatttggcctgaatttagaagctttagaataggaaataactgatatgcagttggaaagtcaatcagtcattaatccacgccataaatcacgcccaagcaagccaaattagcccttaatagcttggattaaatttattacaccttcatcttcctttgggccaagcttggaatgtcctgcgttagaatcaacccaaatatcttgaattagcccattaaatgcttctttgatcttcttagatcttgctttagtaataggcccaactggaacatgcaatggatccttgaatgcttgttgattctcataagaagacctcctttctctttaccaatgccaatcgttatcttcgtaagattgtcttgaaacacacagtgagagtagaatggaaggttatagaacaattaagatgtttggtaatcttgctaatagaaagaagaccattagagagacgagatgcaagtaaaacaaaggtcatggagagtgtgggggaaagtgagacattcctagatcttgaaattagtataggagtcccattagcaacttgaacaaacttaataggtgagggcattagagaatcaagtaaggaagaatggctagtcatatgatcagtagatcttaaatcaataacccaagtgttagacgtagcagaatttaatgtcaaactagaattactttcttgagtagataatcgagagatttaagaagcagaagctggaggagtagcgtcagtaagagcaacttgagctgatttcttgttcttcctttcagcttatttaagcttgtatcactttggataaccatgcttcttccaacaaacatctactatatgttttgtactattgtagtaagtgtagaagcgagaagaagagtcggtagaacgagtcaaaggcgttggtcatgtgttattcttatggacaaccattgtggaagccttgcggtgatcttttattcccatggtgacctgcctctatacttcacgacaaactagtgaataagcttcctttagacttgataaagaagaggtggccaaaacacgaccgctaacctaatccaaattgtgatcatgacctgcaagaaatatataaacccaatcctcagtagtatgcatcctttatttctcaatattagctacacacattatataattaggtcttcgataatcaagctccatgaatattgagtttaactcattatagtattttgcaagagggtgaccaccttggtgtgattgaaaggatttcttcatcaattcatatacttgagaagtgttagagacatcaagatagctcctcttgactgaatcctacacctccttagctgttccacactgtgcaaagtgtgacatcagctagtcagtcatggaattgatgagccaagaattgattagagtgtctttggccattgcaggtgcaaccttccttcttgtgatatatatcccttcttctttctaccaacaatatgcatttccaaaatttgagaccaaacacgataattaacaccatccaacttaataaaaattgttggagaggtaatcttgtgcatggtcaccatggatgactttttgctattagaaatactcatatttgtttttgcagacatgatatggtaaagaagtgagtgaaaaagaatggaagaagtgtcggttaggcagtagcagaaattctctactttagttttgataccaacttggtaaattgttgaatgaatattctcatatatcacaagggtatttatttagagtacacaactattttatgatagccaaccatacaaaataattgacaactatacaaaataaatcactactcacaatcggttgtacacaactatacattatagctgtatgtatagttgtacacacgactgtacatagttgtgtagacaacttgtacctagttgactatttgaaaaacccatagattagaatctcggtattgcgattagaaagggaatgagggaatgcactaaatgtcatttgtatccactttctcatgttgtgtcattcgaaaagttgtctccgtcccaagagagttttcttacaagtttgaacaatattcatattcctaccactctatccaaggctttatctaatgaaaattggaaacaaaccatgaatacagaaattgaagtcttcgagaagaataaaatttgagagttagtacatttgcctacaggaaaaaaaccagtgggatgtaagtgggtttatattgttaagtatagaatggatgggttattggatatgtacaaagcaagattggtggataaaggatatactttatggcatggattatctagagacatttgccttagttgccaagatgaacatgctcagaattttgttatcattgagtgagatctacaatagtttgacatcaacaatgcatttttgaatggagacccgaaagaagagatttatatggaagtgacctagccattaaaaaggtgtgtaaattgaaaaaagctctatacgagcggaaacaatctccaagggcgtggtttggaaggcttgccaaagtgatgaaaaacatgggatacaaacaaagtcagggagattatatgttgttcattaaacatttagattcagggggagttacaactctttttgtgtatatagatgacatcatcatgatgagaaatgatgaaaaggagagacaaactttgaggcaatgcttgaccaaggaagttgaaattaaagagttaggaaggttgaaatacttcataggaatcaaagttgcacactttatgtagggaatttttatttcttagcagaaatatgtaatggaccttcttaaggaaataaggaagttggtgtgtgggctggtaaacagaccaataaatcctaattgtaagcttggaaatactaaggaagatgttgtggatagagatatgtaccaatgtttggtagggagactcgcttatctctgccacacaagaccaaatataacatatgctgtgagtgtggttagccagttcatggacagtctaaaaaaggttcatctgcaagttgctaattgagtactatagtaacttaatgggtcttgaggaaaggacattctatttaaacaaacttcgaggctaatacttgaaacatatatagacacaaattatgttggagttgtggttgacagaagatcaatcacctagtattgcacctctcttagtgggaatctggtgacatagagaagtaaaaaacaaagtttggtagctagatctagtgtagaaacccaatttcatacaatggctcaaggattttgtgaactactatggttgaagatcattttagaagatttgaagattaaatgggatgacccgataagactttactacgacaacaagtttgcaatcagtattgtgcataatccagtgcaacatggttgaacaaagcacatagagataaacaaacattttattaaggaggaactaggtagtggattgatttatactttttataaatcaatttatagatataatcaccaaaggtttaagcagtacaatgtttcaagcaagtgtatccaacctaggaatggaaaacatctatttactaacttaaaggggtttggaaaaatgcaattagtaaagattatagtttataattttgtaattaaggaaaaaattaggacaatcctgtaatcaagggaatctgatataactaggttaagaaggtttctattttttgtgctaagaatttttatataaacacatgggtctatacagattgaaatcaatgaaaaaatttattcttttttactttccaattctttgtattcgataggaattatgaaagggtttagtgctacactttataatgtaaaccattttccataaattttggaattttttattttcttttcttaaattcatggatcaaaacatgtagttaaactcttgacacattaaaagaaaaaattcaaattataatcatgttctccatgtgatgacatcttgggtgaaaatttgataacacaattgagttaaatactgaaagtttttgtaatgaatgtgttcaatagcatgttatacaaatgactgaaaataggatggaaaaattaagctagggcttattaacctattacacttaatgggtcttcttcatatgagtttagactattaaatcaaagtcacaaacttgcttctatttcattgacataataataaatttatattttttttaagtttctttaaatacaattaaggaataaaacatattcattactaatgaatttacctttttaaagtttatttaagtacaaattaaggactaaaatattgtcatggctaaaataaacttatatttctttgttttgtcttttaaatcaaagttttgatttttcattttagaaacaaaaagcaaaaaaaagttaagtttccatcttattttattgtggacaacttcgttaagtttactatttcattgcaacattatattttgaatcaatttaaaatgtattgcatgcaccctaatatttgaaagatttattgatcgagattggatggcaaaaatcatttagtcaagtttattttgttagcacacttgtctaggattctagcagagaaactctaaggtccttaaaaagattggaaaacctttagttgggagaagtttgaaatacaaatctgcactctaatttctaattgtgactatgatattatttttttctttttttttaggaaagtactatctctaaacaaaacaggagaaattc

SEQ ID NO: 13741 - DNA, 16316 bp, Vitis vinifera
  Intron number 2 from transcript GSVIVT01029341001 (locus G SVIVG01029341001) derived from phytozome v7.0 (chr-ID chr1 7; pos 14703541 to 14719856 reverse strand)
cttctacatcttcagggtattgcttgtttttggtctgattcctgcttaaagtgtatttttaatgtacacttcagttttattatgtttcattttttccattgtacatgatatatagcatcttgcttgttatcctgtctgaccattttttatgccgaatctgttttgagtcacttgttgatatgaaacttgtgtaacaccatgtcacacctttcttctctgtttgtgatttaaattgtgtttgctttttaagtaaacatgttaaatcattaacattctagcagtatactaggagtggaccactgaaggtgatccatctttgacacacaaaaaactcaaacaatgtgagccaagatcctcaacaagtaaatgtttatatgtttttgtattaatattcaccagcataaacatttattgtggtgcttgttgtgtctatatatgttgagttgccatgtccaatgcatggcgtcaatgttggacagcagtgctcttgctgcatctacaaatcatcattctttactgcatggtcctttcttccaatacatggattgttgcaacttgataagtgcaatagatatcaaaagttcaactataaaggattgattttatcctacttcctctttcattatgcatacatgatttcacatagactaggaaaagggtattttgtgagggcacttataaattctaattatatcactagatggtgacactgtcttcagggagatatgacatggaatccacattttttaaagaactgacacatgtaaattaatgatttttgcttattctctttgtgttatgaaatcctctatgtattctgactgtgtttcccctcatttgacactcatggactaaattcaaagagatcaaatatttgagtttaaccctgagataatttcagctaataatttgaatgaaatcgcacatgtataaggtcaaagaactatgaatgaaatctaatcagtcaaaacatcagtgaaggacatgaatctacttttaatatgagattatcaacagtttcagagtagggtgtaagaaggaccccgcatctaaccctttttgggttatgtcagacacatcgtatgcatgttgaactttgacattagtgccttagtgattgttaaaatttctttttttgagagtgatgtgggcattgatatttatgttttgctgatatgttagatgccaaaagtagattgttctgtgtttttgagttcctgcaactaagaatgcctttttataccatcttaaaagtattctctcatgggaatccacatgctggttgaagaaaagagaaggcaacacttgctactggcaaaggggaaaaaaacacttttctaaaattaaggaggcatgaaagtgcatttacttcctgatcattgagattcctaagaaattaaatctccaaaggatccaaattaaagaatgagaaacatgatcaacaactagagccctattaactaggaagtttaaagagacaaggatatgactataatatgatgaccaccccattgaagatccttccagagatgaatccagactccattccatgagaaatattagataatatgacagaaagaaatatccattcctacaagaaaaaaaaggatatactcatggagaaaagcgttccacggacaaggtgacaaacccttcaagcctcattctgtcccaaccattttctggagggctgtaacacattcaattccctagagagtttcaatgttcatttgccctctagaacttcattactaatatgatcacaaacttcatctttaccctcttaatgtccctctcttatgctgccgcaccacagactaagtgtaactctctcttcttgccaccttgattagcattgtaaagatagacaagtcataaatgggtatttaaataggagaaaatccaatggctagtttcctatcatctttgagaaaaataagcactctttcattccttaagacacttaggcagtttcttcattagaggacatgaaactccaccatcctttggttgccatctaaccaaagacttggacactatattggtatctgatgacctcacacctaataaagcctgcaattctctttaaaccctattgttaggtatatatagtccctataatttgagcttttattcatggtgatcatccattgtgaaagccactcaatgaatttgagaaggatgctcaagttggatatcttttcttcttcaattaaggagaataagatggtgtataccatcaagaaacatagttatgaaattttgattttttccccacctatggaaccactaaaaccaccttctcacttccccactaacaagaatagctggattcatgaaacttagacaaccctccatccaaaagtgtcatccaaacccaaaactcctttatcgaagtttattgcacttatcatctcatctacgacatctaagatctgcttaccctgcaaccttggttagccctctaaaaggttgttgcatatcatgtatggtgtcatggatgactgcgttttgcctcgtatactagacttgatcaagtactatgattatggggagatccttggtgtgtgataggtgattttaacatgatcaacccctcggaacgtagtagaggtggtaatttatcccttgacatgaggagattctcagaggtaattgaggacctagagttgagggatttgccccttcggggaggtcggtttaagtaatcgatctgagtctagaattgatcagttcctgatttttgatgactgggaggttcatattcttggagtagttcagtgtgtccttcctaaaccggtgttcgaccatttcccaatacttcttgatggaggaggggtgaggagaggtcccatttcttttagatttgaaaatatgtggttgaaagagaaggattttaaagatttaatgagattgtggtgggaagggctaaatttcagtgggtctgctagcttcatattggttgaaaagatgaaagctttgaaatttattctaaggaattggaataaggaagtgtttgggaagattgaagtttggctttgcactgtgttaatttatgtgataaggtggagagttgtcgttcactgtctccggtgaagctaaggagaattacaagaagtgggttctgttagaagagacgtcttggagacaaaaatcaagggaaatctggttgaaggagggggatagaaactcaagttttttcaccgaatggcaaatgcacactaaagaaggaactagatggctagaatcaaaattgatggaatgtggatcactgaggacaatgaaattaaggatgaagtgagtagagctttccagaagctactctcaaccattgatgagtggagatccaacttaagtggtctgtcctttgagaggttgggctctatggaggtggaagggttggaaaaaccttttacagaggaggagattttggtgctctgtcagattttaacgaagacaaagctccaggcctgggtggtttctccatggctttttggtagttttcttgggagttcatttaggatgagatggtgaatttttttagggattttcatgaaaatgggcattttgtttggagtgtgaacgcaaccttcttagtgttgattccaaagaaaagggatgcaaaggacttgagggatttcaggcctattagcttggtggggggttgtataagtggttggctaaggtgctggctaataggttaaagctggtgctagccaaggtgatttccaacacccaaaatgcatttgtggaaggtaggcaaattatggatgcagtgcttattgccaatgaagccattgactcgattttgaagagtaagggtggagcaattctctgcaagctagatattgagaaggcatatgatcatgtggagtgacatttcttgtttttggttctagaaaaaatgggttttgaggagaagtggataagatggataaagtggtgtgtgtctattgctagtttttcggttctgattaatggcactcctatgggcttctttcaaagttctaggggtcttaggtagggagatcctctttcaccttacgtgtttgtggtagtgatggaagctcttagttgcctcataaaaagagttattaggggaggctttctatcaccttgccatgtcaggggtaaggggggtgaaggggtaaaaatctcccatttgctgtttgctgatggtaccctgattttctgcaaggctaacaaggaccaagtgacctttttgagctggttacttatgtggtttgaggcaatttcagggctgaaagttaatttggataaaagtgagctgatcccaatgggcaatgttgagaatgtggaggagttggcttctgagcttggttgtaaggtgggtagtttaccctccaattacttggggatgccgttcggttctcccttcaagtttgtggcagcttgggatggagtggaggagagattccgtaagagattgattatgtggaaacaccaatatatctccaagggagggagaattactttgattagaagcacactgtccaacttgcctatttacttcatgtctattctacaaatcccaaggggggtcagattaatgttggagaggattcagagagattttttgtggggaggtggagccttagaccggagacctcgcttagtaagatgggcaacaatgtgtcttgataagagaaaagggggcttgggggttaagagcttttctttgcttaataaggccctcctttgcaaatggagttggcactttgcgaaagatagaggggctttatggaaccaagtaattagagggaaatatggggaggaacgaggagggtggtattcttgggatgtaagagaggggtatggtgtagggttatggaaaacaattaggaagcttgggcacattgttagtagtagaatatcttttgtggtagggaatagccaagggtgagcttttggaaggatacttggtgtggggatacacctttatgtgcttccttcccttccctatttgccctagttgaccccaaagaagcttgggtgaaggatgtttggaacgggacagcagggaggggggcgggaagttggagtccttgcttcactaggtcctttaatgattgggagatggaagaggtggagggccttctgctacacttgtgtggttagaatctaatctttgaggaggaggatagggtgcagtgaaacaaagggtggtttttttctcgacaaagtcactttacaaagctctagagctgggctcttcagttttatttccaatgaagaacatttggaaatcatgtgtgtagccaaaagtaagcttctccacttgggaggcatcttggggcaaagttctaaccttggaccaagttaaaaagagaggccaagccttagcaaatagatgttatttttgtcaagcggaagacaagggtattgtgggagatgcctttcactctttttggagtgtcttgggtgtttccgtcttcagttagggaaaccttattgggttggaacggattccttatgggaaaaaggcgcaagatagtttggagagcaagtcccctttgcattttttggaaaatttggaagacaaggaataaaattacctttgaagatgaggtgttgtccatccaaaggctgaaaacttcttttattaactcactttggtcggagactgaactgtttataaaagatggtctatcgacctttttggaattttttttattgggtgggttcccattaagggagggtccgtttttttgtatatcattgtggatagttttttgtttctcttgttagggtgtgagtatttccatttcttttctgcaaattttgagtcgctcttttaacatcgccccataatacaatacttctcttataagtaaataaaaaaaaaaccttaatcaagtactataaagagacttttgatggaattgatgtgttaaaactttttgattgggatggatctatctttctgcagaattaaatcaattaaattgttgattctcctctcatggaattccttcaaaaattttgtgtcatctttctttgttccttagcaatcctaatggacaaacattggtaattttctggttctgtggccttgtctttcactgttgctatctctccatatgcctccacttcacagtctcaatctgcaatctcatccaccctatcctagtgtagagatggggaatatttccatatttcttctataactaatatcttaagctcaacttctaacacttttaatcaacttgttctcttgcattggattaatgattgcttccctaaaaatagtctttaatgatattcaactttaaggaaaaaaataaagtgggaaaaataaaattaaaaaggaacactcataaggatggtaaagtagcaaaataaattcatcccacaaaaaatctcgaagtttttatttagatgattgctgttatttcttctaattgtgcatttgaattatttcaatattagagggtcaattaccctaatcaaggggtacaccattttgttttgatggcattggtaaaggtgttatttattatagcgtgatgtttttagcctaatgataacaatttgaatgatgtttctgtctttgtgtgtgtgtgagcgcacagacacatgtttgtgtttatgcattggttactaatatgaaagagatttggagtcagtaagaactctttctccaggtgatctttactccccaccctccccttccattctttctccatttttctaccctctttctcatatttgatttctaggcatctctaaaactgctgaaaaccaaaattctaatctagccttcgcattatggaattaatgcaaaactgatatttttgaagaatgagtcatactgaattataaaatggaatctatatcattaaatccttggctgtacttgtgaagaagagcccttgtcaaggtaacctttgcctctcatttctttgagacctcctagcacattcatttgaaattgtccataaattttcttgtgcatgtatatatatatatattttaaggtagaagatatcaaaagaagatattcccctgttgatgggctgatgacatatcatattttttaggctttttcatgaacttatttatatgtatctccttcctttggtcaatcttaaggcagagcatattgactgaagatactcccctgttgatgggctggtgacagcacatctttttttgggcttgtcatgaactttttgcactctatcatttcttcttttatatatattaattttctgaagcagcaaatctacatttatagtatcatgtgtcttaggtgagaacttagctcatgcctaaattaatttttgcacttgattctaatacttgaatagcccatctcaaaatatgttctttgtagcggaggtatgtctcgttattctattaatagagaccttgagttgttttatttctagagcagtggaggcatgtttcgtccaggtattaaagtaggtgagtggtcaacacagatgaaaatgtcgccaatattgggcgatatttcgtcaaaatatcgtgcttcggtgtatcccaacacgatatcaaggtaggacatatccgatattcactgatttttcggggtttgtttttggaattattggagatttttcgggatttttcggttttgtccccatttatcaggatagttcgcccacttgattcttaagtaggtaaccaactaggctactttgatcctatggtaagaatgtacatataattatgtattgttgttttgggaagttagctttaattaaattaattttaacaagtatatatataaatatggaaaaacaagataggaaaataaatgaattttaattattttatttttgaatttcatttagttggttgttaaaaaaactacaaatcaagatattatacatgtatcaccagttattttatatcattgaatacatttgaattaaatagatcataattttaatattaaatatatttccaagttgaacatatcattatcaaatgttacaatatttgtgtcgaatgatatttaatgtatcttaataataaatgtgcacttaaaaaattcatatctcttatcaacacatacgatattattgtcaaatattatatatatatattgatcaaaactcatgaaaatgttgaaaattttctgcaaaatgatataagaagtaaaaataaacattttgaaattgttttgttgaagaaattgaatatatatatattgatctgcaaaatgatataagaagtaaaaataaacattttgaaattgttttgttgaagaaattgaatatatatatatatatatattcaatttcttcaacaaaacaatttcaaaatgtttatttttacttcttatatcattttgcagaaaattttcaacattttcatgagttttgatcaatttttatcccaccaatattttgtgtcaaaatattaatagatatatcccgatatatccgtaaaattgagttactaatatatccatcaaaaccgatattttcatctttagtggtcaaggaataaggagtttgtaggtgtttaagaaggcattatagagaagtgtctctggaggttagctactaatagagatagattgtggataaaggtagtggtaggtaaattccggaggaggtgattggtgctcctgggggagcagtgttgccttacagtaggcttatgtaaagctgtcagaacagagagggatggttttcatggtatcaatattgtctccttggataaaaaaaaattctgattaaaaaaaaaattgtcttcttggataataggattaggatcaagttctagtatgatgcttggtgcgtggaagttcttcttatggatagtttaccagatctgaacagcattgcagaaaatagggaagtagtgatagcagatctttggtgcttggagagagggaaatgtcattgggtgccatggttcacaaggttgattgggagctggagttggagtcttgcttatttaacatttttagcattgtagtctatcagaataggaagatcaagttagcagagcaggtctccaaaggggttgtttctctggaaaatctaccataaggcacttcctccaagggttagcatctcttcacctctacaagcattaagcatgggctgcttctgttccattcaggttggattattttgtgtgggagaacatctctttctattagagaaaggtgttgaacccttgaaagccctaaattcttgcccatgcccagttccttggttgacaccaaccctcttccctaactattgggaaatgaggggtagcttaaccaccctgtggaaatgaacccttggaagtttgctacaccctaacttagttcatgcctaaatgtgtaagcagtaagcccccttaacatactctgtttctttcactggtttgccatgattcataagccagaattgagaatgatgggaagcaagaaactgatttgttgtgcattagagaccggtgtagtattttctaaagaaggaaaaggaaagcaaacaggcaaccagggatgatccttcatattgattagttgatgagtggaatgatccttgttaactggtattccatgtgcaaacaagaagtggaatcggctaatcatcttcatattcactatggggatagctcatagcttgtgggctataagtgaaaaataccttatctagaatgatagtttgaaggaaagaataaaaggaaagggtgacagaggagagttctgtgaggggttggagtaatgcagaatctgaaaagatactttcctccattcattccgtctggttaaatgattcttttgaaaagccatcctttttagattacttatcaaaaaaaaaagaatctcttagttcatgcttaggatactgctcaccaacaccctccaggagtttgaaattttttatgtcccttgttgagagagagagagaaaggagaaaaaccttaattctcattcatgtaaaatgtgcacttacaattgagagatatatatatatatatacaaggctaggagtcctaactaccatacatgtgacctatattaacaaggaaagataatatactataaatacattatattcaacactccccctcaagctggagcatatacgtcatatgcaccaagcttgttacaaatatatttaatcctaggacctctgagagatttagtgaagatgtctgctagttgatcatttgaattaacaaaacttgtagcaacacatcctgatgcgatcttctctctaatgaaatgacagtcaacttcaatatgcttggtcctttcatgaaaaactggattggatgcaatatgtaatgcggcctggttatcacagatgagtttcatctgttcatcctttccaaatctcaactcccgaagaagatgtctcaaccatatgagttcacatgttgccaaagccatagctcgatactcggcttcagcgctagatctggccactacatcttgtttcttactcttccaagatattagattaccttcaataaaaacacagtaccctgaagtggaacgtctatctgtgggtgagccagcccaatctgcatctgtgtaaccaacaacttgagtatgacctctgttcttgtacaatacaccttggcctggtgtacttttgatatatcgaagaatgcggattacggcatcccaatggctatcacatggtgactgtaggaattggctaacaacactcacaggaaaagaaatgtctggacgagtaatggtgagatagttcaatttacctacgagccgtcgatatctcccggggtctcctaaaggctccccctgtcctggtacaagtttgacattcggatccataggtgtgtctaccggtttacagtctaacataccggtttcttccaggatgtctaaagcatacttcctttaggaaaggaccacaccagaactggattgagctatctcaattcccaagaaatatttgagtttccccaagtctttggtctgaaagtgggtaaaaagatgttgctttagtttctgaataccatcctgatcactgcctataatgacgatgtcgtccacataaacaaccagataaatacactgccccaaggagttatgatgataaaaaactgaatggtctgctgtactgcgaagcatgccaaactcttgaacaacagaactaaaacggctaaaccatgctcaaggagattgtttcaagccatatagagaacagcgtaacctgcacactaaaccagactccccctgagcaacaaaaccaggaggttgctccatataaacttcctcggcaagatcaccataaaggaagacatttttaatatccaactgataaagaggccaagaacacatagtagccatggagagaagcaagcggacagaagcaatcttggcaacaggggagaatgtgtcaccataatcagaaccataaacttgagtatagcctttagcaactaagcgggccttaaggcgatcaacctgaccatcaggaccaaccttaactacatagacccaacgacaaccaactgtagatttaccagagggtaaaacaacaagatcccaagtgtcattagagtgcagagcagccatttcatccaccattgcccgtcgccagcctggatgggaaagagcttcatgggtgctctttggaagagaaacagaggatatagcagaaacaaaagcagaatagggtgaagataatcgatgataactcaaaaaattgtaaataggatgaggattacgagtagagcgagtacctttccgaacagcaatgggtaagtcattaggagaaggcagagccggggcaggtgaagccgaagggataggaagtgagtcagcaggtgcctcaggaaaagggagaggagcaacgacacgagggcgacgatgataaacctgaagtggtcgagggggcatagcatcaggtggggagacaatgggaatgggcaagacttcagaaacaggaagagactcagaagtggtggaaaagaatggtgagtcctcaaagaaggtgacatcagcggagataaagtatcgatgagtctcaagggaataacaacgataacccttctgaagtctggaatatcccaagaagaggcacttcatggctttggcggaaagcttgtcctgtccaggagtgagaatatgaacaaagcaagtacaaccaaagacacgaggaggaaggaaataaagtggttggtcagggaagagaagggagtgaggaatctgatcgtgtaagacagaggagggcatacgattaatcaaataacaagcggtaagaacagcatccccccaaaaacgaaaaggaacgttactatggaggaggagagtacgagctgtctcaacaagatgtcgattcttgcgttcagctaccccattttgttgaggagtatgagcacaagaagactgatgaagaatcccatgatgagacataaacgaagtaaattgggctgaaaaatattccctggcattgtcactgcgtaacacacgaatagaaatattgaactgggtttggatttcagtataaaatttctggaaaatagagaataactcagctcgatttttcattaaaaataaccaagtacatcgagaatagtcatcaatgaaagtgacaaaatactgaaatcctaaagtagacgcagtccgacaaggaccccaaacatcagtgtggacaagctcaaaaggagactttgcccgattattcaaacgctttgggaacgagacacgagtatgtttcccaagctgacatgactcacacggaagcgacgacaaagtggaaaaacgaggaaccatcttctggaacttggagagactagggtggcccagacgattgtgaatgaggagaggagcatcaatggaaatgcaaactgcaggagatgaatctgaggtgaggtgatagaggccttgagactcacgtcctatgccaatcgtcttccccgtactccggtcctgcaaggtcacaaatttatcagaaaaggtaatagagcaattaagagtacgagtgattttgctaatggaaataagattaaaaggacattcaggagtataaaggacagaagtgagaggtagagaaggcagaggaagggtcaaaccaatacctttagccacagtttgagaaccattagctaaggtaacagtaggtaaagcagaggtagtagtaatagaggagaaaagatccttattaccagataggtgatcagatgctccagaatctagaatccagggtccaagagaagatgagtgggtaaggcaggcagaggcattaccaggctgggcaacagaggcaatagaagcctgagatgtctgagatgcggaggagctcggaggctgaggcagcggagaatcagaggactgggccatatgggcagtgcgaggaggtcttccatgtaattgatagcaacgatcgcgagtgtggccaagtttattgcaataggtgcaatgaggacgttggcctctacctcaagtaccactgcgtcctcctcgagaggtagtttgagaaactaacacagaagaatctgaagcgctatcagatggcaaagtctgagtggacgagatacggaggaggcgagcaaacacatcatccaatgacggaactgatgaactaccaagaatctgatcacgaataggctcaagatccggacggaggccaataagagtaaggaccatgaagaacttgtcaagctgtgtttgttgagccccaacatcaggagtaagaggcatcacagtcaagaactcctccttaagagaggcaatctgaccaatataagtagatagatccaagtcctgttggctgatatggacaataacagaagccaccttataaagacgttggatatcattcgtgtataatcctttggcctgagtctaaaatttaaaacaagttttataggcctgaagatgaagaagaatcttgggatcaaccgattgccataatacactacataactgtgcatctatcttcctccactgtacgcggtcaacctcagggatatctgcctcctgggtaaccaagtgatcctcataaccttgacccatgaaccaaagttcaacagaggcagaccaggacagataattctcactgccaaccaatttctctgaggtaatcataggagatccagagataacagaggtaaagatctgatttttggtggtcatattcacgtatttggatcgaagagagccctggagaggaagagaagtagcacccaagccgcggagatggggggggagccctgtcagaggtggccggaatggcaagaaagccaaaaacagggaaaaaatggagatgcagggctcggggaggactgccggagggctagaaggccaagacggcgccggacgagcctggagaggtgtcggaagtggctggaaagtgagccacgcgccgtcactcgccggcgcgtgggtgacagtccggaggagaagagcggcgcgtgggggtgcgtgagatgccggtttccggtggggtttccactggcgtgtagatcagcctccggcgtttcggaatatgtggtcgtttcccggaaaataggtcgtcggaaaatttcgccgccggcgtggtggagatccgacggcgatgaggttgtccggagtggttcgggaagagaatgaggggaccggagtgaaacacggtcactggacggtttgccggaattgattacacggctaaaccgaaaaaaagattaggttttctcctttggctctgataccatgttgagagagagagagaaaggagaaaaaccttaattctcattcatgtaaaatgtgcacttacaattgagagatatatatatatatatacaaggctaggagtcctaactaccatacatgtgacctatattaacaaggaaagataatatactataaatacattatattcaacatccctctttaagtgaatcaaattcttaaatttcaaggcaagtaagcttatggagtttctggtacattgctgattgctcctatgcttttgtcattaaactaccagctagttcaaaagcttaaatttttaggtaaagagccatgatacttatgagtctaacaccctccttgatgtgtggctgcaaattgtgcccgataaaggcaaacaacaaattgagggcaaatgaatgtgagaacaaagaaacaacctgagacctctagtaactagatctcagacattatatcaagctacccataagttgttaggtaatggatgaatagtgtgtcaggttgttatgatatgtgtaaaaccaaggattctcaatgagcattcattcatataataaagtttttttcctagtggcaagataagaaaattgatgaatgagtattaatcaacagcagtttctggcttgcaggattatgatcagagattaaaactatcgtctttttcttctcttgaccaccttgcagcccaaaacacatacacatacaacatatgtttcagtctcttctttgaacaacataatccaggataattgtttcagttcatgccattgctaatttttgtgtagattaaattgagcggatttatttccacaccatcttttttctatcctcctaatagtactggatgatatattttgaataaacatgaaggatgcaaaatggacaaacaaaaggtggaagaaaaatagactcgctcaactcaattatgaaatctttgtgatatatactgtatgccttgtacagaatatctgtggccagttatagtttctgttggaaaaaaatcgagtattccttatatggaagtatgagattttagagtaatttctttgtaacatatcaactatttgttatatcaaaatgtgagattttagaataattggtttgttttgcagtcatgcttttagagcctaaccatgctggatgtttgaatctggaatcctagttaagctctattttcaagaattttggatggccctcctgcttgtgttttaaatattgttttcaagactcgacactgtggttggattaagcttgtgcctctcacttatacacatatttctgattgtgccagtgttttctatttcctgatcttcactaatggcttggcttgattttaatatttgataacatctggccatgagtgtatcatctccagaaattatttgttttcctattatcatcacctgcctgctagctgtttaccacatttccctttttgttcttcgaacaagataatattgctgcaatctttttgtgaatggtgtctgcatggtagaacaagttcaaagcttcagcttttaaatttcataagattctacgtttttttttttttttttttcttcctgctgattgttattatagaccatatttgttgtggctcatcatgctaaaacttattgaagagaaaggagcaccgaagaaacaccactgcatctga

SEQ ID NO: 13742 - DNA, 7811 bp, Vitis vinifera
  Intron number 4 from transcript GSVIVT01023597001 (locus G SVIVG01023597001) derived from phytozome v7.0 (chr-ID chr1 1; pos 7812687 to 7820497)
ggtggtggactagaattcacgcttccttctcacaagtaaccttcaaatagctgcattcactggttttctttttgtttgatgatttcatgggagtgctctaggttgttagtaacttatctttgctttgtttggttattatttgcattgttttactgatttcttgcaatctatgtaatatttctgaatagcactcaagatgagttgtcatgatttttttttttttgataagtaaaaacaattgtataaagaaagcttgaagtaaacctgacaatatacatggagtatacaaggcaactaggccaaaggaaaagaaaaaacaaaaaaacccttacttacaacccaaccaatcaattaaatcgaaaatggaccatgaagcacaatttacatgcaccctaacccaatccgagaacatgtacaaaaaagaccgtaaaatagcttgatccgctaattcagaatcttcaaagattcttctatttctttccttccataaagtccaaaataagcataaaggggctgcattccacgccttttttcttttttttccaacaaaggtgtcgttccaaccaagaatggtttccttgatagaattgggcaaaacccaatgaacaccaaaaagagcaaaaataaggtgccaaatcatagttgccttgggacaatgaataagcacatgattagctgattcttcatctgctttacacaaatagcacctacttggtaagacccaacccctcctttttagttgatccatagttagaattcttccctagatagcctcccaagcaaaaaatctgactctctttggaacccaaggattccaaactaagcttgaagggaactttctactgatgcaaggagctaaggaagagaagaaagacttaactggaaagatatctttctttgaaaccctccaagacatgacatcctcaatccctcttctaagcgcatggccatgtaacctactgaaaaaagtttccacctcttccatctcccaatcattgttgagtcttgtgaaaacagggttccaacaacccaaattcccggattgatcccataactgagctacccaagcatccttggaggaggcaagatagtacaaccttggaaaagcctcatccaaagaatcttctccacaccatctattcttccaaaaacgcactcttctaccatcccccaccttaaaagccacccttttgctaaactccaaccaccctttcctaatcgtcttccaaagccccactccatgactctcccttgaatcgccagagcaccaaccaccatcttcctccccaaatttccttagaatcacttgtttccataaagaatcttgtttcgaagcaaatctccaacaccattttccaagaagagccttattcaacctagaaagatttctgatacctaagcccccatcctttttctccatgcaaacaatggaccaatttaccaaatgcggcttactttgagaaactactcccccccaaaggaaatctctttaaatcttttccaaccttaggctcaccttgtgagggatgatgaataaggacataaagtaaattggaaggctagagagagtgctctttaccaaagtcaatcttcctcctttggacaaatactatctcttccacaaagcgagccgcttttgaaatctctcctccactacatcccaaacccgagatgatttgaaagcagctcccaaaggcagccctaaataacaagaaggaagagaacccactttacagcccaataccctagccaagtcctcaaaattaggaaccacccccattggaatcagttcgcttttgtgaagattgatttttagcccaaaaatcgcttcgaaccacataaaagcccaacttaagacctccacatgctccttgcttgcatcacaaaaaactagtgtgtcattagcaaatagaagatgagaatcaatcacatcctcacctcctctcccaccagccatgaaaccctcaagatagcctccttgtaaagccctcttcaatatagaagataaaccctcatgatttgcgtaggattgatttattgtatgaatgtatctgaattttcctgtttagcttacatgtttgtggacataaatttaactttaagactcttatcagtgtttgtatccatataaagctatatctaatcctttctattttgtttgcatgaatataaagtgtttgcttttgcatgttgcatgcggaaagagttttatataatgccaatgacgtgtttcaaatatgcaatatctcttttggattgttcctttgacttctagtagttatatatcatgctaatcagcacaagaatgcctctgaaagaggttagttttggaactgtcccatttgatgggaggctgcaaatgggaagtttgtactgattttgtgggttgctggccatctctttccatctctctctcaccctccctccctccacatgcacatgcaaactagtttatctgttgagaggaacttgattgaaggaagtagtttttaaaggaattttcattattagtctatttgatagtagatctatcaaaaaaaattattagtctatttgatagtaaccagaaagtcaaatgggtaggtcacaactatgaatagtcaacttagttatttaggaaacttacccagcaacagagttctagataaatgagtgctcttaaaggtgtggaattggattgtggcggctcctagatttttccctttaagtgttgatttagtttatgattttactttgtagcttgtctgaaggagagaattttcctttctctctctctctctctatatatatatatatatatccccctctcactcctgttgaattagggttttagtggaatactctgtgtgcaacaatttttaggagggctaatatgggattattaaggacattttttttattttgaaatgcttgttgggattttgcttttaaagtgtggtctaatagttgagattttaggtaggcattattctttgtccttattcccttggaattttgccattgtagatcttaattccttacaaacttttttattgagtcaaataacatttggtaagctgataaggccccaaggtaggattttcttgtttttaagatctattttggttttggaggattcacttctttgtgtttcctaatttttgacctatcttggattaatcttgttatatagttctggttacatatgaaagctcaagaaccagcatccttggtacaggaattaaatttttccaagttaatatgttgggaatttgcattctattggcatattctcatcaattatttctttagagttatgattacagattcaattgacttagagaaaccaaagttttcaaaaagtaaaggtattgttatcatacgacatctcagaaaggctggtagcatgagtttttgttttatggttcatcaatatttagttagaataattagaattaacataagaaaatttcatcatattcacataggggatcaatgctacacctaagtttgggtatcaaaggttgaacaatgttgagaagtgacgaaagttcattataatctagtagtaccctggaaaaaatagtctgcatgagtagcaaggtggattcccctactatgtgcatctgcagattgagagtcaaacctactccaaccttctggaattgacctttgaagtcacggttttgatttttgtagaatgggctgtagtcactcataccagaggataatgagtttacttgttggaggattggatccgagacttcaacctcacttacctgagttttggatcactgtgcctcgtatattttttgtcatatttattcctgagttatgtacatgtatacatacaacatgcatgtatttacatatataagtgcacaatttctctagactatatatgtgtgtgtgtagcgcaagatctccattctcatgttctttttcaatgcttttggttacttttctcttcatttctgcaattaaacatttatgtgaagtggagtatctatgttatgaaattgctctcaactttgtggtgaatctatgcatattttatgatgtgcgttggtgaatcaagttacctttatgaaactttatctcaattgtttggttggctgaataatcctttctatagttctgtttggtgaaaaataaaaaatgccctggaagtgcatttaatgaagcacaacagcaccacccttttttttttggtttagaaattgggtcattttaaaacaaatggcaaactatatcttcataaagcttcatagtatatattacatgatcttggtcttaccatttgtatgacttgccttgacattcatggaaatgattcatttctttctttcaattcccattttctcaagtttgtttgggaaatctgctgctgcaccatcatcctatttgccatcacaaatatgctgttggcattgttgtccttcacatgggaagaataagatttgatgcagtgaaattttcggtgcttaaatagtcattagaccatttcactactgagataggagcttgggttatcataaacaagaaacctttttagaacttcactttaaaaaaactctcatagttcgtagtcttgtgccaccttggttgataaacgtgctagatgccacccactagggtagcctagttggtcagggcgaacactgggaagtgtggtctcagtaagtgtcatatggtcttgggtttgaatcttgccattgatgatactctgaatttaccttgtgctggttgttgcggggcggtcagtatcccgaggtttgggtccccatggagagtcctaagggcttgaccatggaaggttccttagttattaataataaaaaataaaaataaacgtgctagatgttgagatcagtgtataccctttttttggtatgaatgtaataaaataaatacaattagtgtacaaatgaagaagattgagatatccttttacaagtttaagaaaccagaacctctaacacatccaaagaaatacaaaagtcagtatgcaagaggagttatactacaaagcccttagtcaatagttgcccaatcctatgaagtcaaaccaataggagcttcaacaaactcccttggtcaaagagataacataaaaaggttaagaaacaaatacaatccatcaactctttctttgtggggagctttgtctcccagctaagattctaacctttctttgaattcatatcaccttgaggggggtaaaaaaaaaaaagaaaaaaagaaaaaaagaaaagaaaacgatcaccttgagggtggctacattgtccaaggccttggaaccttacttttagaacccctgccaatcttcttatcgtaatcacattgtttggcaattttgttgaattatttagtttcgtgcttagtaatccactaattcttaaatttgccactttaaatatatatatataaaattagaaacaatgatttcattgcattacaatattaagtacaaagatggatgagaatacttgcaatttgtacacaatcctctatacaaagactaatagagtgtatactaaactactttcatctatacctataaaaataagtacactagttcaaaaattcaaatctagatacaattcacataggtataaaatctcctactaaagaagccattcataaagtgtatactaaactacttagtcaacctcaaggttttgcaaattaagttccaaactagtagaatgaggctcgaaggaataccttcaaaagcttcattggtagaagcccatagggaagaagaggtgtaaaatacctcctaaactacttctagagacattcacttatcctaaaaaaatgcttgtattccttttccacaaaatagtccaaatcaaagtgaggctagcaatgtgccaaagcgtcttgcctcaaggaacccctcaaaacctctaaaggatataactcacatctcctctaaccttctaagtggaactcaatcaatccctacaagttgaaaaaatttacaccataatgtcattgttatccagcaatgtaaaaaaaaaaaatgatttgcggtctcctccctcactccctacacacttaacacaccattccaggttaagtactttgtattgtcttctcctttttggggtaagtcataaatattgaccaccttatttgtcacaaggtatgcaaaatcctgatcatattttgatccttggttctaacacttttctaatatagtttgatgttctatttagttctttgttttttgggaggattcctcatccttcttttgtacttcttgatacctaaatttaatacattgttgtttctaataaaaaaaaaatatagatatggtttggtggatactttttcctttttgttcatcacttgatttcttagagatgttgaactctatcatccttgatctcttcaaacaagatcaatttctatatttgaatatcacaaggattttaagaccctgtttggtaactgttttttaaaacaattttctgttcttcaaaacaaaataataagaaaacatgtttggtaaccaaaaaatagaaaacaattttcagttcttaaaaataaaaaacatggttttagagaatagtttctagttgtttttacttgttttctgaggattgttttaaaaaataattatataaatatgaagaatgattaaaaataaagcactacacataaaaattattttcaaaacatatttaaaaacatagaaaacaagttataaatatggagaatgattaaaaataaagcacttcatataaaattatttttaaaacatatttaaaaacatagaaaataggttaaaaacatttcaattcccaaatagacttttgttctacaaagtattatagaacaatttaaaaaaaaaaactatttttcagaactgttttcaaaaacatttcccaaacagagcttaaccctcttgatttttgtgtggaagcggtcttgttctttttggttgggctttatttatgcgctgtttgcgtctttagttaagaaagaatagtgatgtctttttcaagaaatgagtggattcccaggaagttagatgcagcaccaattgaggataaaattggaagttcatttgtaatagcctatatatatgcgtgtgcctacaaggagcagttggattcaagttgaaagagctacaaggatgataggtaggcaagaaagaacatgggctgcaacagagggaagagatatgatggcctccagtttggtggaggatgtgactctgtatggagctgatagcaagaatggatttgtgtagccaaccctagttagatgggatatgaaactttgttgttgttgttgttttattttttatttatttttaatttttaattattattattatattattattatttaatcagaaatggaaacattttcattaaaaatgagagttgttcttcttgttgttatggcacgatagaagcaaaagaaatgaaactggatgatttctttttctggagatttttggtctcaaaatgctctaggcctccttttttgtttgtaatttgtggagttgggccaaattgtatttaggtgtggaggctttctctcttataggcttcttggagtgggtagcatccatttaaggggaggtgaatctttttgtctttgttttttgaggccttggctgccttgtatatcccatgtatgctttgtggctttttgccactttattaatgcatttcttctttacttatcaaaaaaaaaaaaacatttaaattcctgattttagattgcagtcatgatatgctcattgcctgattttagattgcagtcatgatatgctcattgatttttctcttctgttttcaggactatatttg

SEQ ID NO: 13743 - DNA, 5398 bp, Vitis vinifera
  Intron number 6 from transcript GSVIVT01014451001 (locus G SVIVG01014451001) derived from phytozome v7.0 (chr-ID chr1 9; pos 3881727 to 3887124 reverse strand)
tctacccaacaaaaaaactgaacgtaagatttctttatgtttactattaccctcacatattaggcatgtctttctgtttgtaagtaactaagtcatgttttaactggaagcataaaatgcaaaagacattgatgactcagaaatctgcttttgaatctttattctcttgtttttcttgattttgtggtgcaatggcaaagaaggggattataaaaacactcttcttggaatataattcaaaagggagattttaagaaaattaatgtataatatgaataataaaaactgttaacaaacctaactctaattaggtatttataggtttactcctaatcctaaatgtaataggaaaacaattttgtcttttaatgaatcacaaagctctcaaagcctagtggaaagatcttttggagcttcgttgaagaggagcacccttggccatggtcatcatcacaatgtgaaactcccaattgtgaacaatgatggcaacacaattatttcgttgtggagtggagttacaaacaacttcatcaaccttgagatggggccttggtaggaaattgcgttgttggtgggttgttctttatgcacggatgaagctatggtgacggaagcttctagaattcctagttcttcctttacctttgggagcacaatcttctcttctcctttaatgggtgcttctaactagttgcaagtggagtggggttttaagagtcttagggctttggaggatggtatcaaagtagtatctacgtatgaggacaaggaaaaggcgaatctttcaaaagattggcccaatattagcttgattgtattcaacatctggtcaggaatgtcgactgagggctttaaggaagaaatattggctttcctaagaaaatgaaggtgagaaagaagggttgaagggttaagaaattgcaaagagaaagaggaaaacattatttttaaaagttgaaaaagagttaaggaggttggaatgcttggtgaattataatggaacaggaggaagggaagtgtaaaatggtaagccaggttgagaattggtgtctattagccaatgaagttgagaattctctcctaaaatgtcatagaattcactccaagttgaagaatgattctagtggactaatttgtaaatttgatattgaaaaggcgtatgaccatgttaattggactttttttatagtgttcttcaaaagataggatttggtaagaaatggattgggttgattatatggtgttgcgtatccgcatcaaggttctcattgcttattaatagaactcccttcgattttgtttagagctttataagtctaagacaagaggcccttctctcaatgtatttttttgtgttgattatgaaagtgttgagttgtctcttggaaaaggtcgtgaaaggtggttttttgtcaagtttgaaggtgatgggaaaaaatgctctaatattttgcaagggttctcaagatcaaatggtttatttaagttggatactcatgtagtttgaaggaatattaaaactaaaaataaacttggataaaagtgagttgatctcaattaggtgtggaggggttaagctaatgtgaaggagttggcattggagttggttgcaaggtaagaatgcttctatcttcttacttaagtttgcttttaggtggtctatttatattaaatttagtttgggttggggtggatgagaggtttagttgaaggttgtcaatgtggaaaagacactacatttctaaaggaggaagactcacattgatttgaagcactttattaagtatgcctatctaccacatgtccttgtttgctatccttagaaagacaaggttgagactagagaaggttcaaaaagattttctattgagaggtgaggctctaaagaaaaggtctcatttagttaaagggctactatatacttagataagagcaagggtggtctagccattagaagtcttacatctcttaatcaagccttccttgttaagtggtgctggtggttcacttctgaagaggatgttgtttgggaacaagccacaacagggaagtatgtgaagaaataatgggattgacattcttgcttcatgagagatgagtataggattaggggtttggaaagctatcaggaatggatgagatatccttaatagtatggttccttttgtaggaggtaatggaatgagggtgaagttctgaaagaatagatgatgtgggaagtaacctttgtgtgtatcttttccttcttggtatgctttatcatcgcacaatgatgcttccatgatggatttatgggatgtgatagagggacatggttattggaatccttgtttctttagacactttaatgattgagaattagttatttttgagttttttttctcaagattgtaggataattctatgaaaagtgaagatatcgataagatgatttggaagcagtcaaaaaatggttttttttttttgtcaaatccctctttttttcttagggttagggaactcaattcatttccatttggatctcacacttgctgtttgcggatgatactttggtattttgtgaggagtctcatgatcagttgacgtatctaagctgacttctcatgtggtttgaagcttgctcagggttgagagttaatttggagaaaagtgagcttatcccggtgggaagggagcacgatatagaggatttggccttggagttaggttgtaaagtgggtggtctgccatcttgttatttgggcctgcctttaggagcacccttcaaatcagaggtggtttgggatggagtcgaaaagaggtttcgaaaaaggcttgcaatgtggaagagacagtgtatatcaaaaggaggaaaactaactctaatccggagcactctctccagcatgcgtatttactttatgtctctcttttatttgcctagaaaagtaaggttgagttggagaagattcagagggattttctgtggggtagaggagctcttgtgtagaggccacatcttgttaggtggaacttggtttgcttggaaagagagaaaggtggtttgggtgtgagaaatttagctttgatgaataaagctctcttgagtatgtggaattggtgctttgccattgaaagtgaggctttgtggaagcaagtcatcagtcacaaatatggtgtagaggaggggggatggtgcactcgggccgtaagcgggaggtatggtgtcgggctttggaaagcaattagaaaggagtggttgtgtctgaaaagcagtttagcctaccgtgtgggttgtggtaggagagtgagattctggaaggacaagtggtgtggtgatgagcctctttgcgagtcattcccttctttatttgacatttccttggctaaagatgcttgggttgcggatgtttgaagcccaggcggtgttggggatggttggaccctttttttttcaagggcgtttaatgattgagagattgagatggtggagcgttttatgcttaagatctaagcctttagggtgcaaagggaggacaaggataaagtggtgtggacaacatctaagagtggagctttttcagtcaagtcactttattctattctggagcccagaggttcttctttgttcccttctgatagtatttggagggcaaatgtgcctcctaaggtagctttctttgcttgggaggcttcctggggtaaaatcttaactttggagcaactccaaaggagggggtactctttggcaaataagtgttttctatgcctttctgaagtagaaacggtggatcgccttttacttcattgtgtaaagacgcgagcattgtggaatcttcttttctccctatttggtgtggcttgggttctctctggtttagtgaaggaaactctcattggatggcatggagcatttgttgggaaaacccgtaaaaaggcttgacaaatggcccccttatgtattttttggtcagtctagaaggaaaggaatttgttagcttttgagaatgaggagttttcgcttcaaagactaaaatattcttttgtatttaatctttggtcttgggttagggtgtttatggtttcgagcccttcttctcttgttagcttttttgagtggctaggctcaagtaaggataggggttttgttgtttatttcctcctcccttggtttcgagcctttaagctgcttttgtatactccctgtatacttagagggcactattttggtgcttcctatttccatttaatataattctctttatctatcaaaaaaaaaaaaaaaaaaaattcctttccctttggacattatctggaattcttgggtctcgactaaaacatatatatatatatattttttgcttgggaaatgacaatatatcaattctaaagaaaagggtgggtgttggcaaatagatttttttttttttttttgataaaattgaagggaaatcaattaatcatattcttcttcactatctcaaatcaagggttctatagaaattgttggtggtctccttatttggcatggtttgggtacttccttccatgactatggaaagaaactctattaagctagcatggaaactctattaagctagcatgactccttcgtaggtagaaatgggaagagggtttatagagacgcttctctatgcattttttggacatcgtggaatgaaagaaatgacaagcatttgaaaatgatgaaatgtcgaatcaagagttgaattgttttttccttagtaaactcttatcataggtgaggatgtacattaaaaatgaccatgccttggattgattttgttgattggttaggatcttattgtgggagagagttgttttttgtgttctcttttgtggcttggccattttgtacctgttgtatgcgtcttgtgtactttagtgtactttttttttttttttgtgtatatacatattttattgcctatcgattttttttctttaatactgattcaatagcatttaaggacatggctacaatttcttttatgatatattttttaatcagaaaaaacataatcaccgcataatgataaaaccaaagaaagacaaacagtcattccaaaacataaactaccttgaccttcctaattctatgatatctgagattttttttaaccccacaaatagaacttgttgaacttccattgtattgatagtaatcaaccatccttatcactgtgtggtaatttattcctgaagacttcatgttccaacaggtgcaactcaagcttggttgtaaagaaaacaattagatactcaaatgttgaagtgacaattcatagcatctttctttttcttgcttgatttcccttgtgatccattcttgcttcatatgagaccttgcttttttacatgctcgtgagcaaattttggttggatattttcaggaggg

SEQ ID NO: 13744 - DNA, 7480 bp, Vitis vinifera
  Intron number 1 from transcript GSVIVT01029035001 (locus G SVIVG01029035001) derived from phytozome v7.0 (chr-ID chr5 ; pos 11042057 to 11049536 reverse strand)
tgctattctatccagaagaaccattccatcttcacgtaagttcccaattattttttcttcatttttctggtttgattttcttatggtttcaaagaattggaatttgaggtatttggggtcaattgagcaggaatcagttgattgaagtctatcaattattggtgtttatggcagttgtagtgtactttttgaattaaggttttgagttttctagcttgggaggttttagagggagttgaatttaatctcggtcaaaagtacatcactcttcgggtccaagtgggtttaaggaatgagttctttggcttcgttgggttttcttggtggtcatggagatgtatgagaagtggtggatagagttgttggggtctgatgaaagagttagaattgcatgcttttgtgttgcctttggataagaaaatgacctttggtgcctcagattcatttgagattgctaatttataaatgacctttggatgtattttctaggatattgtatcttccctttattaaagttgtggctcttcagtacattctcatacttgtagatctgaagtggtaaaagaccagtttttaattggtcttggattgaataatatccagggtaaaaaattctgtctgacctgaatctgagctgaaccggaatttcaaatggggataaaaacttgccaccctatttgagagtctgctgctatttagccgcttgttgaagtctagaatgtctaaaattttattgctggaatttctcaccttgaaattactcttatcacttataagcacaggcgaccaaaatcttaaacaattttaacataggatagacattgtaaggaactactggtcctaaataccaacgatgtctaataattaacttttagaagatcttgaatttgtggtcaaaagaatgttgaacccacttaaccataagtcaaaaaaagagggagttgtgcaagtttaaatgctcaaagaattatagaagcaataggggctaatgggagagctggttgggaattagcttctctcatccaattacaatctgaataatctcctgcgatgttcgaggcttcagtgatgctgggaaggggaaggcagttaaatccctaatctgctaccaaaaagctgtttgggtttgcttgcaagaaaccaaatagattctatgtcactttagatggtgagaagtcttggagtgggcaagttatttgagcggagctctttagatgctaggggagtagcaggagatgtggtcatatatcgggataattgggttttggagctggtaaggatgagggtgtatcctccatttattgctgatttaaatgttttgaggctaactttatctggatgttacctgagttgtatactttagttttaagaaggtagcatgaagcctcttggaagggttgggggatgttaagagcttcttggaagatcctttgtgcatttggcaggggagatgtgagggtgtggggaagtcggtttaatgtggttagattcccatctactagggtagcccagttggttagggcaaacactctagtagtaagtggcacatggttttgggttcaaatcttgccattgatgataccttgaatttaccgaatactggttgttgcggggtagtcaacacctcaaggtttgggtccccatggagagtcttaaaggcttgacagtggaatgttcctcggttatcaaaaaaaataaaaaaatgtggttagattcccacatgaaagaagaaattgaagtgggtttaatgtggttagattcccgcatgaaagaagaaattgctttcgattttgtatattatagtattctttactaacttcattgaagaatttaatttgttagatttttgtttttggaggtaactttacttgtgtggtggtgagttttgtatctttttgttgagatttgaccactttctagtttaggagattaggagagtcgattatcaaatatgatgtggtgcttgttgccaggataggtctctaatctttggttttgttgtatgatggtggagtgagaataagagacaccatatttcatttagagaccatgtgactaaaaatgtgcaaagcttggagatttgcttttgtgggggtgtgggtagggtagggtggttaatgtggttagattcttgtatgaaagaagaaactgttctaattgtctgtatgtaggaggtgctttatttatttctttgaggaatttaatttgctagatcttccatttttaagaggtgagttggtgtggtggtgatgttgagatttgactactttttgtttggggattggagagtttctcaaaagtgatgttgtgtctattgatgaggtaggactctttgctcattcttttattttgttgatgaagattaggtgagaataggaagcaccctatttcattttcagaacaagtggttcaaaaacaatttcagaagttagtgatgtgctaaaggatcaagaggataagatatgttctaagggtgggtggttaatgttaaatctttctatttctctttggagtctaatagagttctattctctgctaagggtgtttatagttcttgggctgcaaaagtgggtttttcttcacttggatgcaatggtggaaaaaattctgacaatatactggctcaagagaaaagggtggtatctaggcaattggtgttgcctttgtcctggggaatcgaccagccacttgttaatatgttgtggtaaaggtaggaggttgtatcacttgtctttatttctcttatcctttcatggttgctttttaggtttgagccagaaggttttattagagtggaatgtggctttgtagataagaagcataagaaagttaagatacaactctattaatcttgttttgaaacatttgacaagagcaatagtggaacttttaaaagcttggagcatttggttctgttgctaaaggagtcttttattataatgtatactaggctaacaccctcgctcatgtgcaaacccatatgcagtagcagttatggattaaagataaatagatgggagaataaatggtaagagagacacaaactcaagactatcatatagttgataccatgctaggctactaattgactaaaaagcttaaattgttagtattataacatgacatggattgtggactcaaatcctaacagtttaagcttttaggaaaattagttgtctaacatggtataagagttttcaatatctagaggtcttgggttcaagtccttttccatctatttatctatctaattatttgatcatagttgtggtattagaacttcgttagtaggaggttatgaggctattagtttaaatctcattgcatgtttattttctcaattagagcacaatatatttaagcttttaggaaagttgttaacttaacatgttattagagctctggttagctggaggtcttaggttgaagtcgttggccgatctatttatttgtcaaattatttgtaaggatcatagatgtgtgctcacttccttaagcttttatgaaaattggttatctaatagttagaaaataaggccatagtatatgcaaaactaaccttttcttttctttttgttctagaaaggctggggggcaatgatttttgttccttgctttgattttattaattggatgggatctttttagagtgttggttttgtcttttcttatgcctcttgtgtactccttttctacttacgttgcaccatttttctcattgcttttctaaataagatttctttgcccgtaaaaaaatgcataacaaaacttttaccaactttctaaggttgcctatagaaaggggggaataagaaattattaaggtcagccatatgattccattttagctatttagttttaagtagaacaatgctctctcctaaatccttgaaatcatgtttcttcatatcgtgttgaccacactatttaccttgtcttcaattgctgctgcctttaacatcagtgaatatattcatttttattcaataatttttttgtgttcctatttttttttatcaaaaacaaaggatgcatttattaaggttaaaaagaactttagaaggatgagggaccctccccacaattacaaaagcctaatcaaaatgtgattgaactttaaaaatagagagaaatatttgggggaataatttttgtgtattgacccaatatgaaatgctttacacaattcctacttataggaaatacaaggtataataataggaactaaataactactctagctaacctacaaccaaactttcgtaatttacaggagttgactaattttatatttggaggataaagcaactagcaaatctctaagaattcgggttgttttgatccttttgtggtatttctccccctatttgtgatacatctatacttggcaattgactaggatttcctttatttccaatatcttgaacaaattgtccttgagtttttgttttagaaagaataggagaaaaaaaatgggagaagtggaattgggaagaattgaattaggtagaggaacaaaaatgtcccaaaaattgtcttcttatctctctttctctccctgaagataatttttgctaaagtaagattgattttccaaaaaggaggcatccatatttacagggatttttctggtttgaggattgtaacacttgtatccctttttgtttagagtataacccatgaatatacattttgcaactctaaaatcaagtttagattgaaatttgttgggtatgtaaacaaatactgtgcagctgaaaacttttaatggcaaatcaaattatattctagattctggaaaattttttttgaggcgctctaaagctgtgatatattttaaaactcgggtaagcatcctcttaatcaaataggatgctgttaaaacagcttctccctataaatagtttggaacatgcatagaaaacattatggcatgagccatttcaagtaaatgtttattttttctcttagtaattccattttgttgaggagtatcacaacatgtagattgatgttggatacctttctttcaaaaaatttcccaagtattcattaaaatattttgttccattattagagtgaaacatactaatttttgtttgaaattgattttcaaccatattgtaaatatctttgaacaatttttcgacttcagatttttcactcattaaatatacccaacataaccaagtgtgattatccgtaaaagtcacaaaccatttttttctggataaagtggtaacctttgaaggacgcttcaaatttctctcctcaattcttcagaaaatacttcgccaattaggggaagaggttgtctacctattattcttcccctcaatcaaattcaatgttgggcccaacaagaaacttgaagatgtgattgtcctccactattttcttgttgtgattgtagtcctctgtagatttccattcataattgagcaaatccaggtcttgccacaaccatatcagggaattgaagtactttgtgacactatcttctccttgttggatcccaccaagtttcaatgtcaattcataaacctaggattgattacccagatcaaagtacatctgttgatattgttccaaagttccttagttattggatagaaaatacagttggagttaatgtcttcatccatggaactcacgagccatgtcatgtccatggaattttctgcatcccaattcgcataagttgggctctcctttgctgataccttcctatctccagtcaaatattcgattttccctctccctcgaatatacaattgaatagactaaaaccaacttagaaaattatcaccattcaaatggatagtggtgatctggacagactgtgaatcagaattggaggcttggttttcaatgttttttgtcgagttagtaagagaaggaggcttttgtggaaaaaagggtataggttggctaaggaggcttttgtggactaggtcctagggtttcttttagaaagagtcaataatcaaatccttggtctaatatcataaaaacagagagaaatatttggaggaataatttctgttcattaactcaatattaaaatgctttacacgattccttcttataggaaatacaagacaaaataatgggaacaaataactactctggctaacctacaaccaaactttccaaatttataggagttgactaattctatatttatagaataaaatagctagcaaatctctaagaattagacaatatcccaacaggatcttctatttttcaaaaaactccactatacaaggagtctacacaaaaggtttagactacaaaataatttacaaagatgccatctcctcaagtcctaactaagctcctctcaaccctttagatttgtacaccaaatgtcaattgagttgaataacattgagaggaatgtctttaaaagccttggtgcaagaggcctagaaagaggaatagaagtgaagtaaatcccacaatttctctaacgttctccacttattctaaaaaattctagtatttctctctccccataccatccaaagtgaattgaacaagcgatcttccaaatggttttgcctttaatggagctcttcaaacccttatatgaaatgattatcatatcgcaaatactcttgggtggaacctaatcaatcttgacttatttgaatagacttcatcagagccctaaaattatcagacaatgtagaaatagatgcttaattgaccctccacctcccttatataaaatgtaccaattaggactaagggatttgaaaggtcttatcaactatagcatgtcatttgtatttaccttctcgtgtgccactaaccaagtagagatcttgaccttagatgggacttcagattttcatataaatttggctagggagaaaggaactatatctgatatattggacaaagccatgaagaatgattgaataatcctaacaaggttatttatcaaaaaaaaaataatcctaacaaggtcaatgatctctcgcatctatggtagataaagacaagtgtgcacaagtgagagatgacttgagtattttcaagtcctcagtctccaaatttgtaagtttgcgactgaaattttaggattcctctattcatccgtctaaaatctttgttctggctgcactgataattccttcttgaacaacatgattcagaactttcaattccataggttgagcccccaattttatgatgaaattttctttcatagacaaagacattaatttacttaaaacattttattttctgtactgttgattgaaatcagcgaattcatgaaaccagtcacagacagtgaggacaagtttagatgagttatgagtcagtctagtactggaactgtttcttgaaaagacgtgtatattttctaacacgtatctctgtttttgtgctgtgatatcttatctatttttatatgtgcttgtggagcaacattaggtaattatttgcctgacttgtttatagtgag

SEQ ID NO: 13745 - DNA, 1862 bp, Vitis vinifera
  Intron number 18 from transcript GSVIVT01008230001 (locus GSVIVG01008230001) derived from phytozome v7.0 (chr-ID chr 17; pos 4411890 to 4413751 reverse strand)
tgggtaagaatgaatttagttgggaactattgtggtttcatggaaatgcatgttattcatttttcaatttcattataatttttttctgtgttatatattactcctttgtatttatttttgtgatgatattgtcaggttttgctattttaacagatagcactagcacttaaaagtcataatttggacaacgtttgtttagttctaactttatgcagcaggttgcaatgtttaatggtacatttttccaactgcagttgagaacctaactcatcccatcccaaccccttgccagaggcaagcctcaagggctaaaatgtcatacctaccaaagtttatatgctaatgatccctctccacttcaatagtatggactacactgaatatttttttgaccctgcattcactactattggtaacttcatcaagaatttctgttctccacttacatattctattatggtgaaaccaaggggttgagaacttatgaaagaaactgcctgtagcatagtaaatccaattgcaagaaaaccatcatctgaaggtgaagtaaaaaatgcaaacctatgcaacaaagataaatagatccttttatctacaatgaaattatacttctggtgtacttggggttgggctgccttctttggcatttcttttatgtaatgatctttacctataaaaaatgtatttgctgtcaatatgaatgtgaattttgattaaaaaaatactatggcagaaaataaaaaaattcaattagttcattaatgaattataaaaatataaataaaaaagagggaaaaaaaaaattgagttggattaagttgattggcccatagagataatgtacatagataagaaagtgtggattcagaaataaataatgaaaaaagtagaaaaagatatgggttctgttcaatcatctattcaatcaatataaataaaatatgtaatatcatacacaaaattgagaatgtgtttgttaggaaagatttttgtctcagaggatgttagaacaaaaacctgcttgttctactggtagtcatctttcatctcctagctgtctgaggtaagttgtgttctgccattggatgagccttgacccaccctgtacagattaaaattagattacctatagcagatttcattaactacttttgtgttcggccattggatgagccttggcccagcctttacaggttaaaattagattacctatagcagagttcattaactacttttgtgttctgccattggatgagccttggcccagcctctactgattaaaattagattgactatagcagatttcattaactacttgtctcattcgaattttaaaatttaaataggtgtattcttttttcaaacttgagcaaataatacaaaagagataaaaggtttcttaaagctctgaaactttgagatgtgttttattatatttataaatgaagcatggcaaaaatagacagttaaaaatggaagtcctttggattctttattttatattttattaatattaaccagttttatattttattaatattaaccagttctatttctatattctggcatataccatagatgcttcaggtacctttaacatggattgatgtattataatgtttagggattcagggtatatttgattgttgcactcgcaataatatatgatgcttgctaaaatgtaggatttgcaccaattccttttatatgtttttttaattcatactgtgccattatattggattctgttgaatctattgttttatataaatcacttcattctatcaaatttgaaagttttgttaatgatgttgataaaattggaattcttaatcagattaatcaattagagagggacaagg

SEQ ID NO: 13746 - DNA, 4973 bp, Vitis vinifera
  Intron number 1 from transcript GSVIVT01000942001 (locus G SVIVG01000942001) derived from phytozome v7.0 (chr-ID chr1 ; pos 22102961 to 22107933 reverse strand)
ccaacgccaagaagcggctcctcagggtttggcaggttgggatttatgcttcattagtatttgttctcggttatttcgttttcttgcttgatttgtagctattggttcggtttatatcatcaatgcatcttttttagaatgcccatttcttgttttccaagattttgtggaattgggctttgagggtttatgatttttatgggtgtgtgttgcactagggtttatatatcattatttgttcgcttttcttttgttttcttacttgatttgtctgtattgttcttgcttattggatagatgcttcttttctagaatgcccatttcttttttttcaagattctgcacaaatggggtttcaggctttatcattatgatgtgcatgttgctcaagggtttatgtgttgtccctgaaagttgtattacggttttagtatatgtgtgtcgtccacttcttttctgctttctggttgatttatgtttatgacttttgcttgtatgattagttcatttgtttgggatgcctgtttgttgctctcaaagattctgggggggaatgggctttgcggatttatgactatgatatgcataggacggcttatgtattgcccagaaattttgttggggttttggcatattggggggtttatgatggcgagagtacgacaatggtgtgcccttgggagataacacaaattcgattttctttctttaaagaaaattcatgccacccagttatacgcagatagatttaagatagtggtgaaactgcatgcattgtgcagtctaacccagtgaactctctctgtatcagctaaattgattataggtattttctttggtttacagtcatgtttacttgatgtcatgatgcgtgttcagaggaagatttaggaggaattctaaaagcatagaaaagaacgaacgaagaaaaaagaatattcgcacttgattttaatgggtaattggtaactaatacttgatttacaggaaatgaatcagtgaggaataaatcactattggctcttgattaactggtttccagattaagtaggttttcatcttgtggatgcatgttttcataggtcttgacatatatatatatatatatatatatatatatatatatatatatatatatattggtcattctgaacttgagaattgtctatcttttattgttgaagaaataatgacattgttgccaatttcttattcatcgaattcttattgcataagtctgatgggtaattgagataaaatatacaagaatagtgaaatttttttgccaccttttccaatgaaaatttcatctcctttggcacgaaactcttcttcctcagcttctccctcacccctcatagagtcacgtttcttttccacttaatttgaatttatatcttacaacattctaataacattccttttcccttgtaatttgctgttaaaaattaatgaacaaacttgtgtcttggtttatttgttcaatttagtgttgtctgtgttgatattctcaaatttttgacatggattcttgattgttccataatgttactggctttagtgcttcacatgtcaaaatatttgaagtaacctacagaaggctagactaaatattgttcatggcaggatggattgtgttgcatatcatatcatttagtcagtatttagtaatatctagtgtggtgacttcagcttttgaaatggtaatgatctattctgataaaaaaactagtaacaatctgaggtggataaccttgctaagattacgtcaacaatgatgcagaaacggtttttgaggtttacgtttattaaacggatgctttgggtctaattgatatgatgaagtgctctaaaggagatgaaactagaaaaatatgtatttaaaaagtttaaaaaggagaatagaaaaatcagggtgcagagaatggtgtaataccaaagaatcaaattgttgttcctctcagaaaattggaatcatattatagggcatagtaggactcagtatttagtagaatttgacggaattgtaacatattttagaaaaataatgttaataaatgccaaattaactcaatgatttaagggttgagaattgttcagtctctaaaatgaatgagtagaatggataaatgtactgaaagagagagcttgttcttttgaaaataggaacccactaggccttttaatcgttatgaatttcaaaactttttttttttttgatagacaaagagaaaaataaattaaaacatgccaaaacagggggtgctctctacgtacacaagcagtatacaaagaaagccaaaacatggcaacaaaagaaagaaaaaacctagagaggaaaaagctaactaacaagccaatcacccaaaaaattcagaaaagagagatagtccaagtccaaaaactattgagaccactcaagaagagacccaaaaaaaaggttcctcaagcaagtatctgacatctcttcctcttggaacgttctttggtttcgctctccccaaatacacaaaaaagacaaatagacgccaatctccaaactgctctccttttcttccctagccccttaacttttcattttagaagcagatttctcactgaagccggaaacacccacaccaccccaaaagaagaaagcaacaaagtccaaagctccctggtcttaccacaatgaattaggatgtggtccgccgattcctcattctctttacaaagactacacttattaaccatagaccaacccctcctcattaacatatctatggtagaaattttaccctaaattgcttcccatgcaaaaaaaacgagttctaaaaggggcatacaaaccccaaacctctttggctggaaataaggggctattctcatcctttaaagacctataataagatttaacattaaactttcctctcctctctatcttccaaagtaaagaatcctccccttcttgaacctttactgcagaaacatgatccaaaaaacgagtcacctcctctaattcccaatcttggaaggatcttctaaagtgcacctcccaacccccgcctccacctccttgtctcccccaaagatcagccactacagcagaattatgggttgcaattctgaacagcaaaggaaaagatccttcagcttagaatctcctacccaaatgtcccaccaaaatcttgtgtgtctaccatttccaatacgaatactagttctaagaaggaactcctcctaaccctttctaatgtctttccaaaagcccatcccataagactccctcacctctctagtggtccaatcccctttctcctctccaaatttaccaacaatgactttcctccaaaaactctccctctctagatgaaatctccaaagccattttcctagcaaagtatgattgaaaaccttcaaatgccttaaccccagccctccatgcctcttatctttgcaaataaccgtccatcttaccaagtggatcttccttctctcctccaaatctccccacaaaaactcccttggaattttctccaatctaagtctcactttccttgggattacaaaaagcgacataaaatagatggggagatttgagagagtgctcttaatgagggtaagtcgacctcccttagaaagatatttttttttccacgtagccaatttcctcttaaatctttcctttagaacatcccaaactccacacaaattatgaggggctccaagaggtaaccctagataagtagtagggagattccttactttacacccaaaaaccgcaactactctatccacatcctccactccctcaactggaataatttcacttttctgcatgtttatttttaggtctgataccacttcaaaacaaataacaacccacttccaaaattccaactggtccttgttatcctcgcaaaaaagaagagtgtcatctacaaacaacagatgggaaattgaaaccccttctccacgtctccccattaccttgaaacccctaatgaaacctttctcctcagctcttgatattaaactgctaaaagtttccataattagcacaaacagataaggtgagagtgggtctccctaccttaggcctctaaacgttgagaagaactctgtgggagtgtcattcactaaaactgtcattctcacagttgaaatgcagaataaaatccagtttcgccacttgggtccaaaacccattttctccaaaacggaaaaaaggaacctccagtttacgtgatcgtaagccttttcaatgtccaatttacacactaaacctgcaccggcgcttcgtttccttgagtcatgttgaatataatgtatatatagtgtacaatctttccttttttaatataggttacatgtatggtagttagttctcctaggcttgtatatatatatatatacttctcaattgtaagtagttaatctcatgaatgagaattaaggtttttcttctttctctctctctcaacaagtcaatcgccctcattagctaccaaaattgcatccaaaatctgcctaccccacaaatgaatttcaaaacttatagttggactagaaaggaagaaatcaatatattctctctcctgaaagtagaacttaaggaagtttcaatatttatatgttgctaaaccttaagtagaactagaaatgtaagacatcaatatatcctatgttagaaaaaaaaaaaaaaacaacatatcttgtagatagatgttcctaatgacttaatttttataccgaatcgaatttggagatatcaaaagaatatctagttaagaatctttatatatgatatttactttgtttcacataactatatatgtatatatattttgcgtagacagacatgtagactacaaaatggtgcacagagattttgatttgcatcttagcctaatgatttctcagtcctacttataatcatttttcgaaatttcaatatctgaatttttggaaattgcttctgtgtttcttgcaga

SEQ ID NO: 13747 - DNA, 16130 bp, Vitis vinifera
  Intron number 19 from transcript GSVIVT01024527001 (locus GSVIVG01024527001) derived from phytozome v7.0 (chr-ID chr 6; pos 9155865 to 9171994 reverse strand)
cagtgtgacgaggtaactattattgtagtgaccatgctagattttgtgaatttcccaagaggttactttatatgcaccacattacatttattgcaagtattcttttttatatccatcatgttctatttattgtctgccccctgccccctcccccaacctgtcttttttatttttattgtagctaatttcaaacttgttctattctcttaaaagaggaatttacatttttttgtacttgtttcattctcttaaaaattttctaatttcctttttaaaaagaaattatttgattaaaaaattagaacttatctaataataatataacaatttttagaaattgtatttaagaaaattccttgatctcacttctcatttttagataattacttgttttttttttttttttgcttgaaatctcatagataattccattggaatttttcttttatagatttcattgatattttgagtagtactttaaggagtaaagagttttcttttggcatttattataaaattttacttaaaaaaaaaaattatacactgagaaatatactagcaacttgcctcattactatagaaattttaggatgaatgactaaagtccattattctttcattcatttattgtaggatatggtataaaaatctatttttggcaggacttttatagctattaaccttgtaaactttagtttccatatcttttaagggcatcaaggacactaaaactcttccattgttatgtgcgagtcccctatacctttttgtcttggaatttcaatttctataattacctttttttatacctattaaagagttagcaatcctttaatttatttatttttatcataaacaaatatgcattaatatggataaggaatttatgtaaaggacatcccaattttacaatttttttttttaaaaaaaaatgatgattgaaccttctccaatatacaaaagagatctatacgacgacatagtaccacatgaggatataaaatgtagagcaactcatcacttttatgagggttaacatatccccttcaaaaagaaaccaaatcaatactcctcttcttgctatccaaccccttttaatctacatattgcttacaaatcgagttaaacaacattgagaggagtgcccttaaagtttgtggtacaaaagacccaaaaagaggaataaaaatgtattagatcccataatgtctcagaagtcctccacttatcctaaaaaatctttgcatttatttcccaccacacaatccaaatcatcacgagacaagcaattttttgtaagactttgcctatggtggtgctccttaaacccttaaaagagatgatcatcatgtcacatatacacttaggaggaattcaatctaagttggctagcttgaatagcctatgttatagaagtcaatggacgatgtaaaaatatataataaatcaattttcactcctcataaacaaaatacaatagtcagtactaagggctttgtaaggtcttctcatctgtagtgggtcattggtgttactttcttatttgccactagccaagcaaggaccttgaccttagatgagactttggatttccaaataaatttagctagagagaaggaactagatctaatagattggctaaggctaagaggaaagactttactataaatgagccggaaggagacattgaccaaattcttgcatttggaacaaatagtgacaaatacacaaaagtaagagaggacatgagtctttcaaggtcctctatctccaaatcaatgagaaagtttaggtttcaagaagaaggggaaaaaaatgcctaggatagatgagataggtagatttctagttgtgacaaccctcaaaagactaggaaattgagaagatagttagaaatcctcttatcctctttacttatcgtgaaactttcgccttaccttttaagatgtgaagctttggtcattgaaatccacatgtcttttttctcggtgagttccttagagcacttgtagtctgtctctcatcctaactgctattgctcttgctaactttctttgaaatcaaaagttccctctaaggttagggcttttgcgtgaattatggctactgagaaagtcaatatgaataatatgtcataggggagaaggccttacaaagttgttggactagatcaatgtgtcatatgcttcaagagtagtgaattagttgagaacctctttgtgcattgcgagtagcacttggactttagcataggttgctttgtttatgtgggtcatccttgtgttggaactttagcaatcatctaaagttaatgttctttggcgattggctatcttatcttatctttcatatgatttatttaagccttttttattgacctttttttttttttttaatcttatcttctcctcttaagccttttttattgatgcttttatgcatacctgtttgaatatactattactagattagaacattgtttcctactctaagagatcaagtgagaaaaatattctcaattgagtgcctccttcaatggttcggtaaagttacattttgacaaacattgaagatttctgagaagtgaatttttattgattctcgtgcattttctatagaatacaacatggtatatatacaagagaatggtgcaatcagccaccataaggactgaactcaatcttaactaattagagaacaaaatctccactaaacaaggaaaggcattaaactaggaactaataacaaaatacctaacatggccttaacaaatccctagaattccttactaactttaagctagaattccgcactcaccctcaagctggtgcatggatattgtacatgtacagattgtgactcggttctaaaaagttagttcttgaaagagctttagtgagtatgtttgccgtttgggatcttgtaggagtatagaccaacagtacaattgccttctcaatcttttcggaaatgaaatgtcaatctatcttgatgtgtttcgtcctatcatgatgcacaggattctttgcaatgcttatggcaacttggttgtcatagaacatcttaataggcttctcagtagatattcctaactcattcagcagtttctgcatccaaattccttcgtaaataccaggagccagagatctaaatgcagcttctgcactacttcttgagactacggactgtttcttgcttctccaagtcacaagatttacccatacataggaactatatccagatgttgatcgcctatttgacacatcacctgcccagtctgcatctaagaaaacttcaacctctctggtatcattctttttgtacaacagtcctcttcctggggtcatcttcagatacctcaaaattctattcacagcttccatgtgttcttctgttgcgttgttcataaattggctcacaacaccaacagagaatccaatgttaggtcgagtatgtgaaaggtagatgaaacgtcctacaagtctctggtatcttcccttgtcaattggtgcactatccttctcaattcctatcttcttggttgagtccattggagtgtctgtaggtttacatctaagcatacctgtcttgtttagtaagtctagaacatacttacgttgggagacaaatatgcctttcttagatcttgccacctccacactgagaaagtatttgagatagccaaggtctttgatttcaaattctttggctaagcgcttcttcattcccgatagttcctcttcataatcacctgttaagatgatatcatcaacttgcactatcaggactgctattttcttttctgaagagaacttcacgaatagtgtgtgaactgtttgacattgagtatatccttgctttgtaactgactttgcaaacctgccaaaccatgctcaaggtgattgtttgagtccataaagggatttcttaagcttgtacaccctgttgttgttgaaagaagtttccagtccaggtggtatctccatatacacttcttcctccaagttaccatttagaaaaacatttttgacatccagttgatgtaatggccaatcttggttcgttgtaagagataaaagaactcaaatagtgttgagtttggccactagagcaaatgtttcttgatagtctatcccataagactgagtaaagcctttgtcaacaaggcaagctttcaatctctcaatacttccatcagccttatgcttaatggtaaaaatccacttacacccgactggtttctttccatcagaaaggtcagagattacccatgtgtcattcttctccaaagctctgatttctttgttaactgcctttctccactctagattcttgagagcctcctgaatagaattaggaatctgcacactatcaagaaccgaaacaaaatcttggtaggtgggagacaatccatcatgtgaaataaatctgcagataggatggtctgtgcaagttctaacaccttttctcaaagcaatcagaatgtttgaatcatctacaaatggtactggcttctcaagatcagtagctcctttacttgagtgaatttgagtaggacttggactcggttgagattcttggtcatatgtgagaggagttggttgctctattgttctctcaggccttttcctcctaatgtagatacgaaactcattatttgcagtttgtggtgatttagagtaattatggaccggagtttgaggtgaggtagtaggaggatgactctcaggttcaggttgtttaggcattgaaatttgaactggaatttgattaatgacctctggttgttgactgacaattggctgagaagtaggaggaagtaatggtagggtgtccccaagatcaagtgtcgcccaaaactaaaatgctctcatgttctccctttgcatgtcggttttgtggtagtaagcttgatgttcaaaaaatgtcacatccatagagttgtatacccttttggtgtgaagagtatcctataaaggtacatttgatggatttagggtctaatttgctatggtgttgctgatgtatatgaacaaatgctaaacacccgaatatttttggatctaatgaagagatgatttttgtatgtggaaagatctggagaagggattgacaaggggttttgaatttaagaattctggatggcattctattgatgagatacgtggctgtaagtactgcctcccccaaaaaatgtttaggaacgtgagtggaaaacatgagggacctagctacctctaacaaatgtcagttttttctttctgcaatcccattttgttgaggggtgtcaacacaaaaacttaggtggactattcattgactcatgaggtaactacccagaacagacttgaagtactctttggcattatcagtttttagaacttggattttggtctggaattgagtttggatcatggaattgaattttgaaaattttggccaactttagatttttctttcataagaaatacccaggtcaatctagtgtgatcatcaataaacatgacaaaccactgtgctcctgttatattgttttttcctgagggaccccacacatcactatgaatcatggcaaataggtgagatggtgtatatgaaagactggggtaactactgcgagtatgttttgcaagttggcagatttcacaactgaaaaattatggacttttattgatgaataaagatggaaacaatttttcaagatacataaaatttgggtgaccaagacgataatgccataacatgacctcattatctttattgacaaaagaatctaaaattgactgactcttaaacgacacacaacttgcattttgagtttgtcttcttagaggagtatcgcccttgagaagatagagtccagagcacatctcagcactgccaatcatcctccctgaatccaattcctaaaatttacacaagtttgagaaaaatttagcttcgcaatgaagatcatgagctaatttgttgattgagagtaaattatagtccaaattagggacatggagaacagagtttagattcaggtcgtttgtaaccctgattgagcctattccaacaactttggatagagatccatcagcaatcttaactgtatatttctcattacaggggttgtactcatgaaatatggttccatctcccgttatgtgatctgatgctctagagtcaataatccacggattcgagtgttgtttatttactataaaggcatttgaaaaattacctttttgtgccaacatgcctgtaccagaggctcagttatgggactgagatagggagttttgactcatgagttgttgaagcatctcaagctgttctttggtgaaaggactggtcttggttgaggttagcttgtcttctgagacaacaacactatgggcactgccttctctgtcattgactggtttggatggcttccaatcagctggtttgccatgaatcttccagcaattttctctggaatgtcccagtcttcggcagtggtcacaccaaggtctcccatttttctggcggttttcactgttggtgtttgatggaggtcctcatgctataagggcagatccttcgattgttggggcagaattctgagatcccatcataacctttttccagctttcctcacgacgaacttctgagaatgcctctctaatacttggaagaggtttggtccccatcactctccccctaacctcatccaaattcttgttgaggccaaggagaaacttgaatgttcgcttctgctccacgattttccagtacagtgcagtgtcttcaggtcacttccaggtgtgaacttcaaacttgtctaggtgctgccaatgacaagaaagaatgttgaagtattgggtaacaaagaaatctccctgccgaaggtagtgtaaggtggcttcaatctcaaatatttctgaagtgttttcagaatttgagtatgtctcccttgctgcatcccatatttctttggcaattccatagaggagaaaattctctcctatgttggtattcattgaattaatcaaccaagacatcaccatgtgattctcggtcttccacactctgaatttgggattggtcttctcagggatagatacttcaccgatgagatattcatccttgccctttccacagacatacatcatcactgactgaaaccactggagaaaattatgcccgttgagtttgtgatgagcaaagatgggttctcggctcttccatggttgttcatcgttggcgtcatttctggattggaggtcacttcagatgtttttgtctctcagtagccatgatgaattttgtgatgttggaaattagggttttagagggaaagctctgataccatgaagatttctgagaagtgaatttttattgattctcatgtattttctgtggaatacaacatggtatatatacaagagaatggtgcaatcagccaccataaggaccggactcattcttaactaattagagaacaaaatctttaactaaacaaggaaaggcattaaactaggaactaataacaaaatacctaaaatggccttaacaaatccctagaattcctcactaactttaagctagaattccacaaacattttttaggtaacctaggatatttagacatgggaagcatggcaaagattattgtggtacaatgttgagggttgtggaaagattggttcagattcactactgaaaattaggaagtattattcatatttagaatattgtattttttaaatttgaatttgaattattttatgtgaataagttattcccttaactagattagaccgttgtatctagaaatataattgtagatctcgtgtagaatgtattgatgagaatcagaaatttattctcaattcatctttgtgttcctcgtattagagccaccttaaacctaagacagacttttgagtgtttttggttgaccactcaaaataaaaataataataataataataaataaataaatcatcatttatctggttgtctaccatttttttttttttctgttttcttaatctagtttatagtcctaatttcttgttttttttctcaatctggtttgtgtgtactggatttgcaaaagcaatatgttcatctttaattcttctcttccttgaatgatttctctacaatgtttggagcatcttctgatgaaacattggggaaatcctttaacattcagacttcttagaatggttaaatttcatcaactggggctgttgaaagtccaatcttgcagatcactactcattgactgaatccacaaaatttcttgtggtggtcacaatctgtgaagttgttcattagaggaaggtgtaagattggctatttgattggtacaaaacataccccaaaatctgatgatcctgcataccatgcctgggatgctgtgaattctctaattttatcatggcatgttagccctatggaaccacagattagccaaacatatatgcatctcagcgctgccaaacaactatgggatgcagtgagtgagacatacacagatttgtgcaattcctcgcaagcttatgagttagaaacaaagattagaaatacaacgcaggggaatatatttgtaacaatttattactatatattgaaaagtgtggtaggaacttcacctgttctatgaccttgaatggttgtgtgctgaagacaatgctcaatattagaggattgtggaaagaactgtgttatggaatttttagccagcctgaatacagatttggatgaagtgagaggttgcgttctaggaaaagagcctctgccctccatcaataaagcattctctaaggttagaagagaagagagtcactggggggtgatgatgagaaaaaattccaccagttgagaattcagcacttaatgctattgcaccaatcaataaaaccactgcaacaacatacgatcagaaacctgcagcccagatatcaaaaaaacttgatgaaaagcccaagatctagtatgattatggcaacaagccttagcacactagagagaagtgctagaaattgaatggaaaaccaacaaattagaaggaaaggaaacttggacaaaagaatagtagcggaatgctagctacagcagaaactgagattccttttagcaaagaatagcatgagcatctctacaaaatgatgattcaaatccaatttcaagtgtaccctcctgctccttggctcaaacaagtagtgtattcactagttccctaaattcagcaccatggatcattaattctggtacatctaatcacctgactagtcagtcacttcattaccacttgttctccatgttttgatcatttaaaaattggaatagcaaatgacttgtctccagttgcacagaaaggttctatatttatctctgaaaatctaattctcaaatacgttctccatgttcctaatctttcttgaaatgttttgtcagtttgcaaaataacctaagattctaactattttgcaaaattttgtgagactcatttacttgatacactacgacaaaatggtgtagttgagaaaaaatcatcatttacttgaggtggctaggtctataatgttcactacaagggttcaaaaatacttatggggtgtctattctcaaagcatcttacttactcaataggatgcccactagagtcttgaaatttgacagtctaaatagattattggtcatcttcccacatattcacatctttacttctctacctcaaaaaatcttcgattgcattgcatctgtccacatccacaaacaaaactgttctgaacttagtccttaggcgaaaaagtgtgtatttgttgggtattctcctaaacaaaaagggtacaaatgctataatcttattgcaaagaaatttgttatgagtaaggatttgacatttttcgaaaaccaaccttcaccaaaaaccatctttaagggggaagtattgagagagaagatcctttttaggagatgatgtgacctttactcatgtcattaccgagtgacccatcaaaatcccactcagagatgttatccaccgagcctttacccattgtccaacctttatctaatggaccaagcgttatataatctaatttaagggggagaaccactacaaaaacaaactcaaactgagttgagtctctattctcaaaggaaaaataattagaatagagagtcatagtcaaacatatgccaaaaaactcctccaaacgatggctctttggatgaaacaggtatcccttcaccaaacccatgctcaattcctaaatatagtaatctagacaatgttccacatgacctcaatgtctccgttgcacttagaaaggacacatattccagcattatgcttcctagtgcaaagtatgtctcattccattgacttttaaaaaaatataaagttgttacttttaatctctctagtgtttaattgcctaaaactatataggaagccttacgtcacactaaatggaggatgacaatcatagtagagatgaatgctcttacaaagaatgatacctatgaaattgttgaactacctagagaataaaggactataggctgtcagaggatatttatggttaaataccatgcaaatggaagcattgataagtacaaggcaaggcttgtaaacaaaagattcacccagacttacagaattgactataaggagatctttgaacctattgcaaaagttaattcaatttgaattcttaagaattttgagagaaacttctttttcttcttatttttctcaatgaaaattacataggtatttaacatacatgacaaggaaagacttcctaaaattagctaactagaatcctgggtagaggaaagaaatctcccattaattcaaggaacaaaaacagaaaagataagaattgggtgacattctacctcaaatcctattaagtaaggaaagaagaattaaaaacaaaggtaataaatagttgtaaaaatcagttgtaaaaagactgaaaaaggaaaaacaaaattccacactccccctcaagctaggttgtaaatattgatcatacctagatagcaactcaagtcttcaaaattggatcttggaagtgctttagtgagaacatcaactgtttggagacctgttggagtgtaaattagagtgattattccttcctctatcttctctttgatgaaatgatgatctatctccacatgtttcgttcggtcattgtgaacaaggttcttggcaacgcttatgacagcttcattgtcacaaaacatctccataggtttcccaatggaatttttaaccatattccttcacaaattccacgagtcatagctccaaactctgcctctacattgctctaagctacaacggattgtttcttgttgtttcgccaagtaactaaattttcccacacataagtgcaatgccttgaagttgatcttctgtctataactaatccaacccaatttgcatttgagaagatttcaatattccttttccttgtcctcttgaaatataagctcttgccaggtgtcatcttgagatatcttaatattcaatacacggcttccatgtgttcctctattggatcattcatgaattaactcaccacactgattgagaaaccaatgtcaggtctagtatgggaaaggtaaattagttttcccacaagacgttggtatcttcctttgtccacaagagcacttccttccttagttcccaatttgactgtgtgatccataggtggatctgcaggcttgcatttgagcatccttgtctcttttgataaatcaagggcatacttcctccgagagaccgcaatacccttttttgacctaactatttccattccaatgaagtatttgagatttcccaaatctttgatttcaaactctttagcaagaaaattcttgagtttgcatagttcttcctcataatctctagctaagatgatatcatctacatatacaatgataatggtcattttccctcaagagaaaatgtttaacaaacaatgtgtggtcagattgacattgagagtatccatacctttttacaacttttgtaaatctgtcaaaccaagcacgtggagactgtttgagaccatacaagaatttctcgagtctgcaaacttgattaatatttgatcttgtctcaagacttaaacggatttccatgtacacgccttttagaaatgcattttgacatctagttggtggagagagcaatctaggttaacaaccaatgataacaacactggatagtgttaagtttggcaacaagagaaaatgtctcttgatagtcaattccataggtttggatgaatccctttgcaaccaaatgaaccttgaacctatccacactcccatctgccttgtacttaccatgaatatccatttacacccaattggatttttccctttaggtaattccattatttcccatgtctcattcttttctagagctcaaatttcttctccaatggcagccttccatttaggaatttgaagagcttcttggatgttgttaggaatctgaacatctgtaaggctagcagtaaaggcttgaaaaacaggtgacaacctatcataagatcaaaaattatggattaaatgatttgtacaagatcgtactcttttcctcttggcaataggcagattaagatcatcattctgtaacccattatagatagggtcagaattagtgttacttgggaaaatttcacctaggtttgaatttggttcagccttatgaacttgcttgggatgtgttctttgctttgtttcctcttaagtcttcttccttgtgtagacaatgaactcactgttcttggcaagttgtgagtgaactgaatgaggaggagttctaggtggcttaatcgtggtgtctaaagactcattgattggaggacttggattatgagggatatgagattggggaatatgagactcaagtgttcgaatgttgttggttatgatttttgtttcccaaaactgatattcctaagtggtatgctccccctgaatattagatttaggataataaggctgattttcaaaaaatgttacatccatggagttatatgattttttggctactggggagtaacatttgtagcctttctagtagttagtgaatacccaagaaatatacacttgattgctcaaggattgagcttgctttggtttggttggtgaatgtgaacaaacacagaacaattgaacactttttctggaatagtggatagaagtcgagtattcaaataagatttgaggacttgacatggtgtttggaaactaaggacacaagaaagcattctattgatgagatagttgcaataagtgcagcttctccccaaagggtgtctattttttctcttaacaatcgcattttgttggggaatttcaatgcaagaactttgatgaatgatacctgtgcttaagaggaaatctctcataatggagttgaaatatcctctcattgtcagttttcaacacttgaattttcatatgaaattgggtctaaatcatgttatcaaaatttttgaaaatttgacccacttcaaatttttccttcataagaaatatccaagtaattacagtatgatcatccataaaagaaacaaaccatctagaacctatcacgttttttatcatagagggcccccaaatatcattgtggatcatagaattttgagagaaacttctttttattcttatttttctcaatgaaaattacataggtatttaacatacatggcaaagaaagacttcctaaaattctctaactagaatcctaggtagaggagagaaatctctcattaattcagggaaaaaaaacaagaaagatataaattggataacattctacctcaaatcctattaaataaggaaagaagaattaaatataaaggtaataaacagatgtaaaaaggctaaaaatggaaaaacgaaattccacaaatattattatcccttgttgcaattttgagttggttgatgcatcaactcaacatgaagactgcttttctaaatggagagctagagaggaggtcttcatggacctaccattgggttttgaaagcatgcttggagctaaaaggtatttaagttaaagaagtctatctacggactaaaacaatcaaaggcctagttcgattgatttaccaaggctattaaaaagtgtggatatgagtcaagtcgatcacacattgttctacaagcactcaactacaagtaagatggtcatactcattgtacttgtggatgacattattcttatcggtgatgatgcaaggaaactaaaggtcttgaagaagttccttacaagagaatttgaaattaaagaccttggagccctaagatatattttgggccatcaagtttttgaggtctccaagaaggcgatatttgtgtcacaaagaaagtttgtatttaacttacttgaggaaaccggtttacttggttgcaaaccaatggaaaccccaatggagcttaatcttaggctacaaccaacaagtgcaaataagtggaaaccccaatggagcctaatcgtaggcacaattatcgctcttacctagtcgagcatagcattgtaatgagtgtagtgagtcgatttatgcactcacgcagggaagaacatttcgaagcaactaaccgaattctcatttaaaagggtaatctggaaggggtttattgttcaagaatcgtggtcacttgtagatcgaagcttacatcgatgttgattgtgcaggaaatttaacaagtcaatagtctacatatggttaccgtacatttatgggaggcaacctagcgacttagagaagcaagaagcagattgtggtagctagaagcagtgtggaggctgaatttagagtagcaactcatgggttttgcaaacttttatagctgaaaaagttacttgaagacctcaaagtgagaagtcctatgcctatgaagctctattgtaacaataaagcaacaatcaatataacatataatctggttcaacatgatagaaccaaacatgtagaagttgaccaatacttcattaaagagaggttaaacggtggaatgatccacatgccttatattcttggcaaatgcttttaataagggctacacaaggggtacttcgatagcataactggcaagtttgggtacaaaagacattttcgagctagtttaagggggagtgtggaaagactgatttggattcactgttgaaaattaggagattcattgctaaaattagaaagcattatccctatttagaatattgtactctttaaaattgaatttgaattattttttgtaaataagttattcacttaactcaatttagaccatcctatctataaataatattgtagatcccatgtgcactataataatgagaatcagaaattgattctcaattcatctttatgtttaagggcttatcttaaatcccctaatggggattgagatatagaagtagagatactagcatcgttggaggacttgttgcaggccaaagctttgcctctacaatctaagagtggagaaagatcttattgttgttattttctggatgtctattagggagagaggctcatggtagttggatggttggctttgcaaaatcttaagtagtcctagagaggttggtaccctttctattgggttctgcattcagctagtcaaccccaggacaggttagctaagtgaggagcaacgaagcagatttcttttgttggagtccatacttctctcagtgtatggagcattttagtatgtgtgtatattgctcattctgcattcagtttgtgtagttagtttagtttttgtagagcaatctgcttttcaactttttgatccatagttgtatattttagaaggatagctcatccttctttgaattcaccatttcaataacaatgaattctgttgtccctgatcaaaagaaaaaaaaattagagatcttatttttttgcacagcagggtagccaaaccctgctctacaccattgaggttcttcctttgccaacatatttggtctcctatccctctcttactgtttttctattcattggtcctatttattgaaatactttaggatttccttttctcaattctggttttcagattattgttctggagaacgggacggtgattgaaca

SEQ ID NO: 13748 - DNA, 11769 bp, Vitis vinifera
  Intron number 1 from transcript GSVIVT01017087001 (locus G SVIVG01017087001) derived from phytozome v7.0 (chr-ID chr9 ; pos 4073334 to 4085102)
attatatttgtttgtaaaataaataaataaaataaaataaaatatatatattatttttaaatatttaattttataaaaaaaaagttatttacaaaataaacaatataaaaaaattgataaaaataaataaatttataatgaactaattaatataaaaaattttacaaataaaatttagtctcaaatgactgatttctttttcacttggaatcgtagtttttttttatagattttttattagataaaaaatttcaaatcaaacaatatttaatacattagatttcttaaccaatatgttcattttaaaaaataatttagaactcaaaaaaaatttaattattaaaaaaatttacaaattaaaattagtctctttaatgaatcttctaatttctaagaaaatagacacatatactctagtcttcctaaaagcaattattgttaagaaagacacataaaccctagtcttatagtgcatttatccaaacatcacgacaaacacacataaagggagttgatggacgtaagtcaaccttctggtttgccaacaatctccccagcaacacttctgagatttgaacttgtgacatcgactcaaataccatttgaaagatcttaagcattatcaactctcttaaaagcaattactgttagaaaagatgtatactctaattgcattcacttaagcacccacgatgaacactaggaaagttgatggacgttgtaaaccctccgatctaccaaaaaaaattagtccaaaatacgttgttaaaaaaccgacactaaatatatgtaataaaaaattcatcttatttatatttaaaaacattaaactttatttgtttgtagattcattttaaatagaatattattaaccaattactatttttaacacacaaaaaaaaaaatcaattatgctttcacaaggattctaccatccatatttttataatatatgctattttattaaaaaaaattattattttataatattagtatttgtattttgtaaaaaaaaaaaaaaaaaaaaaaaaaactattcatttttaaatctgtcgactaggaccatcaatgccttaattgctaggtagatacttgaaaaatatggtacggattacccttgtcttcactccacacatatgcccaaaggacccaccttttgttgaggagtcaaactcacaaatccccaatcttaaattcataatatgacttatcatattatatgctaatttttctttttcctttcttttttttcctttccatttcattataatttccttgatatttgaatgtaatttctatcaattcattaaatttatgatatcctaaaattatcatctctctatactttcatttaaaaaacatgtttactaaagtaatgcaattttataaatataaagtattaaggtctatttgataaatgttttcaatgacaatttctaatttttttagaatagaaaataggaaaacatgtttgataataagaaaattgttttctattttttatcttcaaaaataaaaaaataaagtatttttagaaaacatttttgaattattttcacttatttgtgaagggttgtttttaaaatataattatataaatatgtagatgtattaaaactaaagtactagacataaaaagaatatttttaaaatatatttaaaaatattttaagtttccaaatagaattttgttttataaatttgtataatcccctactaaatatgatatttataaatattataatattagtccattagatgctaaggttttttttttaatcaatttaatttcattgatatttataataattattaaatatcaccaaaagaatttccttttttattaataaacatatcaatagtcaatttctctattgttaaagaatttattcaagatttgaagttgattgttggattatggataatgttggtaaggggaaaaatttaaccacctattaattgtcatctgtactaaattgacatatgtcttcaatttgaaaataaaaatttgtcatatgttactgtcacaaaacttatggtacaagaaatttatggtgaataaaaagatgtgaggtgacattaatgttttaaatgatataatgacatatgtccaccatgtgacacttattaaatttttttaaatgtcatccataactttaaataacatcatgacttgtgtcacatggggcacgtgaccgaggaattgtcttcccataaaatagataataaataaattaagggtttattacactttaccctccaacttatatcatgttttacacattgttccatcgagtttaatattgagcaatgtacttgtcatactttataattacatgcagtatacattttttgaatgactatgttacatttttttaatagaaggtgtatatcctttccacgttaccgagggcaaaagagtcatttttctttttaaatgagggcaaaatggtcattgtcattttagaaccctaaacgttagcccttttctcctctgtcaatcatttctcctagttgctgctattgaatccccaacccaaagccctagaatcccatggaagctaatgtagggtttttcactctctactctattcacccctctcatctctatgcttcatctctcttaaaaccctaattcagagttgtcattggatttttcaatttcaatttgtggaattttcttgaatcaaggtcatgacgatgtggattgatgttattttttattgaattgcttgttttggatgtgagtgcattgattgattggggaattcaccgacttttaaaagaggcggggttggattctccacatgttgttggtttggattgttttttgttttggattgggttttggtaatgttatgtttggttgcggagaaaaaaagtgaggctatgagagggaaagacgattttgtgaattcaagttaagtttcgaatttatcgtactcaactcaactgaatgattgtacgagtttttgtttgagtttgtttttatgtttttctttggaaaattgtagaaggagatcttattggattttaaatttgatttttttttcatttctttcaataaattccaattctgatttgaaaattggacgaattaatgttggatttagatgtgtaggattagaatttgggtgggttttcaaattatttttattgaattcaaattttactgaattgaagaaacagagttctgatgggggatgccacttcgcatccatctacaattgctatgacttcaaatgaatttgatgcccgactaaagaagctattgagctatcatttgaaaaccctagtttaacacctgaggagattgtggaagcatcgagatcaattgtcaaagttgcagctacggcgattagggttgctactgaagagaagactgcaattataaaaagaaaatgacatttttatcatcattcacgtggaaagcatatatgtcttccatttaaaaatgtaacaccatcactcaaaaaatgtacattgcatgtaattataaaacatgaaaggtacattgattgattttaaactcgatggggtaatgtgcaaaacacagtataggttaaggggtaaagtgtagctaaataaataaataattagcaattttaatattaaaataattattgaaataaaataataattagtctccttaatagcaagatggtttctcaacttttataaataggaccttcgtagctttaaggaaacgcattacactttaaaagtttgaggagtgctcatgtaagtcaaatttgaacatgtgaagattttcaaggttttttttttaaggtgcctttgattcaaaattatgcccaagatgcttagatggggtttttatcttttacaaataagagaatagtgtggaaagtatcgataattttacaattcaatcaaaattacaatttttattcacatttttctatctaagggaaatttgtgtgtataggcttatgacactacaaaagacaagaaatttattatgacacctacaaaaagataagaaatttattatccacaataagaaatctaaaaaaaaaaaaaagggagaattatgttttgggggtagatgggcccccaaattaacaaaaggtttatgtaacttttcaaattgagcccaagatctaataaaagtatgaaaattgagttgaaggatatcatccttcagtatttccaaaaatgtcctttattgattttgaaaaaaaaattaatatttttgaaaaatacttttatttaatttaatatttttaaaaaatacttttatgtaatttaatattttttaaaaataaatttatttaatttaatattttaaaaaatatttaatttaattttttttaaatactttaatttaatttaatatttttgaaaaaaaatttaatttaatatttttgaaaaaaaattatttaatttaatatttttgaaaactacttctatttaatttagtatttttgaaaaaaaaaatatttaatttaattttataaaatattttatatatattcttaaagggtatatttgtccgttactatttcatatccttcaactcaatttcaagagttatattgtaacgacctgctcccaaccatgtagatattgtccactttgggcccaaaggggccctcacggctttaaaacgcgtctacttggttaagaggagcctctacatatatagcgccaggaacttcctcccctatccgatgtgggacatcacaaataccccccatgcagacacaacgtcctcgttgtgtcccatgggattgcggggccaaacagacaaagccaaacaaacccccacaccggggtcggggatcggttctgataccatttgtaacgacccgctcccaaccatgtagatattgtccgctttgggcccaaaggggccctcacggctttaaaacgcgtctacttggttaagaggagcctctacatatatagcgccaggaacttcctcccctatccgatgtgggacatcacatatatagaccttttgttaatttgagggttcatctacccccaaaagataattctccaaaaaaaaaaaaaaacagatatggtaagcaaggaattaaatctaccccttttgatcctatcaaagccattggaattggaacaagattcaattttttttttctcaagatgattagagttctttaggtgattttccttacaaatccaggaatatccttaactcttataaaagcgaaaaagaatgtaaaaacacctaaaaaatggtaggagaggaattgagtgattaaaaattttcataaaatcattaaattaaaaccccaaatccataaatcataagtgaaataaattaaagagtagatgaaagagaaatacaaacacttttatagtggtttaagaacctgcctactacacttctcaatctcctattcgagtgagggttataccatccaaggcttcaacccaagtcttcaatctttcaaacttgattcatgacttcaatggtcactacaataccttgtggttctcaaccaacttgaatctcaatcactcaaagaacataaaaaattgatattctcaatcctagtacaagtgtagctcaatacaaagaaaagaaatataaatttcaaagagtgtattaaaggatttgcaagtgaagaattctgggagaattatcttttaggggtaaatgggcccccaaattaataaaaggctcatataactcttcaaattgagttgaaggatatgaaatagtaacggataaatataccttttaagaatacatataaaatatttttttttcaaaaatattaaattaaattaaagtatttaaaaatatattaaattaaatattttttaaaatattaaattaaataaatttatttttaaaaaatattaaattaaataaaagtatttttaaaaatattaaattacataaaattatttttaaaaatattaaattacataaaattatttttaaaaaatattaaattaaataaaaaatattaaattaaataaaagtatttttcaaaaatattaatttttttctcaaaatcaacaaaggacatttttgaaaatactgaaggatgatatccttcaactcaattttcatactttcattgggtcttggactcaatttgaagaattacatggaccttttgttaatttgggggcgcccatctacccccaaaacataattctcccaagaattctatacatttaaattaaaagctttaaatgagagaaagtaggtgaaaaacaattcaatgcaagtgttcttttctcaataaatgtaatgaaactctttaatttatagaaaattagctcaaacactcaaaataaaacaaaagtccttaaccaatcgagctctaattcgattggtgggctagttgttggtacaattaatgctttgcatgtgatagttggtgtttttaatgcttgacaagacttctacttgctaaatacgggctaatggaagaaagagaaaattttgtgcaagcttgactggttcttaattgggaaagcctgactagttagactagttcaaagccccttaattagctacaaaaaaaaaatgtaaaaaatgttgccgttttcaagttttaaccttctagtaacttaagtatctcatctaaaaacttttataagatatttttgaaagttttgaatttaaggttttgaactaaaatgcatattcatccaatttaatgataataggtcacttttgatttaaagcaaggatgaatgaaaaacatttagaaatgtataaaaatattttatcttaagtggacccatgagattcatcttacataggttctctgtttaaagatctattttttcatgacttttgaatctctttaaaccatctttgaattaaatgataaaacttgaaaactttagtatacttaaccttatattataatcatcaaaacataattagaagaacccttggactgacaagaatgacatggcttactaagtgaaatcacacccaaccatatctcaaaaggcaactctaaaatcttttttgctaaaaaggacaagtatagatacatgaaaccttaaaagtaacaaaaccaacgacaattgatcttgctagtatttctaatgccattatgttggtcagtacaacgaatttagttcaattagaaaagcaaattgcttacataaataaacaaattgaagtccttacctaaaccatgaatgaaaaagatacctaaaactttgcttatagataagatcaaaaggatggaagatttgagccaaattattgtcgttctatctacaataattttaccaaaaggagttattctcaaggtgttaagggtttagactttatggtatgacaatttgagtgattgtgaaatgagacataaatcatagatagttataaacattatcaatccttccattatttagatttcaaactttagaatcattaattgttcttggaatttaagtgaaattatgatttcaaaatttagggtgtgatagtttatgacaaataaagtatcaaagccgacatatattctaagttgtcatcaagaacctatcttaatatgttgtgtatgtataatcaataagtgtatagaacaattgaaagtttgaaaatgagagatatttgtttgttacctaagtacaagttgtaaaggagattactcatggtaagttgtaagttaatgctaattaaagcctccacctacgtaatacaacatcttcaagcagatacaagtaatttgtttttcaatagtaaatgttaacaattaattaaggtgtttgatacaggattttactaaggcttgttggtaataagtgtatgcaacaagatattcaacattacccctaatgaacttatgacaatgggcaaatattttcaacatttagaaattaaaccctaaatgactctttttgaaagaaaaaacaaatttgtgaaaaactgagtctaagtttagggttagcttacttattgggaagatatcacgggatagcactcaagttctaaaaaagcctttactaaacaagtggaggtcactaatacaattaattaataaatcattaataccataaaagaaaaatacaagtgtacatgcataatgcaatagtaaaaacatattataaaaatatacaaaattgatacatgagaaatgtacgaagaaatgcttattgtttcaaatatcacaacacaatttcaagaaattttcaaataatttatttacattaacaacaattttaaattagtgatttcaatttatttattcacaaggttttaatttattcacaaaatatttgatttttattcacattgaattttatttccaaatgaaaagactttctcttgtttctattgaaagtaaattcacttatttttttttttataagaaatgatttttatttaccttgttaagaagagagattaatttttacaaatttatttgaaaaagtatttcattttgatttttttttaaataattttgaaattaaaaataatttttacaaatttatttacaaaataagatttgaacccaattttattaatatgataatttttttacaacttttttttccaaaattatttccaaccaaagtgatttttataaattatttccaagccaatttttattaaaaaaatatatatttttgaaaagaagaattttgccattttatttaagagaattttgttttgttttgttttttttttaaacaaaacaattttacaatttttatttaaaaataagattgttgcaatttttattcaaaatactctatagattttcattttttttaaatcacagtttttgttattaaaaaggcattttggacaatttattaaaaacaactattttctggaccatttcataaaaaataaaaataaaaatattttctagatctttttttatttaaaaatgattttttggactattattattattttttaaaatctgcatcgattttattcaaaaaataaaagatttctggactttttattaaaaaaaatttctgaaattttattaaaaaatgatttaaaaaaaattctggacccttttttatttaataaaaacattttttttggactttttaactgaaaaatattttccagactgttttttttatttaataaaaacattttctggactgttttatttaaatgaacaaaggaaataaggtacgacaagtataaacaacccaaaatcagaaggccatgcccaagtccaaagcccaaatgaatgcattaaccaagctccaaataatagatccaaatgttgaacactcaaataagaaatatcaatctgcacaacacaaacccaatttgacatttaaaatttaaacccaaagactaaaacacatcaacctaaattcaagcccaaagtgataattcaagtctgaaggccatgatcaagcctaagatgagggttagggctttggaggaagaacgaagaggaaggatgagggagagctttgtttagggcttttaggtgattgaatttacaaatctacctttatttatttaatcacgtgtatgacacatgacatttccatctattgaaactaacactgtctaacaaaaagattcagtgctagtatttaagaaacttggagggcaatatatttagttttagacctgatgaggtaatgtgcataacatgtaataagttggggggtaaaacgtattaaatctaaaaattaagctatatatgtgagtttctaacgggttgggctcgaaggaaaatgggttaaaaatgaaaaagaatgggcttggggtaaaaattggtggtctagagcattgttgtttggttacttcctcatcccctattttaatttaagacgtgaatgacttgaagtgtcaatgttgtaaatggagcatccaacatgctatagatagctggatgaaggttctcaaattgtcatattgaacctaaggaggaaaatgtcacgatatttcggcgatatatcgccgaaatattgtgtgtcgaagggtatccggataaatctcgagaaatcggagatttttcctcgatatacgcgggtcaacggagtcaacgcgctacagtgcacctccccaaacaaattgcttccgagggggggctaactcgcccttatgatataaagtgcattaaacatatatatacttcaagtccttatataaagaaaatgttaaaagaatattttaaagagcaaattaattatagttattttataattaaaagcaaaattttattttaattaattacaaaaaatataaaaattatataattttcttcataatgtttttaatatcattaataattaattaaatattaaaaaattatatatatatatatatatatatatatatattataatttattttatattgtttaatacaattgaattaaatggatcatattttaatattaatatatattttaaaattagacatattgtaatcaaatatcattatattatatgtaatttaataataaatgtacacttataaaattcatatttttatcgatgcatacaatattattatcaaatatgataaatcatgttattcatatatcaaaattttcaataaaataactttaaaatgtctattatacttctaattatattattatgaggttttctttatattttcatgagtttttaacaattttaagtaccaatatttttttccaaaatatccgccgatatatccaatatatctccgatatatccgatatatccgtaaaatcgaagtaccgatatatccgtgattaccgatattttcatccttgattgaacctatatttacatgattgtatttttaactatataaattagaattaattggataaaagggataaaataattttcaaaattgtgaatttaactttttgaaaaataattcattttgacataaatgttttttactatttggagtatttacatgtaagtttttttttcttttttttataaaaagagttgtgttttttttataaaaaaaaatagtggggacatttttgtcaaaatgaggtaaaaaataatgaagggttaaatttccaaaattgaattttggatatccttttaatcaaataatcctataaattatgtaattttggttgtttggtttattctattgaatttctaatgttaggaattaaattcaaatgccaagaaaaagcatagtgaaaattggtcatatcacatcagccaaagccatctaaggtgccaacaaagtgtgaaggaaaaaaaaaagtgttttcatgacttatttaaaaatatatgtaaaataagaattcatctcttcatattttaaatcatatcccatgattccaaaatactaaaatctatttaaaaactatttttaaaaataaatttttgtttttaaaaaataaaaaactaattttcaatcctcaaaagaacttttgagaattttttgacaaaataataagaatctgtgtggtttaaaaacagtaactgtttttaaaagattttaatactatttgcttgttttttgaaaataatttttaaaaataaagtgaaataaaaaacaatttttagataataagtaggagttatttttattaatttttaaaaataaaataaataataggtttgtttaaccatgaaacttgtttttaagttaaaaaataaaaattaatttttgaaaataagtttccaaaaatataatcaaaatgaccctaattttctcacaacatgttataaaatcatgtttaggaactttttttttttaaaaaaaaaaaaaaattgttctaaaaaaatcttttttgagaatggtgtttgggaactgtttttaaaggctcaatttttttttgtcaaactcttccg

SEQ ID NO: 13749 - DNA, 6285 bp, Vitis vinifera
  Intron number 6 from transcript GSVIVT01010695001 (locus G SVIVG01010695001) derived from phytozome v7.0 (chr-ID chr1 3; pos 11927974 to 11934258)
cgcaagctctaccctgctttaaacctacctgagaagtaaggttttattatttgcagggcgttatttctagtttgcattagtgccctttgaaatcaatattgcagcttaggcaatgctacttctttttgtttgttttgggttttttcttttatttcttgataggctaatatatacatattctgtaaagaagtacctagaaaaaggggcacaactctggtgcaagtagtattggtaggttagaaatgggtgagagagagagagagcgagagagggcgagagagagtgcgacggtgagtgcgatggagaggagggggacaatagctcggcgctgtgaaggagaaggaaggagtgcagtttcgcagtggaatccaagacgttcgagattgttgtggatgatagaaaaggaaaactccaagtcctcatcgtggagaaggaggggtttcgtcatgggtcagattgggatcggaaagcctagggtttttcttagaagggctgaatctctgtatcaaggatgagaaagaagcaagatggggaagggaatggaaggagcaagggagaatgtactctatgacgcaagggataaacagagcgggggggtttatctggctaggggtctccaatctagagaggaagaggttctgcattttcatcccgagaggcagaagggataaaagggggtggatgatcatggcggagaagcttcaccagctagtaggtgttcttggcagaaaactagaaaaccaggaagtaaaggctgtggggaaggctgttctgggaagatcgtatgcaacagtagtgaaacggccactgtcaggcaacccaaatgtaatcgtagtgaaggctaaaagggaggaatcaataggattattacagaaattggaatattgtgttgtggtgagctggaaagacaactcagggggagaagaagattttgagaaattagggcaattttgggcaaaatcttgggatctaaaaggaaatttagggttggctaagttggaaaaggaaagagttctgctggaatttgaagatttggaagaggcaagacgtgttgtctcctctggaaatcgcgcgatgggtggaatccaggtagggctagagcattggagccctaggagtggatgctgggcagaagaggaagaaagaaaggaagtttgggtgagaatagttgggctcccaatctcgttatggagtccggtgatcttgaagagagtgggggacgaatgcagcgattttattacagttgatgaacagacgaagacgatgggtgagcttcagtgggccagaatcttggtgaaatcgagaggagagtttagaccgagcgtcctggaattcgaagtggaggaggaggtttacgttgtgtccctatggtgggaatgccgactggtgctgaggaggaatcgcagtcaagaagctggtcgacaaagcattgaggttaggggtgagggtgcctcatgcgcggagcagcgagtggcggaggagcgggtgagagtgaggctagagacactgaactcgtcagatgaatggacgggtgagcagggggtcgagtcgggtctggcgaaggcaagccaagatctaatcccgacaacctggatttgggcctcaaccagtaaatcattacatgggtcgcataccttaaatccaattgcgggcccaaaggagacaaggagggttggtgggcttggcttggccaacgggtctatgggccttaagatgaaaggcgtggagggacattcttatttgctgggatagaaggtctatggacattctagattgggaggagggacattttacgttattttgcagattctggaatgtagataatggggctgtttgggtttttacaggagtgtatgaccctttctccaaagtggaaagggatgaattatgggaagagtctggggcgattagagggctgtgggaagacccctggtgcttagggggggattctaatattactttgtttctgagggaaatgagtagtcagaggagaataagctcagcaatgaggaagtttgctgagattgtggatgatcttgggctggtggattttcacctacaggggggagaattcacttggaatgagggccataataatcaggcttgggcaagattggacaggttccttgtgtcccctagctaggtagaccaattcaatgggatcacccaaagcaggctacctcggccggtatccgatcatttcccaatcatgttagtggggggtgggataagacgaggcccgactccattcagatttgaaaatatgtggcttaaagttgagggattcaaagatcttgtgcatagctggtggcggggaattgatgttaggggcagtgctagttataaactggctactaagatgaaggaaatcaaacagaagttgaaagtttggaatagagaagtctttggaaagctggaatgtaacaaatcctcagtcttgcagcaggtggaattctgggataagaaggaaagtgagagaattctgactgtggaagaaacagagcttaaaatagaggcaaaagaaaattatagaaaatgggtgcttatggaggaaacccattagagatagctttcaagggaaatatggttgaaggagggggatagaaacacgggtttcttccatcgcatggcaagcgcccactgtagaaataactctttggagagaattaagatcaatggggaatggctgctagaggagtaggaaattagggaaggaattgctaatgcgtttcataatttgctctcagaagatatggggtggaaggcggacattgggagacttcagtttgatcagatcagccaacaagaagctgagaacctagagaggttctttacagaggatgaaatccatgcggctttgatggagatgaatggggataaagcccctggtccggatggctttactatggccttttggcaaagttgttgggattttgttaaagagaagattctagaaatgttcaaggacttctacgaacatagctctttcctcaagagcctcaacaatactttcttggttttgatccccaagaaaagtggggttgaggaccttggagattttatacctattagtctcctgggggggctttacaagttattagctaaagtgctagctaacagactgaagaaagttgttggaaaagtggtttctacttctcagaatgtctttgtgagaggaagacaaattcttgacgcatccttaattgcaaatgaagtgatagactcatggcagaaacgaaaagaaaagggtcttatttgcaaattggatatagaaaaagcttatgatagcatcaattggaagtttttgctaaaggttttgcaaaagatgggttttgggtctaagtgggtggggtggatgtgaagctgcctatcctcagctaaattttcagtgttggttaatggggtgcctgcaggcttcttccctagcactaaaggccttagacaaggagatcccctgtctcattacctctttgttatgggaatggaagtactacatgttcttattaggagagctgtggagggggtttttttatcagggtgtaacataaggggtggtagtggacccctttgaacatctctcatttgttttttgctgacgacacaattatattctgtgaggccagtaaggatcatctaactcacttaagttggattttactctggtttgaagtggcttcaggcctaaggattaacttagccaagagtgaaatcattccagttggagaggtggtggagatggaggagttggctgttgagctaggctacagggtggggtccttaccttctcagtacttgggtcttcctttaggggctcccaatagagcgccatatatgtgggatggggtggaagagagagtaaggaggagactagccctttggaaacaacaatatatttctaaagggggaagagtcactttaataaaaagtactttggctagcatgccaatctatcaaatgtctattttcataatgcccaaggtcgttgctagaaggcttgagaaagtgcaaagggactttctgtggggagggggaaatatggaggggaaaattcatcttgttaaatgggaggtggtttgtacaaacaaggataaaggtgggctaggccttaggaagctagccatgttgaacaaagctttacttggcaagtggatatggaggtatgcttgtgacaaagataatctttggaaacaagtgatcaaggtgaagtatgggcaggagggtcttggttggaggccaaagaaggctaatggggcggttggagtaggggtttggaaggagatttggaaagaattagagtggtgttgggataacatgatgttccgagtagggaagggcaacacgataagattttggacagatgtgtggtgttctgattcagcactatcccactgttttcctcatctctttggcatgactgttcaaaggaactcaacggttgaggaaatgtgggatcaaagtttgggtcaaggaaattggaacctaatttttttgagggatttcaatgattgggagttggatacggttggggaatttctccatatgctgaggggtcttaagccctctttggaggaagattcagtcctgtggaggcaaggaagaagtggtcagttcagggtcaaggaagcttatagattgttggctaagtctaatgacacaggttttccttcaagaagcatttgggtggcaagggtgccaactaaagttactttcttcgcgtgggaggcgacgtgggggaaggtgcttactttggatagacttcaaagaagagggctgcaacttccaaattgttgcttcctatgtagatgtgaagaagaaagtgtaaatcatatccttatacattgtacagtggttagagctttataggatattgtttttggtttagttgatgtgaaatgggtttttccaaaaactgtaaaggaggtcttagctagctggaagggctcgtttgtggggaagaaaaggaaaaagatttgggactccatttcattgtgtattttttggacggtgtggaaggagaggaatagattagcttttagggggggtgtgttgaacgtttagaagttaaagaatttttttgtctgtaatttgtggagttgggccaaattgtatgtaggtgaggaggcgttctcccttataggcttcctggagtggatagcatccacctaaagggagtgattctttttgtctttgttttttgaggccttagccgccttgtagactcctgtatactttgtggcgttttgcctttttaatgcatatcctttacttatcaaaaaaaaaaaaaaaatactctggtgcaagtagtagtatgaaagtagcactaaaatgtaaaaattaaaaacaaaaggaaacaactacatcaggaaggcaacagacacaataaaacaagtaacctgcattggatgaatatgtgatacattgattccatcatttggttgcacagacaacaccaattgacaatagactaaactaagaaactgttattctaatgagactgaaacaacaccatcaacaaattattgagattttcacaaaaggcattgccttgagaatcaaactttggagaggtgaatcctctccatctgaatgagctgggaagctgcaaattcgcctaccttgtcggtctgtgttatcctctatgatgtgcctgtgaatccagtaggttgtagcttgcatttacttgggccatggctggaccactgtgtcttactttaaatactattgtatgtttgaaatatttcacatgtatgtgtagcctttctccattcacggtggtcataatggcatgtctatgctatttcaacatattgccttcttatgaattgcatccaattcttaatatgttatcgaagtgctaagggtctaaaagtgcttcagtgatcggggctcagtaattttctgatttatattatttattctgttttggccgatcatatccacaaatgtgttttcctgttgaatgaagttggtgaggtatgagaacctttccttgtttcaaactcctatcatcaatattgaccttggtggagtttcttccgattcactgaatactttctgccatttaggtctagttaaacccatatttcattcttctagtacaaaagaactaatccccattgcttggggatcttctcaattacccaaacagatgtgttttgtgctttttaacgtttcattgcatataggattaagcttcaggtccatgtcctaagagttttcttttctttagtaccagtcgtttcactgattgattaagaaaatgtgtttctgtttcatttgtggcag

SEQ ID NO: 13750 - DNA, 6965 bp, Vitis vinifera
  Intron number 1 from transcript GSVIVT01016922001 (locus G SVIVG01016922001) derived from phytozome v7.0 (chr-ID chr9 ; pos 2576764 to 2583728)
ggtacaaatatctcttcgtagttgttttgtaacaatgatagctctacattcctttatttctttctatgcaatatcaatttatttttttatttctttttatgtaaatcattgtataaaatgctttattccttttttgtaaatcacattgtataaaaatgctaaggacactcaagaatgtaggtctaatgttttatttaaatcttttgcctgcaacttctttatggtatcaaagcagtcatttgtttcaaacatggccatcaaggatgaaccatgtctaaccgttcaatcattgtgtgaatttagttctgatcaaattgagctccaacaatttctttctcttgcaaacccaagtactaccattgatacaaagtttgggaatagctcacatcatatcactacaagtgagataccttgggcagaaacaatagagaatataggagaacttagaatcctcaatttgtaacttggatgaacaacaatggtctcttaatgtcttggcttcttggaaatacaactgaagaagtccccatcatggttgttagtgtggatacaaccttaaaagttttaagtacattggaggagcaatcgttgtctaacaccaaggaaaatgaagaaagattgggatattgtctttttaaagtaaagaagggttcttaacccctagatgagtatatcaaggagtttaaatcattatttgacaatctagcaaccattaacaaacctttgtcaaatattgacaaatttcaattagctcatggtcttggtttaaaataatgagacttttgtactacaacgttatctaaaccaccttatccaacactaagtgtatttattctttctctacataattatgtgtaatagaacatttatgaaaaagaagcaagtggaaaaggtggaggttttagtttacaaaagagaggccttgctcctataggttgggtaaataatcaaaactctcctaaaagaccaaacaatgtccaacaatggagaatactagatggaaatgggtaagacaagaactactatgcttctataagatggcaaataaccaaaactcctaactaaaaccaaatagtgttcaacactagagaaaactagataaacatgggcaaaatagcaacaaaccactagtatcttaccaaatttctggaagggttaatcacatggtagtaaagtgttataaccattgtgattatgcttaccagaaagaaaaacattacaagtccttatagttatgaatctaaatgacaccaatgaccaaaattttatgcaaattttggagttacaagacacatgacaaataatgtaagtaattatcctcttccaaagtttataaaggtcaagatattatttatgttggttatggtaactattaggatagagtcctagaaaacatgacataatgtaataaattttagattcattaataaatttatttatttatgattttgtttccatttagtatcctttttttgcattaatcctttatctgagcattctcgttcatatcattctcattgtacatgacttggatgaaatagaagttgtatagaaaatacaagtcataagttccttacaaggtgataagtgattcacaatcaactcatgaatttaggaaatctagtagaaattgcagtgcacttaattggagagatgatttatcttgatcatcaagatgactttccaatggtgcatgcactagtgtatatgattatacattgaataagacctatattgaatcatgacattaactatcaagtagtcaagattcaccaacctactatactacaaagactcttaaccttaaaaagatattaagtatatatcaaaatcaatatgaggttttgacttataagtgagactcctaatgtacccaagtcatatatgatgcaagtgatatgagcgtgtatgctcaaataaccaattaatacaaaatggataataaagaaaaaccaagaaatataaataaataaataaataaataaatttattaatgaatctaaaattgttacatctaatacaaaatggataataaaaagaaaccaagaaatataaataaataaatttattaatgaatctaaaattgttacatcatgtcatgatttccagggttcatcccaataatcatgttcccttaaatgatcctaagtacatgtgatcaagaaaataatggtcatagtaatttttggagtagaatttgacatatatgctttatgatttagagtatgtcaattaatcatataatagaatgatttataactcaaagattggagaagtaatcttgagaagttgatgacattaccttgttagattatgaacaccaatttataaggggtttgcatgtagtggatagtaggtgactaacctaagcttaatttgtctcgttgcaatatgcataggatactaaagtgtaattgactctatttagtggagtgttaagtcaatttcataattggattatgagagatccaatatttttctatcaatcccaatggtcctcacttaagctcttgattcatggtggcacgtttaaaagagaaatatttctctttcttgaattctttaataaagttttacctttttttttttcatttattcatttttttcattttcttggaaaccaatcataagttatgaagagaaatcctctaccatatttaacgtataacttgatggattcaaagatgctaacatgaaggtgaagaatataaagaaagagtagcaagaacatggtaaagttctaaatgatttttttatgttttcatatttgaattggtatgataaatcctctatgttagttcactgtggataaagcaaagaggattcttaccaaggtactagtaattctctagttaccttaatttgattctattgttaataaatctaaaggtttattatacaaaatggatataggcttttgattgaataaaagtaaaagttaaaattaaccattatattgaattggtttaagagatttgctttcaaaaatacaattttgaattttgaatataatattgatcttcacattcaatttgacgtcgaattgactttaatcttgaaccctagattttgtttgttctctttttaaggattcaacaatggattatgaaactctctaaacacttttttttgttctatttatttcattaaatattttaggaaatctttatccatattttcattcttattttaatttaaaaacaattaaatacattaatattgaccctagaggacaatagctcaaaatggtacaaagttgtactaactttatctttggtttttcttgatcaaggtcatcatgtatttaaacttgaacattttaattatacttatgttatactaccaactgggcatcactataaatttctagtattttagctcttatactttgagaagacatagattggttagtaacactacgaatttgaccacattattggtggctttgaaatccaattggacagattgcttaatttttatcacattaagggatataaggcaaacccctatcccaacaaatctggctattgacaatctatccacatacaatctcatttctttattgttggaactcaaatattttgtcatgtttgttccttgcttatttgtgaagtttgccacaaaattcaacacaacttgggcctttaaagatatcgatcgatgcatattgaatctcaaacttgcttagttctaccaaccactttatcatttgtcctaagaggtcaagtttatcaaggatctcatagtggcctcttagtcactacttcaattgtataagcttgagaaagcatgaccttagcaatcattcatacacaatgagaaggtcatctactcattgagtgtgtatcaaagttttggtatctactatggctttatttgtacagtagataggtttcctactttcttacttttttttctttttttttgtttaactaatggttgactaagaagtcaattgattgaaccaaacgattgaccagttcaagaaaattttcaaagtgatataaaatttatctcaattggttaagatgcaacctcaattagtcaagctcttgtgacctaatggtcactagttgtaccttttaccatacaatagctagtagccagtttgactggttggttgactagtgaaccctaaattgtgcctcacaactagtttgggtttccaattcctatttaaagatttttaactttttatattaatgagaaaatagtgttaaattattcttgaatattatttgagccttaaaggagtgtttttagagtgaatttgctttcaaacttgtatttcatcttaatgcaccattcaaccttagtttccttgtgatccattgtgccaaaatgtaaactaggagttttattcttatcaaatctgtcttgtataccttataaggtaaccttaagtttagggtatcacttaaggaaaaaaaatctaaatgttaggtatcatttatgatttgctaagtgtgggatatcacttggagaatttgaaagtgaattggaatctgattaatccaagtataaaacttgaagacttgatttagaagtcttggtatagtgaatctcaaacttgggattgaagttagaataaagtagacgtaggctaggattaagtcgaatcaccataaatcttgaatttgcattcctcttttccctacctgatttgcttgcaattgcttctattttgatttttatcgtatcattacttatatgatcacttgtattctataattgttaaatttacaaaaagtaataatcaccttattcatctctcctctaaaatgatcaccttagattgatatacctataatcctatcaatatgctttttatcaatatgcctttataaatatggaatttcttaatatatttctaaagcacttttaaaacaacattttagattcaaaatcaccccacaattgactaattcaagtcacaatgagatgcatttcttctctttacaaaagtacaattgttgataatttccaaagcatttctaaaagaaaagcttatatgtcgtagtactaattaagaaaactcttgaaaggaagattaagttaacgatgttaaatctatgaatttttaataaaaggcttaaagggaaggttaagtcaattataggaaatccatgaatttttaatctttgatttatatattatatattaaataattactaacatcatcttattaaaagggattactaataaaataaaatatataaataattttaaaatttaaaaataaagaatataattattatttttacaaaagaaactcaaaatattatttttctatccaaaattatattaagtaatatgtctttgataagaaaatgctaaggcatcaattcaatataagttgaaatttgaatttgagttatcaataatataattaaaactattctcgaagaacatcatttttttaaaacaattttcaaaaactcgggatgaattgacaatggattgtacttatatatatatatttaaaaaaaactatttttgagaaccgttcccaaacatagaaaatgactttaggttttatggtaaatcattaattttaaaatataatttcaaaattcaactaaaattgtctcttgaaaaagtaattcggaaataatttcaaagctattatactttaataaatatttaaaaaataatcatacttttgttaaaatcatattgatatcattaattatatttacatataattaatgatatttttagtcaagggacttgtaatttaatcatcaatttcatttttagttttaattaaatgattataatattttaaaataaatataaatatatatttatcaaacaaaatatagttaattaactaatataacttactcgacaatttcatttattttaaattaaaaaaaagataaataaaaataaataaataacaaaatttataaatgaaaatgagaagatatttgttaaaattttattattatttttaaatttaatgttgagttaaatgatttttttttttttttctaatttcggtaaatttttcaaaattccaatggtgacccaccacgacgagagagggcgatggcagtgcacctcagtccggcaaaagcagatggagagaggaaggcagaatgctccgcacgcccacacaaagatagaagcaaagagagaggagaggccagcatgcagcaattgcagttcgccgtcaatggaggaaactcatctgatgtttctcaccacacaagtcgccacatcggcaccgccggcacgaagccgctccacatccgggatcgttttgaggttagggatgaaatgccctcaatctcctcctgttctcatacacctccaagactggattggactgatgtctttcctccgcttcatcatgagttacggtcctgattcttgaaattctcaggtttggatacggtttgttgcacttttgctgtgatttgaaagggaaaaaatgatttgtctcggtaactcgaacgattcaactgagtgtaatcgattccggaccgagtctctgtttgagatggtatcaccatatcagatatcggactcggccgagtcgtaccggacttagtcaatactttgaaccagtggacatacctacattctttagtaatattttgagttgggcaaatttttgtttgctttagtttacagtttgaaactgtctttacaataatctgtacagtaatgtcataatcttcaatttgaattaaaaaaaaatttaatatataaatagtttctcagaaacttcaatttgaattaaaaaatttataatatataaatagtttctcgtgatttagatattcaacgctttttcatgggcaggtatctgcaagtggaaatgggtgatcgatggagatataaacttgtattgactcttgagaaccgggtgatcgatggagatataaacttgtattgacccttgagaactgggtgatcgaggctccccttcattgctgaggaggcaaaggaggaga

SEQ ID NO: 13751 - DNA, 10154 bp, Vitis vinifera
  Intron number 1 from transcript GSVIVT01036997001 (locus G SVIVG01036997001) derived from phytozome v7.0 (chr-ID chr3 ; pos 9120254 to 9130407 reverse strand)
gttcaatgtcaggttcagatgcagtggagttttggctgactgagaagccaaactatgaccacaactccaactcgtgtgttggtggagagtgcctgcactatactcagattgtttggggtggctcacttcatcttgggtgtgctagggttcagtgcaaaaatgggtggtggttcatcacctgtaactattatcctcctggaaatattgagggggagcgtccttactagtctctagcttacatgcatgcttattgcttttcatcaattaataaaatgaaaatgaaattaattcattctcttctttttcgcaattaatcttaacctaaaattcatagaatccaaagaaaaaaaatgaaattgtacctctcatttttctgcaagtttcgggtaatatatcatacagatttggatccttaatctaaataatatggtttattcattgaggagtgactgaatcaggaaagatccaacctgtcaatattggacatgtcacccaaaacgtcagcttttgctaaagtattataccaacatttataatccttacttgaccccttcatctggatacagagggttccctgtttctataaatcatggaccatctgatcagttgccatcttccagcaatcacggagtcattggagtttctacagatgaatgaaagaatgttcaaggcgtcctggggaattttcagtatattaatggatcagcaaggtctagttcttcggctccccctttcaatacatggcatcttgaatccggggttcccgtgatggattctgcatcttttgcctttgtccagccacagtacagagggaatataatgctctttcaatcatggaagtaggatctcacggaagtgtgaggaacagatcaggtgctgttgggctggattctgttttggcacataatcatagccatttggttcaaggaaactatattggccatccttttcagccttctggcaatccctgggttgaccaacaatcaggcaatcatggtagtggtgggggaactctggcctggaatcatggacctgctttaccttatttgcatgggagcaatatcagtggaggtcctacagaggctgggaatgtgggtattcagggatatcatgatacatctagtggcagaagttccacaaattaccttcaacctcctgtccttcaccggcaccataatcttcattatccaccaccaccacctatgcaaggagcaagaagccatttccaccctcaagtagtggcatcttcgaatagacttgctccacctactgggattaggatggaccgatctcatcgagggggagccgcatctgaggcaacatcgagacatggaaatcttccttacttgagaatgctcccagcagaagaagttgccatactagatctttcaggatttaatgaagcaggggaagtaagcactgggttgtcacaggaatccattacaaattgtctaaaaactagaacttatatatcttcaacttgtctcaatctggaagaggctgcaagtatagattaggaaaatgattcttgcgttatatgccaggaggagtatgagaatgaagagaagattggatttcttgattgtgggcatgagtaccatgcagattgcttgaagaagtgggtgctggtgaagactgtctgccccctctgcaaagccccagcaatgacttgttcataacgcgtctaaacaatatcaagtttcaaattccattctctttttgattagttgtttgaatattttcctgctactgattcacaggtgggttggatgatggcattaaagcccccattgttgtacacattaaaatttttggacattgatagcaagggttgtgggtgggcctcacttcttgaaagttccttttttttttcttccttcagtctctgactatgtgaccgttgattcttgattccgtgagcttcgctcaaatttaaaaccaaaaaaagcaaaaagtagaaagtagctccaaatcgttgctaactaaacctcttatcacatgagttttggacttatcagagaactttttgactcgatccaaacggggctgaagggttagggttttatgtgggtcataaggttcattacaaaataaaaacccactaaaaataattcaagttttatgtaattaccgatcaaagatagtatttatatcattaaaagatagtatctgaatggtcaaatatagtacatttgacaaaaaattacataaaatgttaattatttttagataaaatttgtattttattaattaattagattcctattttataatttttgtttttgtttttgtcaataaaagctaatagcattagatgttctattaatttttctatttttactttacaatcacatgagaagttttaggtatatacaattgttaaaaggacacacatgcaagaaaaacatgaaaaaaaaatggggaaagaagaaaatggaaggaattagtcataatatatataataaataaaacacaaaatgataaaaaaaaaaggttagaaaaagtatagttaaatgatgatagaagaaaaaggctaacaaaagacataattagaaatatgagatagtcaaaattttgaagtatcactcatctacttcaaaataatttgtaaacttgataacatttaagggacctataaactaaacataatgtgatccttttagatatttttctcttcaaacaaaccaaatagtacaatgggccaatggtgagcctatgaatagggttgagtgcaagttgagcttgagatcagctcgaaaattgcaagttgttcatgataagcccaacgtcctatcacttggacataagttgtaaagaggttttcttgaccatgttatcaaccaatgataagtctcatagcccaagctctatagacctatttttaaaagtcccataggcatagttccatatggcaatttgaaaaaggcccataggtgtagctccatctaacaatttctaacaggcccataggtccaacaccatagagcaatttccagaaggcacataggctaagatccatagcatgatttctaaaagcctatagactaaaaggcctataaggcttcatttggcagctcttcctgtcactatcacactcgatggaagctaatgcaaatcttaataactcaacaaagacaataagatattgatactttattcgcgggagcaaataacatattgttgttgtaagtgattcgggtattgcattgtcgtatgctaccccaatcgattgtatatataattaattttaaaaatagtttcatttattttttctcctttttaacacatctaaaataataataaaaatccatttcacaaataaaataagttctaaatatttgtaatatttatttatttataaaatatatttattttaatatagttaaaattaaaaaaataaaaatttaaaaataaaaaataataaatgaggtgccccatttaattttatatatatattacaaattagaagaggtttatataaataagatagagctaggatgggaactacctattgctccattgtcatctctaatttatcttatttatttatttcatttaaattcattatcaaaactaatatatgtggtaaatgatgattaaagaggaaattgaagctcaaaataaaataaacataatttttttcccaaacaagtttcattatactttcaatttgaataaaatatgaaaatgatgataaaaatgatggtatatgtagctttctcattacataaacatgccatcttaattcatagacaaaaaagaaaaaagaaaaaggtcaagggtgtgtttaacattaacattttcaaaagtaagttttcaagtattattaaaagatatttgtagcaataaaattctattgaataactcaaatatgataaataattttcttgatctattctctaaaaagatgtataatgcaaaaatccatgactctgtaaaaaaaaaaaaaatagaaatatctcaaattcaaaacaaattctcaaaagactaatttcaatccaaaatttgttaaatgcaaaactattttaacataataatacctagataggcctaagtgttttggaattgtttcttacatgccatttttcataatttttttagacatttagagtctgtttgtgaattatttttgagaatagttttctaattttcaaaacaaaaaatacagaaaacatgtttaacaactaaaatctgttttctagtttatgttcttaagaataaaaaatagagtgtttttaaagaacaatttttttaattattttatgttgttttcacttgttttctaaggattgttttaaggaataattatataaacatgtagaatgattagaaataaaatactagatataaaatttatttaaaaaacatatttaaaaatattaaatacaagctaaacacattttaaatcttcaaatagacttttcttttatcaaaattagagaacaattttcaaaaactattttgcagaattgtttttgaaaatagttacaaaacaagcccttagttactagcttcaagattagatctggtcaatacttggcctctaggaaaaggtacaaattaagaaattttttcacacttatggaacacatgcatgtacaaatttagtcgcgtaccttgtgggggagttgctatatatagtccttggataagtgaaatcactttcaaggttatacatgcatgcatgcaaccattctatagaaattgacctcacacactcaaaaaactttttcttttgttaatagcaggtgagcaaccttcatgccataatttaggttcatgaaccatatgccttatgtagacatgaaactcaaaatattttcatatgattttttctattattgttattattattattattattattattattattatttttacaagtttattttatcatttttaattatttactaactttgttctctcttgtcaaagcacaaatgcagccccgtgatagatgacccaaaaatatttttttttctgccttaaactattataaaaatcttttgataattaattttaaaataggaatagaaataagaaattcacttcatttcctatttattagaataaataaatttataggtctagattttgatttctgttgacctcaatcttcatttctattatcattcttatgtgtgtagcgagggcttccttgaacttttataggagtaatgtcttccatgcatattaaacacctaaagacaaagcaatatgatgatcatttaatactggacctcttatttttcaatacagctaagaatatggacagacataatcaaaggcataaaacatgtattgacgtctatatatatacacacgtgtgtgtgtggtgtcagaggtaaagaaatgatggaaaatattacatgggacttcctctatcatgtaatgatagtcccgattttgatatgattgtatacaacaattaaaagcaaatgacagtggacttggattcacaccgagttaaaagactacattttaatcgtgtcaaggaacatgtaacatgctatagttccaacttttatgttacttttcaagcaaaaccaataaaactaggcatacattacaacattgattctataaactcaatctttatagtttttacaataataaagtagttgtgagacagggaatttcctaatatttcttacataatggatttttcttaatcacacaagtgtttaaatttacgagtgttgtgggtctagaattgacagtatataaatcggagaaaatggtccattctaatatagggtgattgaaggattttatatttgtttgggagagaagtttctaagtttttgatactaaccttcacacaatatttttatgcatgataaaaatgtcaggtctgtataagggtgattgtgagatcttacaaagtgtgggagaatttctaagcactatatatatagttgtatggaggagtaattgtggtatcttacatgatcagtgagctcatcttaattgtatagatagttgcaatgtagataattttttaagcaattgagagttgctatgttgacaatattgcatcttgaatttaatgaattcaagattaagttatcatctagaactttattaatatatgttttccgagacaaacctaagaatccttgtgatttatcacgaaatacttcaattcatatcacataggaagcctcacccatatatttcatttcaaggttcttagagagaaactttttgatatcatgtaataagccaaaatcattagtagcaagcaagataccatcaacatacaaaatcagaaatataaacttgctcctattgaccttcagatatatacacagatcaacgatgttttcttaaaatccaaaagaagtgatgatatcattgaacttaagtttaggtttgtatatcggcttcttaagtttacacaccatgtgttcttttccttcaatagaaagacccttaagttgatccatgtaaacttcttcctctaaattccaattagaaaaaaaaatggtttttacatctatttggtgtaactcttaagtcataatgagctaccatcatcatgttaattgtaaaagagtttttttttttttctttttgaaataggagaaaaggtctcattgtagtcaacactgcccttttgagtaaaaccctttggtaacaagtttagccttatatagttcaatattgccatttgagtcacatttggtctcaaaggcccatttacaattgatcctcttacaaccattagacaattcaatgagatccccgactccattatgatccatgtattttaactcttctttatggcttctaacaagttaatagaattaacaccttctatggctagtgaaaacgaaactagatccttattaattcctaagtcaaattctgactctcgtagataaaccacatgataattagaaatagtagatctcttttgccttcgagaccttcttaatgctacttcatccactacaagttcatttgcaataatttcattattgggaatttgatcatttatttgttgttcttgttagttgtcaaactgttcaacaacaactataggaacaacaacccaagaagaagttataggtaaagaaacttgcaccctaacttctttgatttccactttacatggttccacactcctactaacgtagccaatttctatgaacctagcatttctagtttcaacaattattgtactatggccaagacaataaaatctataccctttacatttttttagataaccaatgatgaagccacgggttgttcatgagtctggtttcttttcatgaggattataaatccttatcagccactctgtgattcacgcccggtttaagcatatagagcttgacctccacttcataagggataaagttcttcgaaatgatctagtcatttaatacattccttcaacagaacaaattgcagacattttcattaaacatcttccaagtgcccagttctttcttctacagaccaaactctctcatattgctttattttacccatctggtgagaagtgtttcaagtaaatcacttgagtgatgtgtaaaggttcattggaattttaaaatccaagtgcattcattaaaagcttgaggttaaagccttaaagattagtggagctctcacccattaggagcttgacgacagtgggcttaggcagattgttgaaccatcataaactgagtttgtatatgcttagttttgtattcctcttgataattaattgttcttaattaaatttcaaaaaaagaccaatacccaaaactcaattcctctcccctcctcctcttaggcgtataatgaggtttgaattaactcatcttcatataggtattgccttgtcgtttcttgtcccacccgatgagatttatttaacacataaaatagtgtatttttttttccccattttcctctttttctaacacaaaataataacaattaaaaaaaaaaaaatctacttctcaagtaaataagttaattaagaagtcttcacagttggtgaaacacgttgtcggagtgttgctatatttagtccttgcccttgataaatgaaatcactttctaggttgtacattcatacatgtaaccattctagagaaattgaccccacacattcaggaattttttcttttgttattgcatcgacccatcatccatgccttaatttaggttcatgaaagatatgccttatgaagatgtgtaactcaaaagatttgcatgagtttttctattaattatttttacaagtttatttttaattattttctaacttcattctcgcatatcaaaacatatatgctgcaaagctatagatgaccccaaaagatttattaatattgtaatctattaattaacgtcaattttttactgccttacactattgtagaaaagttttgataattattagagcatgttcggaatgttagattttcctaaacaaaatcttggccataatcttccatcaattcaaggaataatgctagactttcttaaatgggtctagaaatcttactcataatattttgggagttctgttgatttaattttccttttcatcgccattaacccccataaattatgtcatcgactctaagatacattaagatatatgtgtgtaccacagtaccagaggcacccttaaactattcaagcagtaatgacttccatgcgtattaaacttctaatactaggaatatgaacatagtacatatgaaagaaatataattcaaacattattctcgtatgcacaaaatcaggtctgaatgtggtgtcagaggaaaaggaagaaaggatggaaaacattacactggacttcctttatcatgtaaatcatgtgaaggtcccaatttcgacatgattgtatggaccagttgaagcaaatgacaatggacattgatgacaggaagtaagacactgtcaaaatatatgacatttgcatcttattcacaaaactaaaggtctaaatggggtgtcagaggaaaagaaagaaaggatggaaaacattacatgggacttcctcaattatgtgaatcatgtgatggtcccaatttcgacatgattgtatagaacagttaaagcaaattacagccggcattgatgacgggaagtaagacactgtcaaaatatataacatttgcataatattagagttgtatgttagtgaacttgattggttaaaatttgtgaagaaactcctcccattccataggaactaatattggaaaagtagtcacaaaatttcgaccaaacaagaaaagctatatttggttcccataaaatttgagggaaaatgcaagggaaaaaaaatacaaaggaaaagtagaagaaaaataaaaaatagattaaacgtcgataaattattttttttgttacttcaaactcattttatttattttaactcatgaatataaagattaaataatttaaaaatacataagtttttaattatattttattttcttttatatttttcataggacaactaaatatgaaaaaaatcattttttttgtattttttttttctttagtattttttggaaccaaacataacctaaaagaaagactaacacttgggctgaaccctagaagaaatcatgaaacttttcaaacaatgtttatcacatgtaaggaacaaggtgaggatggaagtcattttgatcgtagtgtcaattgttgcatcaattattgtccttctacatgtgcaagtgaccacaaagtcttctatgtccaggaggatattttgaccactaggagttgctagataataatggttgtttgtgatgctcttgatcaccctaatttcaactccttttccctataaatacccagctaagcaatcctcattccacatcaattacattaaacttcacaactgaaaatggggttgtttaagatttcactagtttttatttgtctcgttggcttagccttggttcacacctcctgtgctcaaaactcacagcaggactacctcaatgctcacaatactgctcgggcacaagttggtgttgggtctatgacatggaacaacaccgtagcctcttatgctcagaactatgccaaccagcggatcggggactgcaatctcgtgcattcgaatgggccttatggggagaacattgcctggggcagcggttcattgacaggcactg

SEQ ID NO: 13752 - DNA, 3285 bp, Vitis vinifera
  Intron number 3 from transcript GSVIVT01003724001 (locus G SVIVG01003724001) derived from phytozome v7.0 (chr-ID chr1 1; pos 7430024 to 7433308 reverse strand)
ctaaacttgttggaaggtttgtttctacatttatgggtagaagctaacaatcaacatctctgttttgtttgtttatggatctttttcatgctaataaacaattcaagtgatataaaaatatttttgcattttgctctttgttgttgtgatgtaaattaagttgattagagggtaaagtgaaggaaaaattggaggcaagataatgaaacttgtgaaaaatatcatgtattatcattatgctcggattgttgtaagacatggaatatgtaactgtaaggcctattatggttgtaaagcaagatcttagacatgctgcttgagaaaatccttttagagaggaatgctgtgaacataaaaagagaatgttgaatggctggtggaagtgacacttcagggacaaaataaatttgtgttacaatgggttccaaatctgaactgggcatataaattcagtatgctaactaagcactatatatcctctaattttgttttgttttgtttttgtttttttggttttaacttaaactttgtcattcttttgttgggaatggattggggattcagttctttaataggaagagaaataagatggaagaaacattagactgttccataaaataaatgtcaaagaagtatggggaaacaagaatgttatgattaatggatgagttcaatgggacttaaatttgatttcctaaaaacctggtttctgttaggtgttatttagtctttttcatggtatcctttccatgaggcaagcctcgaaagaaagcccatatattaaatataacaaggaacctaggtgttggcataataggtgacaaagttcggttctaactgtgcttggcaaacttaagatgatgcctggcaatgccatttttccatatgcaatatattcctacttttatggtatgatatatccttctagatcgacatgtagagcttccttgaaggcaagttctgtatgcaatgtgtccaacttttatggtaccatatgccctattttattgacatgtagaatttcttgaagactaacttgccttcttcttcttcagaaactagggagtaccctgatccaccaaaaaataagttgccaagttcacagtggataataaattaaaaagtaacaggttgcgctccccccacccatttcagaatgtttacgtggttgtggggcggggggcatgtgtctttgatgtaatgctagtggaatcatggatggaaaagtgaagtgtagcaactgcaaaactagatgaaatgtaggaccaatgcagttttattagttctattataggcttccctggtatttggtaactgactttattcaaacaggttgtgccaatgaaaggttttggttgcatttggtttggaaaatgctttctagttttcattttatgaaaacagtttttgttttctattttttcttttcttgaaaatgtgtttggttgagaaaagtgaaaactacttttagaaaatgaaatttgtaaaatcttgtttggttttaagttttcattaatgtaaaaaatggtaaaaagaaatgtaattaaaattttacagaatacacatatgatgtcatgagatatattattataatggaaaatattattattgtgatgttatatgtataacgtatatggtcttattattatattgcatttcatttcattatttcttctttttcttttctttattagatttttattttaacatggtttaataaattattcttataaacctataattaatcaactaaattatttgaatatgaaaatatatccagtgatagtaatccatatttttttataaatgaacaaaatacttataccatatataatatttaatttcaatatatatatatatatatgaaagataatgttgtattcatattaatatttcttttgtatatgtaatatactaatattaatattccttttgtattataggtctcataaggtattctatgtgattttatttactttatttgttttcaaatttttagaaagcaattttcactttttaaaaaaaaaaaaattttgaaaccaacaaattgttgtttgcacttgattcattttttgagctcagttttctagaaagagctaaatggaaaaacactaataaaaaatgttgttttgacctaatttttattttctttgaaaacaaaaatagaaaactacctcaacaaacatgatcttaatgtgctgtattagtttaacaagtgatttatacacaaagaaaccttagtttttaagtggtttggctaaccacgcttacatccacggatgagagagaaccaatacactatactaaagagaacttacaaagggaagagaaaacaaagataatcctcaaaccccaaaataataccatggtttcccgcctttagtgtctacactctgaacctcaagccctattctactgggtgtctcctattctttgtcacctacctatttgtatactctttaaaagctcatctcaatctcacaactttttctttttgtaacctagaacattagtagagaaaattctaactccttactttcacatatgaaatattttatacaatattttttatagaaaggaatatgtaccaaaaagaaatatgagatattttctaacaatttccattttggctccatctttctatgatacatgcatccactatacatgtcttcttctcacatgcctttaccggtgcacccaactcctctaatgcactgcaatcaagccaattacctaatgtactccccttgaaaacttacctaaagcacttccattagaaattgaagttttgcttaaatgaacaaataagcatccactctctccaatccttggtccacaatactcgatcttccaaatccttactctacactacaacttccttgtgtgctacatccttgtttagttttggtagatctccatggattcaaatcattaacatttgattgtttctactattcaagatccaataagtgtataagagatacgatacttattctagataacaaagaacatactcaatgtatcacataccaacgagagaacaactgactgccccttatacaaaaatcccttccacaatattcttgtttaaatggaagtaagttgcatgtaatttgtgttcagaaggcctgatttcaaataggattttgatgattctctgtaatagaaattttatagtgtgcttaggtttgtttttgtaccttcttaacacgtctatgtactaatgaattgcatttttcgtctattacagatcttcaccaccaagaatacaagccccaggaggaa

SEQ ID NO: 13753 - DNA, 9748 bp, Vitis vinifera
  Intron number 2 from transcript GSVIVT01024771001 (locus G SVIVG01024771001) derived from phytozome v7.0 (chr-ID chr6 ; pos 7093861 to 7103608 reverse strand)
tgaagggagtgagtgacgaggttgccaagtacaaggtatggctatgggtgctgctgtgaggctgaatattttagctttgaacgtattcagaacttcatgatcatacaaaaccccgttggtaatatacgattactgtttgtattttaatattctcaactctcgtatgctctgtgataatatttcattaattttctttgtttttgtttatttgctttctatctattgaatcgtactgtctccatccttattcattatgtgcttatttggctcgtttttccttttttttcccttctggcaagtttgttagtgtagaccccttgaaaaaccaaaggaaatgataattttttccttaggttttgggaccacccgggaaaggggatgtcactaggaatggcaacgggccgggttcgggacgggtcgcccccatcccaaccccaccccgtttattaaaaataattcacatccccgtcccatttaaaaaattaaacggggcggggcgggtataggaaattcccaaacccgccccgccccgtttagcctcctttttttaaaaaaaaaaaatttacttttaaaatttttaattacattaaaataaatatatttataaataataaaattattatatttttttataacttattttattaatttttttattattatctatatattaaaaatagtaaaataaaattaattttaaattttaaattaaattaaattttaaaattgattttatatgtaaacggggcgggccgagccgggccgggatagggcaatacccgaacccgccccgggtttaaaaaaaaatctcatacccgttaaaaacccgtttattaaatttcaaccctgtcccattaggggcggggcggggcggggcgggtacccgaaaaaacctgcccggttgccatccctagatgtcatgacccaaattccgggcgacccaaaatttggcacgtgatcccaagttaaaggtttgaccctaagggtttctcctattccacattggcagtcaactaaaacactctaattttttttttttcacatataagtctcactagggttctcaccaactaacaatattttaaaaccttactcaaacatatcaagatttaataaacatcattgcatcccaaaataaagtttcataaaaatccccttaatcaaactaaagtcttattacattatctataattcacttattacaaggtctcaatgccacaaacacaataaaaaaataaaaccttttcactaaaccactccaggggcatcttgaagtcctccctgtcccatctgtggatcctcaggagtgatatttgcatctaaaaagatataaaaatgaaggggtgagcatttccacattgctcagtagagtgcctaacacccaaagggttactgggagattactatatttcaataactcaaacacaacagtttaccaatataaatcaagtcacacaatttaacatataacattatactcaatcccacaacatccaatcattaaatgaatgcatatgaacgtgtgacacacaatcatacaatgcactatcgttctcgggctttcactgaatgatacgcgtccgcacccaaatatactccccatttggagtcttctcgaggtaaacttttaggtctttcaccctagggatctttctcccttcttaatttgcctcacacgggctttcacttttcatcactattttatttttttttccatttcatgcacttttcacaaatccctttttttttttttacaaccatgatgcaaatgaatgccacaaattccaaaattcctcaataatttctacaattccaataatttcaacattctcaataaccaaataaaataaaattttcacattaaaattcccgaaaatataccaacgaattttcaaaaattcacacatcaatatacttgaatttatatcacattttcagaatttttcaataattctaataatttctaatatttgaaaataactaatttttcacaataaaattaccgcaaatattccaatcaattttcaaaaattcataaatcactagatttgaaatcttgccctaattccggaattttcctacatttctaacaatttttaacaacctaaaatagttatttatcaattacaaagaattccggaaattacaaaaaaatccagaaaaaatctcaaatcattccagaaaattcacacaacatcacaattacctacttaactcataattatcaaatttataatttttttccaatgaaaaatacattaaatttgagttttagggttagttttcccctaccacaaatctgagaatttggttgttaaaaacgaaatcagtcatcgtagacttgtttctctagtcgaatagagtacttccttcgaatttaggctgaaacggagatcatttggccgtcaaacggccagtcaaagatccggtaagtgccctaatttatgcacagtagcctttctctctctcttccacgcgtgctgtagttttccaattctcccccgttttccctttttttttttttttttttaacagcccacttcacatggcttttaaaagccaccagcgacttaagcccatatccaagcccaactcaattcctttttttttaacaatccattatcttaaacggccaatattcaaagcccaatgaatatttttattttatttcttttattttattttcttttgtttattctaattgttttatttgattttcaattcatttttttttcatcattttcttttacacataatttatttattaacaccaatctaaaactaatttttctcaattttattattcatcaatttaatttaatttttcttaattaattctaattaattttttttaaattaattctttttttttttcccggaaaatttcaatttctaaaatcctaagaaattttctaccctaaggctgacatgacataaaatttcaactcgtttaattgaccgacacaataaaaagaaattcacaaatccaaaattgacacgtgttctccaaacactttttttttttacttttcagccatcacaccaaataagatttttcaaactaaaaatgctaacgtggcataaaataccccatcattgcatgggaagcctttcttttttttagtaggggacccttttcgagcatggatggccatgttggttgttgagaggccatgcttactgatcgagaaacaggagagtgggtgatagctgtgataggagggtttgaggttgagaggtttttgaggtcacagggggaggttttctgggggttggggagaaagccgcgacaagaggagtttttgcagagggatagggggaggtttttcaagaagtagggtgggaggatccagagagaaaaatgagctcaaaagaggagaagggagaggtacggttaccatggatctctggacttactttatgtatataatctccttatttttgtcttaacagttccggtggattatctgatcatagattcatatgtttagtttcatggttcatgtttgacttatgggttgattactgctatctctttcacatctttgggttgttttgagagcaatgaagctctattttagcctcaccatctatcacgcaggagtcttgctctgtcttcattgttgtgagatgccctcagattcacccacctcctcatgactattaccatgctcatcatccacccctaatacccgcactgtcactctccaatatatccagcgccatgcatcattcgtcctgcctcatgctcactgaatccctcaaacctgctccatttcatcaccatttcacgttccatgcatgaccatcaccctcacatacccacctctacctttctctctctacaccactccatgcaccccgagccttcccgccttagcatggtcatgcatggccacatcttacccatatccacgtccttcttcaaacccacttctctccctctctctctctatctctactatactttctcttgctggaaaactgctttgggttcttttcttttcttgcaaaccaaacagcggggtcgcgggctggtccgccggagaccgggttcaagaccatttcgagagcacggcgtcgtttagtgctctgccgctacagccgatgcccaagggcggtgaagtttccggtccgattgattgcagcctctttatgtccggtccgctcgagcgaggcactctgtctggtcccctcgatgtcgacgccaactctgacgatggaagagtccatttcttggctccattgagcggactttatgtgaaagagaagaggacgaagggtgtttcggcaactcggaaggctcttcaccggaatcttttcgagaagaagcgaccgtgagtggtgccagtgctgaagtccatcaaccggaaggaagttcctgcggccggagatagggtggctcggaggtgaagagttagagcaatgttcagtgagctctagggaatgctcaaagggatcagaaagtgggaagtttgaggtaggaatgggcacgcaggcatggactgcaggatgtgttaaatggattttgaaaaatctgaatatttgaattcgagggcatgtttggttgctgattttgaaaactgttctggaaaaccgtttttgagaacagtttttaagaacagtttttggtgtttttaaaaaaaaaatgtgtttaggaattgaattttgaaaaacaatttttgttctcaaaaacaaaaaaaacatgtttggttgagttaataaaaaaaatagaacaaataaaacaaaaaacacgtttgaaagatgttttttttcttttctaattaataaaatattttcttcaagtaattttatattataaatttataaataatttttagatatatagttcatttaaattaaaaaaaacatttattttattaatttaaaaataaaaatattttttatatttttaaaaaataaatcaaacataataaaatcatttttattaatatttttttatttaatctttaactttattaaaaattatagcatattctattaagttgagataaaattgttctcgtgatttgttaatttttttttatctctactaaatctaaaattcaaaatgccacccacttctctcactcgggcatcaagaagcccttttctgaagttgccctccagtcgggaaaattcctaaaaaaacccttctctcactctgccactctcaatccttgcaggtactaatctaatcatgttattattattttttttcaacctccgtttgattcccaagaaaatccatgccccattcaatttccgggaaaattcatccccgtttgatttccaagaaaatccatgcaaaacccccaaggaaaataaaaaaaaaattgtttttcttttgctccctgtgttttctggatccgttttaagggtctctttcctattgtgccatttgatttaaatttcacgaaccctgaatcaaaactgagaaacgggaaaaatcaagaagaggcgacgcgactgtgctggagaagagatgagaacgggaagaaaaaaaaaacacagagaacagatggtttttttgttgtttaattttgttctgtaaacagtaaaaaaacggggaaaacaacattttgttgttctctaaacagtgccattttgagaacacggggaacaacaaaaacaaaaacgactctcgcaaccaaaagagtttttggtgttttttgttttcaagaacagaaaacagttcttgaaaacactaaacaaacaggccctgagtttctagacgttgtactgggcttgtagaggggagtgcattctttgaatgtttgaatattgaggtagcatgggccacgttgagcttctcaggcaagcaatgggccttcagccatgggccactccaaatgaaggaaaactgatgtggataagtcgcgaatcttacattaatggtggccttttcgttctgatatgctgcctcagggccggtctagcttgcatggccacccttcttggcccatcttcaaagcccacgaattttaaaagttgattattgaaaattcggcttctaaataattcaagttcacgattcttttcaccatcaatttttttttttaaactctaaattcaatgtctcaatttccaaaatcccaaatttccgcatttacttaatcgtcgctattttcattattattattattattaattcacttgcttatttcaaaaaaaaaaaatccatttctaaatatttcttcaaatttccaatctctaaaattttgctattcacagtcagtcgcttaattgttatttttcatcactatcgttaatattccgtacttatttattcatttcctttaaaaatcccctaaaattttaaagtcctaaatttattcacttattcatgtatttttttttttctaaaacaaaaaaaaaaaaagaattattattattgtcattttcgaaaaatcttctaaaacccgattctaaactaagttcgccagactctaattctcgaaactcaattccttaaatttaactcttcaaagttcaatcttcaaaataattttattaggttctaattttaactttaattctccaagattcgcatttttaaatttaattttccgaaagccccacaatttcgaatttaattttagatcttgtatattattattattcttccgtatttatttattcatttcttttaaaaattccagtcattaaaattcaactcttcaaaaaaaatccgacttccgaatttaatcttcaatctaaagaaattccactattcactttcatccgtttaaatattatttttgttaattatcattactattccataattatctatttatttcttttaagaatctcaatcattaaagtctaattcttcaaaaatccgattttcaaatttaattttcaatctcaaaaatctcactattcactttcatccgttcaaatatcatttttgattaattattaacgttattccctatttatctatttcttttaaaaatctgaatttaattttcgatctcaaaagtcccattattcgctttcattcttttaaatatcattttcaattaattattaacgttattccatatttatctgtttatctcttttaaaaatctcaatcgtcaaagttctattcttcaaaaattcgacttttgaattcaattttcgatctcaagaatcttactattcacattcactcgtttaaacattatttttgttgttattattgctattccatacttatttgtctatttcttttaaaaatttcaaccatcaaagttcaattcttcaaaagtctgttttccgaatttaattttcaatttcaaaattttcacttttcacgttcattcatttaagtattattttcgttgttacttccaaatctaattccctatctcgaatattccactattcacattcacttgtttaacggttattatcgctattattattatctcattcacttattcatttacttaaaatttcgtctttaaataagtcttcaaaattttgatttccaagtttagttatctgaaattccacttttccaattttcgaacttaattttcaattcctaatattctaattctcgcatttattccattacttacttattattatcattattattatcattttattcatttatttttaaaaattctgtcttcgaatgatttccaagatttccaatttttataattcaatcttcatagtttctacttctcaaataaatttcaattatgatttctttcaaaatttaatttccaaagtctcaatttttgtaatttaattttttttaaaatcccaaactctcaaataattttcagaattctaatttctaaaattcacattcttacatttaatttctaaaaatccaattttcaaataatctctaagactccaattttcaaaataaatttcaaaaatctagttttccttcgaacagttttaatttctgtttggtgatgtaagtgatatgttttgtgctctttatcgtacactgaccccaggtacgcatccactctcattctggtcattctctatgcatgttttgattctcatatgcgcataattgatttgagtatttgttgatttttctcattgattgctaattcagcttcgttttattagtagagacccaactttagggacttaaagggggtgctatggtctttactgtaccttcccgataagtaacctgacttccgaacccaatccgatttttcacagaccacctttttcaaataaggagttacacttagggttttctttcttattttgtttaccctttaaaaataaaacgaaaataagtgacgacttcaattcatcttttaataaataaatcattttttcaaataaaaattgagctcgtcatcaagtggaaaacgcatgagccaaaatgcgaggtccacagttagtgtctttttttataagtgttttggaaaatattccttaaaaaccattttatgatgttttgtaaaacaaaaatatgttaggaagtttaagatgtttttaacctatttttaaatatgttttttaaataatttttatatttagtgttttattttaatcaatttacacgtttgtataagggaaaattataaataattactttttaaaataacttttaaaaaataagttaaaacagtagaaaataactaaaagatattttctgaaaacatcatattttttgtttttaagaacagaaaacagtttttaattgtcgaacatgtttttctaattttttattttggagaacaaaaaattattttaaaaaacagttaccaaatagatacttaatctcttcacaaaggttttgtcttttaaacacatggggttcaagagttacacctcatttaagagatttcaatgtggaaagtaagagtgaagatgtcaaattaaattatcaatatcttatgatatatttgattttgaaaaaaaaaattaagaaaagaatgagagggaaagaaaaaacaaaataaaatataaaaaaaattaagttctataaattatttttatatattagttgaaaactaacttcacttattttaacttttctatataaaatttaaataatatgaaaatgtattaattttttaactaattttaattatatttaattattttcatatttgttacggtaaaaccaaaatatggcaaaatcatctttcttccaagttttttcttttatgggcgcgttctcgaaccaaacataacaatgttgttgatgggaaaacaaaacataggcaggtgattttgtgggttatgatgggtgaaccaggctaccgtataggaaccaaactcagagcatgacatgcaaaagctcaaagattttatgtggaaaaatactgtctaatgggtggaagataaatggaaacaatgtacccagttatattctccaaacgtttgtgagggaagagagccacaatcagtcaactttaggatagagggcaggagcaacacctgctaccaaaaaaaaaaagaccttggctgtgatattctttcttgcctggttagtaaatatggtgaatctcactttcttatccttttctttaaatcatccataattcaggtgggttatatgttaaattaagtggacaaaatttccttagactttgaaatagtacttcactagtaattttgtttgcatttattaactggctggaaatttgatggtgtagagtgatatctctggcgtgtagtttgatatgtaatctttagctttggcatttacttatcgccatgaacaggtgggagctcctgctcgcgctggcgttgttgctcc

SEQ ID NO: 13754 - DNA, 3267 bp, Vitis vinifera
  Intron number 3 from transcript GSVIVT01025118001 (locus G SVIVG01025118001) derived from phytozome v7.0 (chr-ID chr6 ; pos 4277401 to 4280667)
ctgttccttgtgagcaatttgaaactgcttttgaggtgaagaataaatactccaatcctttactttagaatataaaatcagggagcggttccgttcttcttcaaggtgttactaaattgacattatttttcttatgcaatttttatgcatctatttatggttactaaattatatgtacggtaagagatattcatctgtgaagtattccttgtacttgcactggcactctagtctttagaaaacaagctattcccctccattaattgtgtatactcattcaaatctacttaattcagctaaggcttagcctaatattttgtattaccagtgtaatattttgtattaccagtgataaattcttcacttccagtattatgagtgatgaattcactttcagtatagtacaacaatttcaatgtggtacagctaaggaatgaaatttattaggattttggttcaagttgatgttgcagagggtgtagttgactggaataccattctccagtcgaggagtatgattatcctccacccactcagtttatccttccaccagaagttctgttataattagaatgaatttttatttgcacttgtaaaaaatgaatttttcttttttaagttgtaacccaattgatgttccctgtctagacaacctacatgcatcttaaaagttagtgcaccttttcccatttcctgatgttatgaaccaacattacaatcattggttatgttgaattttggaacaatcatatgtattgagtattacttgccttctgggtcctagcagtgtgtgaatcttctttgatgtgtgtacaaccgatggatttcacctattcttgttttagtagttcaagtcagattgggatatacatgtcatgtcaattttacagcactttctgtaaccctaaggacaatggttaattggtgttaccaatgcaaaaagaagaggaatgggctaatgaaactctcctccattgtgggtatatccgtagtttgtagtaaatgcttcttaacttatttggagtggcttggttttgccttactgtacactttgattagttggtgtgacaatattttttggtaaagataggagaaagtgtggaggatggatcctttgtggctattttggggaatatggaaaaagaaaaagtcgaagatttttttactggttggtggggatttggaaaaggtacaccttctgagaactctcatttgttactgaggtgctcttgaggcattgggaaacttatctgtattggatttcattgatagcttgtgggggacctgtcatttggccatgttttttttttcaatgcccttgtgcccttcccatttacttgggttgttatctactttgttgtctagtatatgtgagttattagcctaaaaaagatcttgttactgtgaaatggttcaactcttgaaaatctagttattttcatattaaataacctcatatatgatattcattctatatcattgtcatcaggtgagtgattttgtgtaacttgaaagcttttaaaaaagagtgggaaattgtattctcataccatataattctttttaaaaaagattatgcgaatgtacggttttggcactaattgagaaagagatatgggtaatgttggtgatataggattttttaaaattggcctcaagtctatttataaattatgactttggctaacattttagagaaaaatgtaaggataacataggcttgaaataatttggtggttttgagggatctgagaacttagagttgaaaagaagggcaatgaaagaaggaagagggaaaactaaggaattatagccaaaaggggaaggctttggcaattgcgcctatggtttttagaacatcatgttcaccaataagagaaggaatcacacatatcagacaataattacaagggcttcaagattcctctttgcttcacatgatttataagaggaccgctcatgacaaagaaccaagaaatttaggaagttaaatttggtgccaagcaacacaggcacccatgtggctaacaaatgggcccacaaaacaatacctaaaatgtggacattgcaactaacctactggctgggcaaagaagtggaaatgaccaacataacccagaatcaaaaagtaaaagcatgataaactgataagaaatcaaagtttttttttagattccataatgttcgattggatttgtaataagcccaattttccatattccagtttgaattatgttttctctttcttggccttgctgaatctgctcagataaaaaaggtggtttgttcatgtggagataagatgttagaagaataagagcaagaatatttagttaaagctgaaggtccaaggagaattagctgaagtccaggaactggggttgaggctttggaaagtgaaaaaatagcctatggttcacgggaaactgtggttctggacaaagctgaatggagaaaaaggatagctccatggagttggtatcatcgacttgagctgtcttgaagttaagtgtggttgataaaataagttcttgacttaaatagttttcaggattctttacatgttattttaccaattggactgcttcagccagtgtgatgtcagctggattttcccatgttatcctggttggtaagaaattaaacccatcgctattaatgcatcatcatgttccaatgcttttctattatgggtaacaaacaactgtagaggagatttgtcaatcatgatctgagtctcaagtttaagagattatgaacagtgcttgaaaaggtgagaaggatccctgaaaacccttcttactttcgtctaaggcaccatttagtgcagcctttcagaactctgagagctctttttgcctgctaaacgagcttcatatggagcttgactacaaccaaagtactatgaagttgaagagtactatgaattgtttcttttgagtcaaggttccctttatggtttgacaatcattgcaatagttacaatctttatgaattgttatcttttgcgcaaattgtgtttaatttgtaattattttttagtcttgttgagcttcttctatataggaaatatcagacttgagagttgagagttttagttgtacacaactatggttttaagctgtctcaatacttgaaaatggcattaatttcaaaatgcccattgcaatagatatcttgtctcctttgctggcatactatgatagtgtattttcctacttttttactgcaggctgttgaaagttggcttgttgatagagcagtttt

SEQ ID NO: 13755 - DNA, 3702 bp, Vitis vinifera
  Intron number 1 from transcript GSVIVT01001334001 (locus G SVIVG01001334001) derived from phytozome v7.0 (chr-ID chr1 _random; pos 316471 to 320172 reverse strand)
cgcatcctcttcgaagctctttactctcttcaaaggtctctctagatattttcccttttgattgttttctttctccatttctcatttctatttcctccatttccttcgaatttttatgagtttcgtaggttttatttttattttttaaaattatattctcgttcccctctgtttggttgcctgaaaaaataggagagaccaaaacctggatgttgaattttgagattccctattttatgcttctcttgtgtccatttattaatattattagtattattcttttaacaatttatcgtaaaccaaacggaggatattagatttggaatgtgtattcaaaattagcgtggacagactaactttcggacatgggttgcagacattgtttgaatagctcttcaatcggtttctataattaccatttccttgtttcattctggtttcatggggtttttcttacgagttttttcttagttgggtatttctcagaggataatttaagggtttgcgctgggtggccggagtagacttcgtagtctaagctagatcctgggtcattactagcgtaattttttttccttgtccaatcatacgaggaactcaatcaagttctgaacatatctccactttctgtttttgcaaccagtcctaatttagagagagtgacagtgtttttacccatccaaagtgtttttgggataatcacctattaatgattatccaagaattttttaaagtttacccaacatttttcttcaaaaacactttttatacttaaaagtggtttctaaagcactgccaaacagactcttaattaatggagcttgaaaggaaaagaattgggtttcaatttctatattttgttccatctaaaatggaattgaaatgagagcaattctttcattgttaagtgttgcaagagagatgaagaaaagaggaaattatgactcatcattggctttagtgaaatccaaatcttatgaaattccacatttttagaaggaattgaaaactttaaggctatatttggtttttagaaaaatttgagggaaaatgtgggagaaagtaaattggtaggaaacaaatagaaggaaagaaaaagtgaaagaaagttgaaactagatttaaagttaataaattatttttgtatattacttcaaatttatttatcttattttatctttttctacatcaagattaaatagtttttccatggttaatccaaacatgagaaaataattttccttaaacattttttttctttttttagcattttactagaaataaacatattataaaattcttctatcaaatcctttggaatctttttcatctatgaatttgaccattcaaaacactaaatttgaggatttcaaattagttctagatacgtccattccaaacacaattaggaaaaggttgaagctatgtaattgacttagttcataagggaatctgcactggacttgttgtagcatgttacaacctttcaaaagcagttggactacagaatcatttgatgagacttgtggtattcattttattttattgaaaacaaatagatttgttgcttagtttggtcaagtataagccaatttcagggttttagtagagaataagaccatccagaaaattctacctgcccaaggagtctagaatgaagcaggtttaataaccaaaaacttgaggatattcttctgactggattttaatggagctaatgctattttgtttcatttctcttttgctgccaacttggttttgtctatatgcatgtaattctgccttgcatttggagatttgatgtgtcatatttggtttttccaataataataatataaaaaaaaagaatcacctactataacatctggagttctattaaactgttatttggtgatcttagagtttgtggtttctacttagtgttattctcttaaatgattatggcaattatttgtttctttcacaaaaggcacttgattttgtgaagttgcaatcatgccttcattggaatatttcaaaaaggtttgagaagttaccaatatggcctggcatggtaaggttttggagtttggggatgtgaggatgatcactaaatgtctaaatgatgattttcccaaatttatactgtccaggtcatgcttacattgtaaaacattgtgttgtttcaatgtcgaacattatgttggcaatatgcaaccaatgaccaagatcctataccaaacactttatctttgtcaatttgttttggtttattattttcttttttcctatttaattctttaatttcatacataggctaaaagtgacaaaagaattattgaagttgattggttagttaaggtaaatataatcaacaaaagaggtcccttcccagcaggctggcaaaggtgaggggaaaaaaaccagtttcggatgtcaactctaaactctgtatgagttgtgtctttgtttgttggaaaattttcataggtggtgtgttgtaagatgcatcccctgtaggggtggcccaggtggtgtttagagttgtatggtataactatactacaataggcaatttgacaaaggataaagttgggttatagttttaagttggataaagttgtggattgagattgtgtggatcttggtgcagggcttgttatcttctgacacaatatgggtttgctaacgtatgctaaggtggaaccaagtaggaaaaggatttttttcataggttgaatgacttaaagttactaggccttttgggaatggttctattctctttaagtcctcaaatttattgcctttggacaaaaattcccatctttagttgcttgaggccaaggccttaaggggctcctttatttttcttttcctcattccatgggaccaaaattataaaatgtgaactatatagtagaagagtgcgcatgataggtgcaacttgctagtgtaaagtgtaagaggcagtgagtaaggcggtgtgtgagtgtgccatgtcaattgaatcaatccaatgtagatcacataacttgaacactcatattggtagtgcaatgtggagagatctgcatgataatgaaaaaagaaaaatgcagggcctagagaggatgaagaagaaaagaaatcaagtttttctatgaattctaaaaaccattatttagagaagtactaagaaaaacaaatgaagtctattagtataactggtatgaagaaacattatgggatgtcccactacctgtaattttgtgattcatcacacatattcccaaatagaggaaaaggtcatctcctatgtattttggggttgattggtactagtaaagtcaaaagattttgctgatttaaaatatcccatgttgtaggtgggttacaaaagatatgtgaatgccttctgatatatatatatatatatatatatatatatataaagatctgtgaatgccttactctttgagttaaagaaaaaatggggtatctgattttcaacctgtgacttggttgatgtaattttgtacatatcatgatccaatttagcaatccttccatgtagtaaaatgaacacatttgaaattcttggaactgcagtattgattaatttaaaattttattgataaaataagacagaatggttttagtttcatcagtgattgatttgatattagcacatcagattttagaaattttatgctggattataggttggatttgccggtgcattga

SEQ ID NO: 13756 - DNA, 7560 bp, Vitis vinifera
  Intron number 5 from transcript GSVIVT01023682001 (locus G SVIVG01023682001) derived from phytozome v7.0 (chr-ID chr1 1; pos 9115939 to 9123498 reverse strand)
gattccttgcgtgctttagcacaatctttgaccaagtaagttagttggcaaatagtagtttaatgtttgccttaccatattagcatctgctgtttgaataatatttcatctgtttttccttgttttgggagccttattttataatgttaaaaaatttcacattgattctacgcatgagaatatttttgacaaaaaggaaaatctagttatattagaagtcttgctacctaagcttaaagctttatttggatcatggaaataaaaggaaaggaggaaaagtaggaaaattcaaaattatcttgtttggttaactatattaaaaataaattacagtaaaaattatttagaaacttattcatttttaaattcttcattctttgaggatcatgacaaatttgatggaagtgcaaaacatataacactgttgtgtctaggcaaaataataaattccttataggtttgtatttgtccttttttttggtggtgctagtgttgagttttattagatgttcatatgaacttttgataggccattgtcttcccgattctttatttgtgtttattgactttcttttacatatcaagaaatagatgaaatatatagatagatacatgcatacatatacacttacacttgtatatgtatttttatatatatatatgtgtgtgtgtgtgtgtgtgtgtgtaataggatttgtgtatggtaagtaatttcttttttctttttcttttttttttcttgatagataacatacctaattccataaaaggtagtaagtgcaaaacttaaacataagcattgattaaatatcatttatcaaatataaataaacattgaattctagagttctcttgaaatcaaattcaccaaatatgacattataatgcatggtttttcataaaatctcaataccaaattcctgttaaattttttttaaaaaaaatgttgataccaaaagttccaagttctaacatatcctatcaagaaggattgggacacctaaacagtagcttttttttttttttttttgtgggcaatgagaggagggtgaacttttggaaaacgagttggtatcaggatgagtcattttgtgtttcttttccatatttgcatgctttaaccttaacaaaagaggcttgggtgacatttgtggaactagataggggagaggtcattggaaccattgtttttctagacgtcttaatgattgggagctagataatgtaaaacgatttttattcagactacaaggtaagatagtgaatagagaggaggaagtcaaggtagtgtagacagatttgggtggaatcatagattctcaatgaagtctcttcatttttccttggagccagggagttcaattcttttccggaaggagtcatttggaatccataggttctatttaaagttagtatctttgcatgggaagcttgttggggaaaggttttgactcttgatcaactttagagaagagggtggatgttggttaatagatgcttcctatgcaaagttgaagaaaagtaaattgatcacattcttcttcaatcttcactattctaaggcaagagttctttggcagttgctctactctttgtttggtgttccttgggtgttattggccacaatgagagactttgttacggtgacatggatcctttgttagcaaaaggtgtttgaaggtttagacaaccattcctttatacatcttttgggcaatttggaaaaagagacatcctaggtcatttgagaatgaggtgcagtctatccatgttctaaatagccttgtccttattaatttttgtttgtgggtaaagttgtacataagtgaaggcataatgcctttaattgattcccttgattggttaggtccgcattaagggagggtgttgctttttgttctctcattttggtgccatcttttaatgtttcatttggtgccttcttttgatgttcaaggtatacattttctatggcacttattgataaaattacatcattgcctttaaaaaaaagccaaaaccattttttgagagggttgacacgtcactaaccaatataaccaaaaggaaactatgagcaagcactagtataactatatacctttatggattgtagaccataatcacatgtgtgatgtctttatggacatattaagtgattgccttgttctttttcgtatattgacgtactaagagatcatcccctttattttccttatatcacttgtttgataagaaagctagaagaactataaatttccttcaattacctattttaacaagagaactatagaataaagatacaaagttcactttcataaccaagcaacaagagtaaaaacccttcaaacttgtatctaatagttttcttttatgtggtcccatctgtcatgtgttggtgatacctttgtttttttgtgaggcttcacaaggtcaaatgactcatttaagttgattgctcatgtggtttcaagctattttggggttgaaaataaatctagataaaagtgaattgatctaaatatgaagggtggctaatgtggaggaattggcgtaagagttaggatgcagggttggggagcttccgtctacttaggttttcccttgggggctcctttaataatagaattagtttaggatagtgtgggacaaaggttcagttgaaggccattgatgtggaaaagatgatttatttcgaaggggaggaaactttttatgattcaaagcaccgtatcaagtttgtctatttgttttatctccttgttcaatattcttagaaaggttagattgaggcttgtgaagattcaaagagactctataaggagacaagtttggggaggaaaagatgcattttgtgaaatgattgattgtttggagggaaacgagtaagggtggcttgggtattgaatgcctttctttacttaatagggtgcttctttgaaagtggtattggagatgtgcttctgaaggagaagcactttggaaacaagttacacatgaaagtgtgaagaggaaaaagcaagttggagttcttgcaaagtttacctatcaaaaaaaaaagttggagttcttgcaaatcaagagaagggtatagagttgagttgtggaaagctatcaaaaagggttgagacttttttagtagtagtgtatcctttgaggtggaaaatatgaggaaggtgaagttttggaaggatacgtagtatagggatgaacccttatatgcatctttcacctctttgtatgccttcacattgtcaaaagagacttgggtgatagacatttgggacaatttaggtgagggatgccatttgaatccttgtttcttttgaaatttgaatgaatgggagctaggcaaagtagagacttgaaggtctgtgaagagggaagggaagactagtggatgggaatgatgtttttctggtcaaatctttatattctgtcctacaactcgggtgtttaatttctttccaagtgtgtatcattttgaattcataggtctagtttaattatttaaagtgaagttttttttgctcaagaagctattgaggaaatatgttactttggatcttcttcagaagaggggtggttgttaacaaatggatgtcttttttgtaaagtgaaaaggaatcaattgatcacatcatcattcattgtgccacaattggtagttgtttttctctttattatgtgtcatttgggtcctaccctgtatggttgaagattctttaaagttggtatgactctttgtgggaagcaaatacaagaatatttaaagagtcactcttttatgccttttttttttctaaaaaaaaaaaaaacgaatttggaaggtaaagaatcatagaatatttgaaaatgaggactagctggttcaatcattgaagtgctctttccttagaagtcctgtgttatgggttagcatgtacatagaagaagggtcaatgcctttaaccgattttgtagattgggtgagattttttaagggagacaatagtttcttgtagtgttttacaagactaataaggcctctacgaggttatgcaaattagccttgaggctatagctgcaatataggttgttgaggcttaagcctcacccgatttaggctcataaccttgaggttgtagcctcaaggttgttgattcaaagggttttaatgggtttagggtctttataagctttatatatatatattttattagataagatgtttaagtctcaatattcattggttataatgaattgtgtttttgtgaggttttcatataaatttgtgagttttgtctttggtttaggactaagattaaaccttttataaattacatggagagggactgaagagactgagaagaagacataaaggagttgttggccactgtaatggataaattcatatataattaatttcatttattgatagataaaagttttgaccactatagttgatgggtgaagaagaagaatgcatagacattaacactgatgtagaagataatataacagttaagagtgttcaaaagcaaggagcagccagttcaagtactaaaatactttccttagtaatcttatgtcatggggtagcatgtacataaaagtaggctcaatgtctcttatttattttgttgattaggtggcttcttggtgagagaaggagtcgtcgttttttggttctcctctcccttctaggtgttttaatatcctttgtacatgtccctatgtaccttggtgcaaagtatctttgttcgttattaaatttttttatcttttttacttatatatatataaaatataacaattagatatgattatgttttcttcgaagatcctaatagtgatagtgatagtagtgctgaagatcatttagtaaagtcatgagagagagagggagttggattttaaaagagaaaaagagggagtaaattagaaactattgacaatgataaataattaatttggttattatgaattgtatggttttcttattattcaattttcaaatgattttgttagtattttttttctctttttttagaactttctattctttttatttatttgttttgaaagttgaggcttatgccttgttcttcttcgaggcttacaccttgcctcatttgggcaaaatgccttaaaaatgcctttagccttttaagacattggtttttttggtgttctctatttctagaaaagtcttttggtacccattgtatgctgtgtacttgggtgtatagtttctttgtttctgtctgtaaaatctttctgttcactcatcaaaaagaggtttcttttacatggatttactttctagggagagaaatttcatattttcttacaaagcgaaaatggccctactttttttgtgaggcaaataagaatttcagtaagattccacccaaagaaaagggagcacagcagtactagatgagaattatgttaggtggtgcccagacccaacaaaacaaaaacaaaaagaaactaggtcctaattatcagatcccagactatatacaaagtagagaaaagaaatattgttgattcctttaacactactagaccacagaaacaatgccacgaggaacatatccttcattgctcattctaatctttcataaataaagcagaaacaaactctaagaagtattgaggttttagcagagcttaaaatttgtttttctcaaaataaaagttgaatgcaaaaattctttttattagtttcagtttttcagtttaatattcaatttttgggttatctgcctagtcaacttatagtacatattagtcagcatatttacaattagtcttgtacaaagatgatacatccactttgagctgaaaacctagaggttcatctgttttctgttagctgaatgcttatatttatatttatttgctttttctttattgttattaccattgatattattgttgaatgttaggattcactttgagctggatttccttcctatttaactaggttggaaggtttttaaaatttcttttcaaggccaagttggacatgcttgataggtattcctttctaggttgtagcagtttatttaggggagataagacttcaaaattgtgtcacatgattctgttgctgaacttgtaactgtcctaagcctagctgttagccaaggctatccatgaggctagattgtgatcatactgataaatgaggttcaactgaacaatgcttcctttctaggagttggtatcacacctatatgtcgtaacatggttacaacagggagaaggatgtggaatccttaagctacataaggtcagccaaagaaacttctctcaatattggctctctgcttacctagaaaatctacctcctgtttgtgctctctttatcttaagctacaaacacacacacaagaagaaaagaaaaaaaggaggaatataaaggaagatggataggaataacacatgaagcatacattctaaaccaaaaaaaaagaaaaaaaagaaaaaagaaaaaaaagaatcaaagagtcataaggtcacctgtagaaacttctcccggtatgggctctctgtttacctagaaaatctacctcctggttgtgcactctttatttttcccagctgcacttctttttcataagctatacacatgcacaaaagaaaagaaaaggaagaaaaataaataaaagggaagcaacattgaaataactcatggagcatacaatctaaacctaaaccaaaaagaagaagaaaggagaatcaaggagttgtaaggtcgcccaaagaaacttttcccaacattgtctctctgcttacctggaaaatctacccccttgttgtgctctcttttatctttcatagaaagggatgacatagaaataacacatgaggtgtacaatctaataaaaaaaattaactgcttacctagaaaatcttccttctggttgtgtactctctcttttgtagaaagggtgtaaaacaactggtgtcaaaatataagggttgtgcatggctgtgtttgagcattttggccaaatttgtgctgtctcccagcatccttaccgagtcagttgagctaaatcccatcaaaagtggttcactatgcatgccatcaaatgggagcccacttgggtcagtcatggatgcataggtatattccttttcatttccttgtgcatctgtaagggctaatataatccttctttgcttctggtgggaaaatcaaatagttaacccttggattcccccattgattttgaggacttctctaaaacacaaataaatcaccttcaaaagtgtgtaacctgtgatcaagagttttacccaaacatttttaaaacttgtgtttttcaagtgttgcttttagcgttaagaagctcttttaatcagagcttttgtgttatatctttttatcagcattatgtcagaaaagcagataggagaaagtttaagcagttgcaatatgggtatattgatattctgttgattgaattgcagttcttttatttgtaatgttatagctgcaatattgataataaggatgatgttggattgattatcttcctatgtaaattttcagctccatcc

SEQ ID NO: 13757 - DNA, 7128 bp, Vitis vinifera
  Intron number 2 from transcript GSVIVT01023286001 (locus G SVIVG01023286001) derived from phytozome v7.0 (chr-ID chr1 2; pos 20094295 to 20101422 reverse strand)
ggtcacgggtaagttgtagctgtcttaaattatgcattcatccaatttttgtgctcttaaaaataaaatctgttcagttttcactatgcaggttttggttggtatggggattttagatgatatttaagttttgtatttttttagtccttttgttttttggtttatttatttatttttttatgtttatgtttttttttttttttcaattgaacacaattttgaaatcctaatccttctgattattttcttctctggttgttttaatgttaggcaaacttattgaaagagtgtaaggttggcaggattttggtcaagcaatctgaaagcatatttgattatagtttaaccgtggttaatattttggttactatcttgcagaagtgaggatatgtcatttcatgcattttctagtgaggatatataatattttttttttctgttcgaaaatttacactccatgtttgttttatgtgagtcttttgtagatataattttttcaagattagctatggaaaattaggacatttgaagatttgcatatctttttccaatgctttaacttgcaatactgtagttattgtccctgatttgaacactgcctctagtgttgttaaatcctcctgaagattatataactataacaagaatgggttctgctgaatctctctctctctctctctctttctaagtgtgcaaggagagatttattgttgtgaagaggttgtaagatggctgatatggatatatccgtcctgtgtgaaaaacattggggtgtatttaaatcaatttctgtggtgaaagtgggacccatagttcaagtctgaatcacatataatatacttcacattctgctggaaagttgatgtactgggttcacttgtttgcaacttcgcgagcatggtttattttcatgaacttccagaatttgattctgaaagttaatttcatagactttcagaaagaagagccttcaatcaacaacatgaactgcaacaaataatccctctttcctatggagttgggatttaagaggaaaaatagaatatagaaagtgggaatgggattattcttagttgatccctgtatggtggaattggttggttgatccttatctctaaggttggtgctcattctgtgatattggttggttgattgctagttatcagctaaggtagttcaggctgtagatgtttagcaataggttgaagttaaaactatctatattgatatttggtgtctaattaaaaacttaatatagcgagaaacttcaaatgtaaagttgaagtttaaaaccttggttagaagaaaatgaaaacaagggcaaatgctctcaccatttaagtttcaattcagaaatgttaaagaatctctggtttactcagtgtctgaggttgccatttctatagcaccaaacgatttctagatttagtatgattatttcttaataactttgtaggaccttatggaattatcatgagacttggaagggtgtgggtgatggctctctagtttggttgagtaatttgctttatatggtattgaggatgaagaagacgggtggtaaatggagaaaaaagtactctggtacctgaacctgcaattcaagctactctaaagattgtactttctagaattaaactttgtgtgcaaagctattaagcaaagatttgtacataaaacaactgtatctgaaattcaatttggtgggaagctatttccttactgaagttcctgcacttcttgtctgggaattgtctgggggaaggttgtttgtcgttccttgatttcatcaattgggtggtggaaggtaggctatctgggattgtgtttgatccttctataggttcttcttattttactttattttctctagctttgtatggacgacccatgtgcataaaccatataggatttacttctctttggagtatttatgtatttatcatctttgtttgcctatcaaaaaaaaaaaaaaaaaaaaacagacctccatatggtgttcatcaacttaggaaaagcatggttcataataagataatgtgttgatttgaaaaggaacgtcagttagatatattaacaaatcagggctatgcatgagggagttattaatagctagcctcagaaaattagaagagaaacaaatgaatttccaatttcagtaagcttgcattgatgctcaataaagagccaaaattaactttttctgttggttatgaatgaagtcaccaggcttattgaggaagaagtcccatgatgcgtattatttgctgataagatagttttacctcttataaaagtcacaactttagttgatgaaattagcgtagtaatcaattcagaatgaagactaagggacaatactttagcctttgtttggattggcttctaacaagctaaaagctgtgagcttcgagacgtctttggataattttactaaaagagctcatgactcgaataaaagcttaatatggaagtcagaacaatattgcttctggtagaagtctttttatagtttattgatgaagctatttcatgtttaagctttcatcatgtcaagattgccactttgaaactattgtttcagctttggcttctagctgaagccataaatgcgaacttattcaaaatgaagctttagaatcccaagtttttaagtaagacctggttgaatatttggaatgcatttttcattaaattaggaatagaaatgaagatatgttgagaactaatgggcaaaatgtacccaaaagagaccaaatttctacagctaaagaaattatcatttctgttatattgggtcaattgttcataaagaagattgtggaggatgttgcccataaaattagggcaggatggatgaatcaaagaagagcatctggagtatcatgtgatcatagattttttgtccccctcctttttcccctttaaattataaacaacaattcattacatgaatttgaaagtacaagaaagattgaaagtgaatgacacaaaactgtaacccaaagcaccaaagtgaatgaggtcacacagagacataacaccaaaaacatacaaactcaaggtggcagaaaatccctgatgaagaacctaattgcaaggcaccttggttagccaattgttgtgctgcctagttagacagatgaaatccatgtgtaacaacaccctaagggtttagcaacattgataattttgcccaaccatacaccatacttccatcacccttgcttatcttatgacaccctagagactctccttccaccaggatgttgcctgaatgtctacactttatggcacagcatgttggatgcttgaggcacaacttgtgtgaaaatgtgtttggctaaaaggaggatgctaagatggatgggaaataatgcaaggatggatagaataagaaatgaatggatccataagaaggtaaaggtggcaccaatgaagataagatgaaagaaagttgtttaagatatttggaccttctgagatgaagaccgaggtacgatgaggcatttgatttggttggatgtgttgtgccacaaaattcatgggcacaggctgtgcaaggagtagtgtgactgttgaggatataatggaggatgtgtagctgggtaagaaggtggtggaagagctcaggtaaatgggagcccttcttgcaagcatagtttggaacccttgagttcctatgaagatggccttctttgcttggaaagctgcatggggaagtattttgacaattaatcagcttaaaaggaggggacagacaatgttgaacagatgctatatgtacaaagatgaagaatcaattgatcatatgcttagctctaaagcaagtatcctgtggtggttgtattttttttttctctttttggtgtggcttaggtgaagcacttcaataagaggaacactcttgagttggcacggatctgttgggggaaagaaatggaaaaaaaaaattggagggcctttctgcctgttttggactttatgaaaggaaaaaaacaagaggtctttttaagatgttgaatagttggaccaagcaatcaaaattgctttgataagtatttgtttggaatgggttagagtgtatatgggcaatcatttattgactatgataggctttgttgattgacttagctccaagtaaggagtgggagcttgattttgttttcctctctattttttttttggttgtttgttggtgcttattgtatacatcatgtgtattttgttgtgtgctcttttttttaataggtactttaccgtttgcttttcttaggttccattaattgcttatccaaaaaaaaaaaaaaaaaaagtcacagttattatgtatgctctatacttaggctgtattgatgtatacctgattttgtttatcaaaaggaaaaagaaaaaaagaaggaagtctagttggattatgaaagatggcttattgttaagtggagttgtgttgagttctaagacaataaatatcgcctacttaagtagtgaagtgatgaagccttgtaatcttttgtacacacttatgcttaggggactattttggtccacaagtttcttaatccactgttgttgctcatgattcatcccttgagattgttggtttccaatgttccttattggttgggatgaaaggaatcattgcttgtatatttggatgcaaagtttatagttggataaagatcaaatccattgttgtcaagaaactcgaagcagtttgtctaaactagaaataatctacctgcttgtctaggcatttaggagggtcccagtgtcaccaggcataatttttttttttttttttgtaccagaaattcttaagcagttttgctctgtggattaaattcattgtctcgccactgcaccttatgattgggtttcttttcaatttaattgggcataatggaggttttttaatcactagcaaggcttgagagcagcagtggtgctaggggagaatttgaggtgggttaagttgtggaatttatttcatgcgggccaaaataatatcaaagtacttgtatagcctagaggtagccatgcacttttttgcgtaacttattgaacaaggggtcaaatccccttgatagttggtttttttgtgtgagtttagcatgtctccaccaccacttgagagtacttgtttcctaatggatatgagttcctttaggactttatgtttattgcttgtttttgtttttatgttcagttttgtgtatgtgtgtatatgtatgcttgtgtgaatgaagaggcaagagtatagaagcaatcttcatttgactgatttttggtgcattgacaaacttacatttgaatgtcatgagcctccttggtactaggctaaagatgattgtttctagtgacatatcatcctcctttataccctctcctttcgccttacaaattctttgcttgtaacgaaagggataaacaaaacaaggctaaaattataattataaagtttggtatatgcatgagaaaccatgatctatcaaaacgcttggtcttatgaaacaaaataactgaaactctcctgatgctcacaattgaagtttgtattaaaaagcaatagttttctgtcttgtgtattttctttttcaaagaatgtactttttctgttaaaatagtgtgcttaaacatgcacttccaagttcttgagcaagtttagaaaagttggattcagaaattcttacttggattagcttgttctcaattccatacattagataatcatttctctcttctaccacctgaaacttctttcttgtatgtatgtatgtctttgtataattttacctaatcaacttaagaagaccatgttttatgaataaaataacataaaaacattagagtaacccctgaggaggactcagtgctttggaaagggggggatactgataattttcggattcggggggcttacaatctgttggcagcccctaatcctcttgtttttccgggaaaaaatatttgggtggatatggtcccttccaaagtggctttctttgcgtgggaggctacttgggaaaaaatcctcacattggataggttgcaagtgcatgggtggcagcttccaaattgttgctttttgtgtggttgtgaagaggaaaatgtaaatcacattcttttacactgtacagtggttaggaccctttgggaaatcgcctttgccttattcggggtccagtgggtgcttccagagagggtcaaagaggcgttgttttgttggcagggttcttttgtgggtaaaaaaaggaagaaaatatggaagtccattccgttatgtattttttggacggtgtggaagcaaagaaataggttagcttttagagggggttttgtggctattcagtctctcaagaactcttttgtatgtaatctgtggagttgggttaagttgtataggggagaggagtcctcttcacttctaggcttcttggagtgggtagcggtcccttaagggctggtgaggtgttcttggttttgtttttttttggccttgggggctgctttgtataccttttgtatgcggtgcggccttttggccttttttaatttagtttctgcttttgcctatcaaaaaaacattatgttttttgtcaatatttgtttatctttgttgttgttaggcattagatatatgcaccctgctttagtgcttaggtgatctgctaatgcaattaggtattcagtttttaatctcttgttggtttgattgtctatattttgattttggagtcttacagttcctagtttgctgtgttcactttgctcaagcagtacattgtttccaatgtgttttaatttctttattttatttttaacacatgaatgcaacttcctcattttttatattttctttatacataaacttttgtccccattgggacttgaacctagaacctgccccaaactcacctcaatcctctaccacttcgccatgcctcaaagactaacacatgaatgcaacttcattgagttttgttatctatcactgggttctcatagggttgttgggtttctttcgtgatattctcctttatactttctcaggtgagtacttaatgattttccttgtttttgttttgcttagaggacacattgaaggcactgaaagagaaggcaaaa

SEQ ID NO: 13758 - DNA, 952 bp, Vitis vinifera
  Intron number 2 from transcript GSVIVT01028813001 (locus G SVIVG01028813001) derived from phytozome v7.0 (chr-ID chr1 6; pos 18484832 to 18485783)
gatcccactaggtatatcttcttcctagtctttgattcgaattggaactgttttcggggtgtttaggtgttttgtggaaatggaattacttagattttgtatttggataacttttgaaagcataaattcattgtttggaatataattataacacatatgtaaatttatgcatgtgtaccctgctcaagtcaataaatccctattccctactacctggtttgggttatttccttttcatcattcacattgggacactgtccataaggtgtgactacacatatacaaacaatcagaagatcacataatgaattatacactcaatccttgttcaaccctgagatgggtggcttgaaatccttatctgtagcttctgaggttgcaagctaggactactttccatgaaatgcgtgagatatagctttgcagtatttctaggcatgatgtgtaaaggtgtacataatttcattttttgaatctttgaagtggttctacaccaaaggggcttagtttaaaatttaaatgtgaggaagaacatgataaagtcagtttaggtgctatttgtgtaaatttgaatatttcttctttactggaacaggaagtataagggcttccttaattaataaactgctgattagtaatgcaaattttagttactcttctagattgaacaatattgatcaattgacttcagtatatagtttctatttgtagataggttaattattacagtacccaaactcttgtagaggtgaacattcttctgattttaagcatactaaacctcaggttttaggcacaggcacttcacttttcggcacaaaaaattattccattgttgttgatgtataaattactgatgcatatataatgttgtgatatgcttctaattttagtttctttatcatcatttctggcagtgtggagaagggaaaccttggggtacctcagttac

SEQ ID NO: 13759 - DNA, 5696 bp, Vitis vinifera
  Intron number 5 from transcript GSVIVT01020785001 (locus G SVIVG01020785001) derived from phytozome v7.0 (chr-ID chr1 2; pos 2022245 to 2027940 reverse strand)
gattgtagccattggtgtcttgctggagttcccgatacttggaatgaacttctatatgcagctcttattcaaaattaatctcttgtttttattatattatttgtaattgaaaattcaattatagggttttaacttgtttatatattttgttgtcaagtttgttaccaatttatggatatctaagtggttttcttcattgacattggtttatccaatttgtctcaaaataaagtattatacagataatggagtagttgtgatttattttattcatttgcttttatgagaaaattggtcagagtgcaatataatttgttgattgatctaaaaaattttgattcatagctttttagatgtaccaatttttagcattcattataagataaaattttgttttgagaattcttttaaaccaacaaagcagaggttttagaatttgtaagagctattattcttgttactacatattttagaaaaacaaatatttggaatattttaattagagtgagattcatgcaagtttccttgtttcccaatagcaaaataaaataatcttaggcatatgtttgattaataaatctatggagcctcgtcaatgcaactagttttagtttttgtccacgatttagaggattttgaagtgagctccaacaagcttcgaggatttcggagcaatacgtgttgacttgcatgaatttgtgagcatctatagattacactaggtatgcatgatcatttttaaggtttttaattaattgtctttttttttttggtaatctaagtttaacttttctttctaatctaatatcgtgtgtgcaaaatgcctatattaccgtggtttaaaaaaccagaccagcccggtcgatccgaccgatcacggttccgtttggtctgatcaattagaccggaaacaggttgaaccaggatttgactggctgaaccgacagtccgactggtgaatcagacaaaccgtctggttcgattcaatttatttatttattttcagcataaaaacaatgccgttttggaggatataaaacctccttctccaaaccctctctctccaaaccatagttgccgcctgcctcccgacccgctcccaacgcttcgcgataggctctcaccgtcgaccgtttcacagtgcaaaatcttcttccaccagtcgttgcaagatcaccgtttcctgagtcgcattttcctcgctgtgccattgcaagccacaagctccctctgctactagaatcccggttaaccccccccaccccattattgtaacctctcctgcagtagttgcaagcctgcaactttttccaagtggaaataaaggtatgatattataatttaattatttattatttaaccccattgtggaaatcaaggtaaacactcctcaagtttttcatttcatgtacataatattttagaatgttttgatttaatttacaattaattagatcaattttttgaatccaaaattatttttaaaaaataaaaaattcattaaaaatttaaattattaattatgtcttaatttataattcatttatctaaattcaaaatatgaatttgtgtatataggggaaacaataaagtcatgattcacaatatattttttttaatgattagatctagttttaaagttccaaattatttttaaaaattgttaaacctattaataaattcaatacaaatatcacttcatttgaagttcatttttatagtgaaaaattttataaaaatataattatgtgcagaaaaaaataaaatagtcattataaaccaaattttatccataaatttatacttttagtgagtttattatttgagtttcaaattatttttaacaattactaaacttattaattaatccaacactttaaatcttgtttaatttgaaacttatttgtatggttaaaaaaaatagaaaataatgattgtatgtagaagaaaaataataaagtcattttagaccaatttttgtttataaacttatagtatttattggatcattgtttgagtttcaagttattttaaaaaattactaaacttattaatgaatccaacgcattaagttttagttcatttgaagttcatttgcctagtaaaagaaatcgaaaaatgaggattttatataaaataaagtcgctctacaccaatatattgcccataaattttttgtattaattggttcattatttgaattttaaattatttttaaacattattagactcattaatgaatccaacgtattaagtattctttaatttagaattaattttcctaataaaaaaattggaaaaaaatgattctatataaaaaagaaacaataaattcattctaaaccaatttttgtccataaattttttatattaattggtccattatttgagttttaaattatttttaaaaattactaaacttaatacttaatttagagtttatttgtcaaataaaaaaaattgttatatctatatctatatatatatatatatatatatatatatataaagaagaaaccaacccatatatttaaaataaattttggtttatgacttactaatgttattgaattttataactttttagtattaattaaattgatttataagttttaaattatttttaaaaatgaataaattttattatcaagtacaatttgatttgatgaaaaattttagaaaagtttaaaataaattcaaaaaagcacatgtaatgtaaagaaatattatattttaagacttatggtatcattattaaattgtgaagagagaaaatgaataatatcatgtttaattttatttattttttattatttgtttaaaaaatttctatgttttccttttatttttaaaaacaagtaaaaacaaattgtacttattttttaaagttattttctattttactttatttttaaaaatcctttctagaaaacaattttagaattttagaaaactgtttttaaatcaaaagaccaaatagactcttaatttccttctagctaatcaagaaaaatgaagacccatgttggaatgaggaatcccaacttatgctagaagaggcttctataaataagaacatccatattgaagtcataagtaagcgaaaaggcttagattttatttttaaaactaggacaataggttcttaatatcatctcttgaaaaaaagttcgtattcttatcttcttaaggaaattaggaactctaaattcttaagattttatttgaaaattagtggggcatgttgatattgatctcatagatatcattcacactggtcgcatcaataagaagcagaatctcattcaacatggagtaatacatgttaagttagagtcaaagatgacttgacaaatgtcacaactcaaccatagtctgaagtataagtttcaatatgtaaatgtcagtatgattgatgttgttctcaacatttgttagtattcaaaaaggtcctattaaagataagaaaggctagattatagagattgattaagctttatgtccacctcatgtgtggttaacacaatggttagctcttactaccaatctctattaatatttgtagcaaagacaatgaaagagtcgtgcactccaagcacaatcaatgatccaattctttgattgtaattttgctcgttgattgaaatatcgggcgaaattgtgtttcggtgcatttcgatcaacatatctccatgctatccaagggagttgaacccccaaccaaaaggttggttgagcacccaccttaccattggggcattaaggcaagtttgacctttgttaattattttgcattatatatatatatacacacacaaaatattaaaacaatactttaaacaacaaattaattataattattttataattaaataatttttttcatttaattgagtaacaaaaagtttttaatatcattaatatattaattaaatattaaaaaattatatatttatcatcatttattttatatcatataatacaattaaattaaatatatcataattttactattaaatatattttaaaattaaacatattataatcaaatatcacaatattattatcgaataatattttatgcaatttaataatcaatgtatatatatatatatatatcttcaacaaaacaactttaaaatgtctattatatttataatttcattttaaaaaaatttattttacattttcaaaagttttgatcaattttagtccaatcgatattttataccaaaatatctatcgatatatcttcaatatatccgtaaaatcgaactattgatatatccataattatcaatatttttatccttgattctggttaattgtttgtatgttgtattgtaaccaatattgttcatatgttgaatttagtggacacaaggcttgagttttgaataatttatcataataggcagtttgtattgaataaaaataagaagttaggtcagcagagacagccccatttgggcagtcgcgcgtgccctttggtgttaagatattgaagtttattacgcattgtaatccaacttaagagactttccaatctgtacttatgataagcacaaaggcccctacccattatgaaatttgaatctcaaccaccacatgacacacccactcttctcatccaactcttatctcttaaacgcagcgtttcatggacccaccaataaaatacatctgccaggatcaaatgccacatcaaatgaacttttgacttctcatttgggttgggggttgccaagacgccaatacatctcatcttattcccctaattaaacaacctttctaatttttatatatatatcacaaaatattaaattaattctcatatttttaccttttttttcttttatttatttaagttggtgaagctgaaatattaaaagaactgcatgcatgcataaatagatttaatcaatgtgtagcaaaattatattacatggctaagggcaggataaaaacttccttatggccaaatatatgggtgaagataatttgattcaccccatctcttctgatattattgaaattcaagagagagagagagagagagagggagtttcttacttaattcatgttaaatttcattaaatttattattaatttcaatataaattaattcaagtgtatatatatatatatagaaagagagagagagacagagagggagaggtaacggcgagaaaatagataaatagattagcttagtagtaaagagtgatagaaagaattaatgaaattaaagacaaatttaagtcaattattcagttacatctgaaacgtcagcaagtgcttatatcaaaatcaaagtttttaatctttttgcattcctatacaaagtggtaactgataataaagacaaatgaatgatccaaaaatcaaaaataaaataaatcttgcatgatttcgatagattggtcataggtttctaaaatttgttgtggtgattggactcaaagatcgtggctcattagtgaaaattatttcatcattcacgaaattaaaatttgtaaaataagatgtacgtcatcataattttttttttttggtagaatgaaaatagtttaatattggtatatatgccatatgtatggcgcagcatttgttcaacatccttgtcttgagaggaactcaagacccaccagcccaattcagctagttttcacaaagggcatccagtagtcatcaac

SEQ ID NO: 13760 - DNA, 16019 bp, Vitis vinifera
  Intron number 10 from transcript GSVIVT01009811001 (locus GSVIVG01009811001) derived from phytozome v7.0 (chr-ID chr 18; pos 11452690 to 11468708 reverse strand)
ggtgagttaatttgagattattaatggtaagatgtgtacagtctgtctaagtttaaagggtcgctttctttttttctaaattgcatctttgtttgagttggaaatctatatttgaagcttttaagaatatggtagagtattccaaatttcctagatatatgatgattttggaaaatcttatagcattggagttctagggcccgttttaaagaggatctctcatatagacttatatagttgaaagaaagcctttttgtccttaacaaccctagaatagttgtctaccatcaaataggtgatccagggtttcaatcttttaatgtttaaggagaggaacaaggaataaaatttataatatcacctagcaattctcaatggtggaactctattgattttcttcaaggtatgtaaagaaaaaacttaatattatcaaatcaatacttaatctcgttttacattaattaaccttatttataggcttagaaaaccctagaatttgaataaaaccatgaaaaaaatgaacgtaacctaatgtagcaaattaattaagactcttattcctttcccacaactattaaatcttctaaagaattaaaataaattaaaatatttttagaataaaaagctttttgtaataaaagtctctattgaagaagacttccggattctattttatcttagaaaacaaaaggtttaaaacttgcaaaattacctaaatacaattaattaagtaatttaggatatttttattcttttattcatttcttaagtagattttggagattcatcctcatttgtatttgagtttttaaaatttggaagtcttctttatcataaacttttattacaagaagtttctaattttaaaacttaagtttttgttttcttttaactttttagaagatttaataattttaggaaataaataggggcgctaataagaaacaacataggttaggtttaccttttttataattttatttagtttttaaggtattctaaagtatagatataagaataattgatgtaaaattgattaaaaatgattaatgatgaatgataataagttctttttcataccttttaatttttaatggtaaaactccattgcttttttttaggtgagatttctagaaggtcctttcctattttgattttatcatgttgttactattttattcttgttcccctccataaatcataaagattgaagctctagcacatacacacctactggactatagacaaccactctaaagtagtcttaaagcttaaagtaggtttgatctttgaaaatttttttgtgaggcatatggcctttctaagcaaatgtttgtggaggtaaggtttacactcaaatgatcaaaaagaaaaaagtctatttcacacaatgatttctggagagagatcggatgatatcccaatggtcacaaaagaaaggttactgcagcttgaaagaaattgagcaaactattggaggagcattggaaataagtggaggcactcttattcactatggaatgctttcaatgggaaaatgaaatcctcaaaatcgttgtcatggcccgaatcccatagtacacaccaattcccattagatctgtagatcccaaccttcattccaactggctgcacccgttgaagaatacacaaagacccctaagctagttggtacgaacaaacgaggatccaagccagaacaatcagctccactgaaaagcgatagtaattcatattctagtattaagcaggctagcaaaagtctagcacgaagtagtacacatgttctcgaatgtaatcccgttcctggagtaggataagcaatttgttgggattgaacccctaaaagtgagacatgatataacaaagttaaatttaattttccccttgttatttctttggtgtattgactttaatttgaacattcaacgcatgtctcttacattgtacatgacttgagtccattaggagttgcacaaaagatacaagtcattggtcctttattagtagataagtagtccatagtcagtttatggatttggacaatcttgtaaagactatagtacactatctcctaattgaaaggatgacttgttttggccattgggatgagtttcctatgatgagtgtactagtgtatgtgatgcacactggacaagacttacggtgaattatgatgcaagactatcaattatcatgatttatcaggttattatactgcatgaactctcaaccttaagaagatattgagcttatgttaaaatcaataagaagttttaacttatgtgtgagatccgaaagtggttatatattcttatggattgtgttactattaatggaggttgatggtaataagtattcttaatatagataccatgatatctcatgggattaagatggtatattctcttgggtaatctaaaggacatatgatcatgaaatctgtggcgccacagtaattccttaagtgaaatttgtaactaaaggattgaagaaataatcttgataggtgataacactaccttgctagattacgaaaaccagttcatggggagtctacatgcagtggacagtaagtcatggattcgaacttcatcttgttattatttacataaggtactagagtgcggttgattctctttagtgaaatgttgaattaacttcagaattggattcttagggaattagtactcctatgggtcctagtggtccccactttaaagcgtatataccatgatgacacaacttatatacctagtggtctcctaaaagcaagacattatataaccaagttaaatttaattttccctttgttatctctttggtgtattgactttaatttgaacatttagctcatgtttcttacattgtacacgacttgagtgcattacgagttgcacagaagatacaagtcataagtcatttgtaagtagataagtagcccatagtcggttcatggatttggacaatccagtagagactgtagtgctctatctcctaattgaaaggatgacttgttttgaccgttgggatgagtttcttatgatgagtgtactagtgtatgtgatgcacactggacaggacctacggtgaatcatgacgcaagactatcaattatcatgatttatcaggctattatactgcataaactttcaactttgagagaatattgagtttatgttaaaatcaataagaaactttaacttatgagtgagatcctaaagtggttatatatccttatggattgggttactatttgacacgaaatatgggatgaaaaataataaattctatctattagattgattattcacagtttatataggagattacaagagaagaaatgggaaacaaaagacataataggaaactaacttattcctaaaccaacttaatcctaaatcataaaactatttatttacagaaataagaaactaataaagctatctatttatagaaacaggaaactaacataataggaaaataattattttattctatttacaactcaacactctccctcaagctgagaaatagatgtcttccattcccaacttgaatacaagatcgtgaaacattgaaccgttcaatccttttgttaggatattagctaattgatgttctgatgagacataggacacacacactactccttcctccaatttttctttgatgaaatgcctatcaatctcaatatgttttgtcctattgtgttgtatagggttatgagcaatattgatagctgacttgttgtcacaatagagcttcatagaaccatcctacttgattctcaaatcatctagaataatctttagccaaagtagttcacacaacccttgagcaatgaccctaaactctgattctgcagacgaccttgctaccacattctgtgttaccagattacctccaagaaaagtataataccctgtagttgatcttcgatccactagggaacctgcatagtcagcgtcggtgtatgcttctagagcaagagtattgttcttcttgaacaaaattcctttcccggggttgcctttcaagtaatgcagaaccctgtaagcagcttgaagatgaggttctcttggatcatgcatgaattgattgattacgctcatcgagtaggcgatgtctggcctagtgtgagcaaggtatatgagcctactaaccagcctctggtacattattttatccaccaccgattcttctttagtttttcccaacttatggtttggatccattggggtggagactagtttacgcccaatcttccttgtttttgccaataaatcagtcacatacttttgttgagagatcaagatcccttgtgtggaatatgccaccttaataccgaggaagtactttagtttctctagttcctttatctcaaactctgttgctaatctctgtttcacttcatacttttctctctcatcatttccaatcactatgatgtcgtcaacatagactagaagagcagttactccccctgcagccgagtgcttaataaagagagtgtggtcaccttggctttgtttgcacctagactctttcatgacttttgcaaatctgctaaaccaagccctatgagattgttttagcccataaagggtctttttcagcttgcacaccttgttacatgtgtttccctcaaatcccggtgggatgttcatataaatctcttcatctaaatcaccatgaagaaatgcattcttaacatcatactgtaaaagttgccaattgtagtggacagctagtgacaacaggattcttacagtattcatttttgcaactggagcaaaagtctcctgataatcaactccataagtttgagtgtaccctttagctaccaatcttgctttatgtctctcaagagatccatcagtcttatatttcagtgtgaaaatccacttgcaatcaacaatgtttttctctttcggtctttcaacaatctcccatgttttattcttttctaatgcactcatcttatctctcatagcatcctttcattccctttttgtcaatgcctcagaaacagtgttagggatgatagtggtgtttagactcacaataaaattcttgtgggatggtgataggtgcttaagagacatagtgtgatagtggatagagtggtcggttagtgcattctctggtgccttttctgacagcaatgggaaggtctaggtctaggttgtctgtcgagtcagtggaagtttcaccaggttgtgtatgtaaaggtgggtctgatcttatcgtgatttcattcccaaggtctgagttggattcttgtacctgcttttgttctggaatggtcttttcccttgaaaacaccttaggaaactgtggaaaattgcgagtgacattggctggaacaggggatgacacggattcaatggttaaattgggtgactcaggtgtgattgactcggatgactcaggttcttcatcaccatgggttgagacatgaggaagatcaagaggttcataggactcacaaggactatcttccatcattgaaatctcccattggagagaggacttggggaaaaaatgtttattttctgtgaaggtggcatctgcagagatgtaaaattttttggctgagggattgtaacacttgtatcctttttgagtggatgagtaaccaaggaagacacattttatggctcggggatctagcttgtctttatgttggctgtggacatgaacaaatgtagtgcacccaaatatcctaggaatgagcccatttgaggttctgaagtgtggatcgatactcttaagtatctctacgggggttttgttgtctaatactcgtgagagaattctatttatcatgtatgtagcagtaagaacaacttccccccaataggacttaggaacattcccttgaaagagtaaaactggggttgtgttgagtaaatgcctttttttttttctcggctaccccattttgttagggtgtgttaacacatgatgagtcatggagaatgccctgtgattgaaaatagggtgacaaaatctggttgaagtaatctctagcattgtctgtcctaaagttttttattttgaccccaaattggttttgaaccattgagtggaaattaggtataacaatgctaacatcagatttttgtttaagaagaaagatccatgtaacttaagtgtagtcatcaattaaggatacaaaccagcgagccccagaaacattaggtagagtcgaaggaccccatatgtcactatgaatcaaatgaaaaggatgagagcttcttttattgctaatacgagaagatacacgagtatgttttgccaattcgcaagtttcgcaatgaaacttagaaatatctaatccttggaacaaatgagaaaacatgacctttaaaaccctaaaagatggatgacctagacgtaggtgatacaaccaaatggtgtctttatttgaggaattgaaaaaagacaacgacaaattattactagttttctgagatgataagatggtaaagaccgcttctttcattagcaagtccaatcctcctcctcgagccttgttcttgaaaaacacaataagaagggaaaaaatagcataacatttaagatcatgggtaagcttttgaatggaaacaaggttagtcgataattttggtacatgaaggacatttttaagaataagggtaggtgtgatgtatatgtctctgaaacctgcaacagtagctaaatagccattggctactgcaattttcttgttacttgggcttggggtataggtatggaaaagttgagatttggaggtcatatggtctgtggcactggagtttattatccaagagtcaacataaaccctgtgtgaggcatttatgcaaaaagagagtgaaggtgtacctgaaagagtcaaataacaagttcctgtaggtttgtcaagggatcccaacaagtttctcaacttctccatttcttcacaattaaacaagttccagtaggtttgtaaagaacacttgaataaaaaaaatccagctatgaaggccagaaaaatggcgatgaaggtcagaatgatgcccaggtcttaaaaacctacaactctgataccatgacacgaaatatgggatgaaaaataataagttctatctattagattgactatacacacagtttatataagaaattataagagaagaaataggaaacaagatatataataggaaactaacttattcttaaactaacttattcctaaatcataaaactatttatttatagaaataggaaactaataaaactatctatttacagaaataggaaactaatataataggaaaataattctcttattatatttacagctcaacactattaatggaggttggtggcaatagacattctcaatatagataccatgatatctcatgggattaagacagtatattcccttgggtaatccaaaggacatgtgatcatgaaatctgtggtgccacagtaattctttaagtggaatttgagatatgctaagagctaaattatgtcatttgattacataataagtgagatttataactaaaggattgaagaagtaatcttgataggtaataacactaccttgctagattacgaacatcagttcatgtggagcctgcatacaattgacagtaactcacagatttgaacttcatcttgttgttatttacatagggtactaaagtgcgattgattatttttagtgaaatgttgaatcaactttagaattggattattagggagtttgtacttctatgggtcttagtggtcccactttaaagcttatataccatgatgacacagtttatgagagttgaattgactctagatttactcttgtgcataagggcgctttgataattatgcaaggttgcacaaaggatagtgagcaaggtctttagattaggttaattgattaattagatagtcttgtatggttaattaatcaattaggacttattttggactagattaagtgacctaagtcttattaggttcaagtcatttaagtccactaggagaccctataaatagccccttaggggttaggatttccatcatttttttatgggagtcgtcttccacctttaaaaagagagagagacataacttcctcatttccaaagcccatactttatagcgccaagattgtggttcaagttgttgggcggaagatcttgggtgtataagaccttgagacattcttcaccgccagaaagtgatatgggaacatctagatccaagtgtaagtattatatctctagatatttattctaatatagtttttatagtcatattttatgttgcgatagatttagagaaacctaggatagtttgcatacaccctacaagattcagggacaaggaatggagaaatccggatttaccaataggtgattgcacttatatttttttttattttcttctaggtgatttgggtaaaaagaaattttagatattgtaaatatctggatccatggattcactatgaaacttagaggtcatttgtttttttacttttttatgacttattataaactttttgctgaataaaaaaagccaaaatatttggctttttctaaatggaaaaagtaacatgttggttttattttactttttaatatttaatagaaataaaatattaaaaaaataaacaacctaatacttaacactattaagcattaaagttctatttaaaattaagtaaaaaaaacaaacaccaccttagttttctttctttgctaatcttgggccttggtttgtcctagagatggcaaaatttaggtttttttttgggcaacttggcttggctcaccttaagtgggtcaagtttgagaaaattgcactttaagtttgggtagaccattggtataaggattgttttgaaacctagtgcacagttgtgattttgtcaacccaccataccttagttatatagatggaatgatattttgcctttattcattttgaagcatacttgtatttagagatatggggtagttaagcaaaagtgcaataatattgaggggaatccttgtatgaggcaacgaattcaaaataatggaacttttcaagaattgaggttagatttatgttgcaaatctatataactttcccgttcttatctttaacaaggtggaaatttctttgtaatgtcagtcctatttagaatataccattgcacattttagcacaagacaattgcttctttagacttagtattgtcccccaactaagtgacatggagaactcaagttgataaacaatacctaaaacatgactaaaaactagaaagggaaaggacaaaaccatctaacttgaccttagttggtatcaaattagggcaaggtagggaaatgatccaatgtccttagtaggcccaccttaatccacccacacctttgtaggtttggtttaagcttttttctatgaggtaaggttgatataagggtgaatcattcaaagtctacctcattggcatccttagtttctctagcttttgtttaggtttaaatgagcataatatatttggattgaaaatttgcctatttgcttgcattggaggttcttgtaaaatagaaaccttttccacacatggttcaaaattacggtatcagtaattaacttcgaggatctcgaagcgtattagtctcggtgtattagcttgatatcagacgatacgcaaaataagataattaaaatattcaaaaaattataaaatattatataaaaaaaataggtacaattaaatatgttcaaaaaaattaatacaacaaaattgtctcatatttaacattatttatgataatactaagaataaaaaattattttatttcaaatataataaaatttttactaaaaaacaaaatacaataatcaatttcatgatgaatgacgaggagactcaaaatcatcatcatcaaatataaatataaattaaaaaattaaaaatatattctctatagaatataacataaatatatttaatatcatccataatattatcattaaatcccattccataccatccatataaatgaatttttctttatcaaattgaaactcaatttctaccttatcaataaatatattttataccataaataattttaccaataaataatatcttatacggtcatactttcttataaaattataaatccatataaattaatagtttaccaatttcaacttccaccatacacatacaattcatataaaattataaatttaccttccatcatacacatatcatccatataaaattataaatccacataaattaagagtttaccaattttagcttccaccatacacatactatccatataaaattataaattcatataaattaattgtttaccaattccagcttctaccatattagcatccatataaatacatgtaattaaatcttcaactttaccagtttgagcttcaagctttccacccacacacatcgtgactgtcgtttcaagccttccacccacacatagtcacacaccatgattgtcggcacccacgactggagggagattattgtgagggttgccttgccagcattgagtcaccaccatcggcacacaaaagctcctacactccagcaatgctcaatttatggtcaagtaagtaaaatgaaatctgtgtgctctcatcctttgctgatttctccttttaaagactttcgaaagggtcatgggttgctttcaatttggtttttttcttcttctttgatgttctcattgatgggttgaaagattcagtttcagaatcacgagtgttttcttttgaagaggaatctttgatttctctgaaaatatttttatttttgttgtgatgagaaataaaagagaatctccgtattgtttgggaatttttctataacctaattgagtcggccgagttaacttggaatctcaaccaagttatcctagttttaccgattcaatgttgagtttgtgcattatattcaaggataaaaatatcggttttgatgaatatattggtagttgaattttacggatgtattgggaaacatcgatgaatattctaacataaaatatcagtgaaacaaaaattaatcaaaactcatgaaaatgttgaaaaacttaaaaaaatgatagaaaaacaataatacatgtattaaagttgttttaatgaacaaattgacatatgtatgataaatttgtaatattagacagatatactcaataaataataatatattgaatttgaaaacatattaatattaaatgacaatatattttatttggatacattgaatggtaaaaaagaaatgatgataatatatatatatatatatatatatatatactcatgtgattgaaaactgttaaaggatgttcactccactggtgcgttgtgaaatctcaaacgtgtatatatatgcatatatactcatgtaattgaaaattgttaaggaatgttcactccattggtgcattgtgaaatctcaaacatgagaacttggtttcatatccttgtccttgcttttaaggtgttttttgctttaacatcttaaaaagaatcccacaagaaaacaaccacctatttaataaggtgacccttgtgagctatcaactaattgtgctaaatgggccatgggaaaatataggccccagtttaggccttaaaatgataaaaataaattttaatataaaatgataaatgtgatgacgtgttagtaaatcgaaaaattggctatattatcgaaaaattggtaaaacatcggtgtttcactgataacatagaagatatatcagtgaaaatgaagaaaaaatttgaaaaatcgaagaaggatatattggtaccacttatcgtctctatcctcctctgatacccgatatatcaatgaaaaatccgcaatatttaccgattttttcgtccatggttgtattgtaattggtattggactcgtcgcggccaacatcaaggtggatacgacttgatagagtcgtaccggactcagccgatactttgaacctcgcttctacaattttaatttcaatgattactctataggtagtcctaaacatcttaggattgtaggtgtctttagaaatcttagatatgtcatgattaaggccttctataaaagtgccaaagaaggacaagtcattgagtttgaaatctatgctttaatggaatgtttgtatggtaattattggattcagtgtttgaagtatcaagtcgtatccacctcgacgctggctgtgataagtcccataccagatacgatacaatgcacaaacttgacattgaattaggaagactcaaatgactcggttgagactcggttaggttacaaaaaaaaaatcccaaagaatatgaagattctcttttttttcccatcacaacaaaaatcaaaatattttcaaagaaatcaaagattcttcttcaaaagaaaatacctgtgattttgaaattaaatctttcaacccattaatgagaatatcaaagaagaaaaacaaaaaaaaaacaaattgaaaccaactcgtgacctttttgttagtctttaaaaggaaaaattagaaaatgatgagggtacacagatttcatatttacttgcctaatcacaaattgagcattgccaaagtataggaactttggtgcgccagtgatggcaacttgacgccgacaaggcaaccctcacaatcatctcccttcggttatgggtgttgatagtcgtggtgtgtgactatgtgtgggtggaaggcttgaagctgaaattggtaaatttgaatatttatatacgtgtatttatatggatgctggtatggtggaagctgaaattggtaaataattaatttatatggataatatgtgtacggtggaagccaaaattggtaaactattaatttatatggatttataatcttatatggatgatatgtgcatgatggaaggtaaactattaatttatatagatttataattttatatggattgtatgtgtatggtggaagctgaaatttgtaaactattaatttatatgaatttataattttatatgcatggtatgactgtataagatattatttattggtaaaattatttatggtataaaatgtatttatttgtaaggtaggaattgagccccaatttggtaaagaaaaatgcatttatatggatggtataagatgcgatttaatgataatattatacatgatattaaatatatttatattatattatataaagattctatttttaatatttttttaatttatatttatatttgatgatgatgattttgagctcttttgtcatttaataaggaattgattattgtattgtatgttttttagtaaaaatgttattatatttgaaataaaataattttccattattagcattatcataaataactttcaacagatgtttttataaatatttaaataatgttaaacatgagacaattttgtttttgttttttttttttaattttgttgagcttatttaattgtgttttttttttttgataatttatataatattttataattttttgaacgtgctaattatcttattttgcgtgtcgttcgataccgagtcaatacaccgagactgatatgttttgggactctccaagtcagttgctgctaccgtgactttgaatcgtgtgtggaagaggtttccattctacaagaatctctaatacaaacaaacagacaaatgtttaatccaattagatcatgttcatttaaacccaaacaaaaactagaaagtaaggatgtcaatgaggtagactttgaattattcacccttatatcaaccttacctcatagaaaaaaataatttcatagctcagaccaaacccttaaaggtgtgagtggattaaggtgggccaactaaggacattggatccttaccctaatttggtaccaacttgggtcaagttagatggttttgtcatttccctttctagtttttagtcatgtattaagcattgtttatcaacttgagttctccatgtcagttggttgggggacaatactaagtttaaaggagcggttctcttgtgctaaaatgtgcaatggtatatcctaaataggacttgacattacaaagaagtttccgcctagttaaagatagaaacaagaaagttctacagatttgtaacataaatgcaacctcaattctcgaaaagttccattattttggattcactgcctcatgcaaagattacccttaatattattacatttttgctcaactgccttgtgtttgtaaatacaagtatacttgagaatgaataagggcaaaatatcattccatctatataactaaggtagggtgggttgacaaaagcacaaccgtgctctaggtttcaaaacaattcctataccaatggtctaccaaaacttaagtgcaattttctcgaacttatcccatttaaggtgagccaagccaagttacccaaaaaagcccaggttttgccatctctaaggctaaacaaggctcaaaattagaaaagtaagaagactaagtttcatagtgggtccatagatctagatctttacagtatctaaaatttctttttacagaaatcacctagaagaaaataaaaaattacaagtacaatcacccattggtaattgccacaggttgggtttatgaaaggatgcaagttctatggaagttagatgcttaagggcacaaagctatcaacttggctagaactaaggtattctttctcttggctaaaggtatcaactagagaggtgtcatgattaaaatcttctccaaaaatgttagagagggattcaccattgaggctgaaattgttacttgattggaatatttttcccttgcaagcatgttggctatggaaattatttagttacgaagggcttgataatggtcatagctaaacatgatgccttctttttgtgctcttttgttataggacaatcataaggtggttctctacaatctaacaaggtggtttagggccatgcttttgagattttaggaggggaactaggaattaaggtgatagtggagaaataggaaagtgaaaaaagaaagaaaagatagaggagataggataaacctaagattctcattagtgccttctaagagtctcacctagtggagaataatagaacctcactattagaatatgcttattatttcttgttctccacattaaacaactatttttataggtattaagtgaccaatatatatatatatatatatgcatgtgtctactaaaaaggaaacctaattgatatggctactcatgagaactcttaattgttctcttaagttcttaaatcttccaaatcattgaattaaaggaaacttgggatgaggatatggccatggtgttggcagaactgtttatatatatatattgcgggttgaacagtagcatacctgaaactcaaaaatataatgctaggatgggattccttgtcgcatattgaagaactgaaaataagtttcacaatagcagggaatgatttggtcctggcatgataatcccccttattacctgtttactggatcatataattttcttcaccttagttggtttttattttgttatgattctttcaacttcataggtttagacatggatgcagggagccgtcacattgattgatgataatagtaagagcaagactaaaaacagcattacttgtttagatgtgcataataaagtatatatttatgattcttgtttgtagctgcaacagctcatttgtcctagttcaaatgttgaagtttagatattttacacatgttaagtcacttaattttttgtctctgaaatacagccatgtaatcatagtagatttttctctattccactaattcatatttttttcaaccttagatgattggtttacttgttatttttcaaatggtattgccctatagaagtacttggctaaatgtttaagtggcatcatccaatagtagagatcaactaattcaataatatttcagggtggccaagtatcaggaagtgaatcctggtgtat

SEQ ID NO: 13761 - DNA, 10353 bp, Vitis vinifera
  Intron number 4 from transcript GSVIVT01036887001 (locus G SVIVG01036887001) derived from phytozome v7.0 (chr-ID chr2 ; pos 18194319 to 18204671)
aacaacaccaattggctgtcattgattgcttagaggtaagaaagaccatttttttgttacttttggagttgtgaactggttcatgttccttttttttacccacttagtctacttttcaccctggagtatgcaagctgatccgtcctaacaatatgattattttccctctttttttttttttaattttaattttaattattacttttagttcatttatgtctctgtccatcagaccatatcaccaaggacatcgatattgccgttatccccttaaatagagtaggagtttcggcgcgggggggttgggctccaagtggaaaaccagatatggcatatagatgaaccacaccctaaacctgaatatatctatgaatgataaatatttgtaacatcttcttaatctatttcttttttgacatgtcctttcttaggatgatttcctctagctctagttccttagtgacttcagactcagagataaatatttgtaacatcttcttaatctatttcttttttgacatgtcctttcttaggatgatttcctctagctctagttccttagtgacttcagagacctgaggttatccatgattggcccatttccttgggggcatcttttactactaaggtggctttgttcctcatcaaagcttggttttaaggtttacataaatttgcaacatccccatctactaatgcttcatttgatttccacctcctgtatgacttggttttgggtgtgggtatgcctcggtatccaatcctttgaattcctagatttaggatatggatactcgggctgaaaaggatctcaatagctagttgtccattagcatgattgaaaaattaattatcattgaggttcatggtagcttattcagagttatatctactttattctttgttgtacgtactcaatattatttttttattagtgcaaggcatatattattctttttatttttatttttattttattagaaatgaagataaattttcttgatataatgaaaagagaaaaatgaaacattagtgcaaggcatattattgtaagtacaaaggatgtgtaaaaaaaaaattgccatattatttatgatgttttaatttttggaatttcaaatgtattaatgcaattttaatagcaattatttctagtggaaattttatatcttaagaattgatttttatcaaaatcaaaacaatatttatgtcattttagaagcacaacatgtgtgtgtgtgtgtgtaccccatggagggtcttaagggcttggccatggaaggttacttggttatcaaaaaaaaaaaaaaaatgtgtgtgtgtgtattttttgagagacaaaatttatccaagtgggggacgattgactcttatcaaaggtaccttgtctagtcttcccatttatttcatatccatttttgttattcaaaaaagggtgtgccaaatattgaaaaaacttcaaaggaactttttgtggggaggggggtttcttgaaaataagcctcacttagtgagttggctcaaagtttgtaagccaaaggtggaaggacggttgggcatacacattttttttgttttgaacatggctctcttaggcaaatggagttggatgttcactgtagaaggggagcccttgtggaagcaagtaatcattggtaaatatagggtagaagaaggtgattggtgctttttggaggtgagggagggttatggtgtagggttgtgaaaggctataagaaaagagtgggatgctttcaaaagcaagatctcttatgttgtgggcaatggaagaagaaaaagattttggagggacatttggtgtggggacactcctttgaggacctctttcccatctttatttgctatagccacctcaaaggatgcttgaggtgtatctctactgtgaaattttttgttctagttaatgactctccttctggttttttctaaagttaggggggtttgagacaaggagatcccctctccccttacttattcgtgatagccatggaggtgtttagctgtctcttgaggagggctattagtgggggcttcttatctggttgacgggtgagaggtaggagtggtgatgggattttgatatctcacttgttatttgttgatgatactttggtgttttgtgaggtgtctcaagaccatatgacttatctaagctgacttcttatgtggttggaggcttgctcgagtttaagaataaatttggagaaaagtgagctaattttgatgggcagggtgcctaatatagaggatttggccttggagttggggtgcaaagtgggaggcctttcttcctgctatttaagtcttcttttggggggccccccttcaaatctgtggaggtttgggatggtgttgaagagagatttcaaagaaggctagccatatggaaaagacagcatatctcaaaaggagggagactcactctgattcgaaacactttgtctagcatgcctatatatctcatgtctttcttttgcatgccaaaacaagtgaggttgaggttagagaagattcagagggattttctttggagtgggggggctcttgtgcagaaaccacatcttgtaaggtggaaaacagtttatttggagaaaaggaaaggtggtttgggtgtgagaaatctttctctgatgaatatagctctcttgtgtaagtggagttggcggtatgccaatgtaaaggaggctctttgaaaacaagtcatcagtcaaaagtatggtgaagaggatggggggtggtgttctcgtgagatgagggagagatttggtgtggggttgtggaaagctattaggaaggagtggaagtatttgagtggcaggttagcctaccaagtgggcaatgggtagagaatgagattctggttggacaagtggtgtggatatgagccacttagtgagtcattcccttcctcatttaccctttctatgtctaaggaagcttgggtggcggatgtttagaaccctgaaggtgaagggggtggttggacccttcttttctatagggcctttaatgattgggagctagatttggtgaagcgttttctgcaaaagattcaagcatctagagtttacagggatttggaagatagagtgatttggacaacttcgaggtgtgggaccttttcggtcaaatctctttgttccatcttggagacctgagatcctttttcgttccctagtggtagtatttagagatcgagtgtgcctcttaaggtggcctttctttgcttcggaagcatcttgggggaaagtgttaactttggaccaatttcaaaggagggggttctttttgacaaataggtgtttcttttgcctctctgaagtagagatggttgatcaccttcttcttcttcattgtgcaaggtctcgggttttttgggatcttcttttctccctctttggtgtgtcttggattctctcttgttcagtgaaagaaactcttcttgggtcgcatgggtcgtttgtgggtaaatcttgtaaaaaggcttggcaagcagcccttttgtgtatattttggatagcgtggaacgaaaggaatttgatagtgtttgacaatgaggagttatcaatccaaagattgaaaaattcttttgtatgtaacctgtggtcttggtttagggtgtttgtagatatgtgccctgtttctcttgtaagtttcattgattggttaggctctaagtaaggacaggtgatgttttttgcttctgttcctccccctctgttttgagcctttaggcttcacttgtctacttcctgtatattctgagggcactgttttttatgtctcctctttactttttatacgacttttctttacctatcaaaaaaaggatgcttgggtttgtgatgtccgggagcaagctgataatggagggctttggaacccttgtttcgtaaggaatttccaagatttggagttggggtgtattgaagcacttcttttgtgtttgcaaggtaaatcaattaatagggaggtagatgacaaggttgtgtggatggtcgcgaggtggcaagtttttggttaaatctttctataatggtatggttcaaaggggttcaaaatctttctcgacaacgcttatttggaattcttgggttccaacaaaagtgagttttttcgtttgggaagtagaatggaaagggattctaactatggacatcttgaagaggagagggtggatattggtgaacagatgttttctatgccaagacaaggaggaatcttgcgattgcatccttcttcattgttctaaggcaagtttgttatgactattggtcttcttcttgtttggagtgggttaggagtttcataccttagtccaagcaatgcttcttagttggcacaactgcttcgttggaaagaggagaaagaaggcatggaatgttgctcctcttttttgttttggactatttggaaagagaggaaaataatagcttttgaaaatgttgagctttcagatcgagagctaattttctcttttctgtgtaactttttagaatggactaaaaggggtctagggtaagagtccttctttgtgattgattttattgattggttaggttgccaataaggtgagtgattttctctttttttctttggagcgcatatgcatactctttgtgtacttggtgtagcctttttttgggtctttaatctatattgctcttttgcctatcaaaaataaaaaaataaaaaaaaatcaaaggtgcctaacaaaaacaggcacaacccaagtattcaggtagcatactaagtacaccaaagaaggaagaaaacaaacaaaacctactttctatctagactggcaaagaaatctaaaaaggaactaactttaaaattagagacattatgggctaagatgacaaaaattttaaaaaagggttaattttattcacctcccttgaggttttggctaaatacatccaacccctataggtttgaaatttcatcatgcacctcccttattttgagtgagagggaaggtgggtgaaagtaagaaatgaaaatgataagagaggtatttgatgaaatttcaaccctatggaagctagatgtatttggtcgaaacctcaggggaggtgaatggaattaaccctttaaaaaatggtgctcttcattaccacctttgaattttccttggccttgaaacttctctttttttgttctttctagacacaccaaattctatacaaaggaacaagcctcaataacatcctttgactcctctcaacaaaaatcccattttacactagcaacaaaactctctcaaagacctcaggagcaccaagaaaacttgaatagcaaaaaaacaaagtccacaaactccttgtcctagctaacttgccacggatgaggatatggtttgccaattttattgctttagaatctgattgagaaaatgttacattattcacaggagaatatacatctttatgcaaaagaaataatctcttagaaagaaaaaaatataaacttcctaaatcaatggtataaatatctgtcaatctaattacaaaattgactaaatcaaacttcctaaaatagccttggactagtcggagacaacgaaataacccttggaatcaagggtgagatcaatagttgatttccaacaaattcttcattatccatacaaagacaacattagttaaagatatatattggtagattaaaggaagtgtggctgaaggaaggggatagaaacactagttttttccacaagatgactaatgctcatagaaggacgaatttgatggcctggattaaaatcaatggttcttagttaactgaggagaatgagatgagagaaggagcagtgaatgagtttaaggtcttgctgtctgctgctggagggtggaggcccagtattagtggtttgtcttttgcaagattggaggctgttgaagtggctaggctggaggagcctttttttgagctggaggtttttgaggctcttaagggctttagtggggacaaagtgcttgggcctaatggtttttctatggctttttgacagcattctagggggtttgtgaaggaggaggtaatggggtttttcagggagtttcatgaccacaattgctttgttagaagtttgaatgcaactttccttgttttgatcccaaaaaaagggggagtggaagacttaagggattttaggccatttagtttgataagagggctgtataagtggctagctaaagtgctagctaataggttaaagctagtggtaggcaaggtggtctctaaggcccaaaattacctttgtggagggaagacaaatcttggatgttgcctttgttgctaatgaagtcatagattcgattttgaagagcaatgagagggcggtgatgtgcaagcttgatatagaaaaggtgtgtatgatcatgtggactggtccttcttgctttcagttatgggtttgatgggtttcggggagaaatggcttcggtagatgcggtggtgtatctccacaactggtttttctattctagttaatgggacttcctcaggtttcttccagagttctaggcagggggacccactcttaccgttgttatttgtgattgctatggagacacttagttgccttttatggagaactataaatggaggttttctgttggcctataaggtgaggggtcgaggaggtgaaggggcttaggtgtctcacttatcgttcgccgatgacattttggttttttgtggggcttctcaggatcgaatgatgtatttaagttggacactaatgtggtttgaggccatttcagggttgagaattaatttggataaaagtgagttaatcccaatgggatgtatggaaaacgtgggggttctagctgcaaaacttggttgcaagattgggagtctcccatcctcttatttgggattgccgttaggtgctccttataaatctgtggctgcttgggatggagtggaggagaggttttgaaagagactggcaaggtggaaaaatcaatacatctccaaaggagggaggattaccttgatttagagcactttggctagcttgctcaattatttcatatttgtgctttctttacctaggatggttagattgaggttggagcagatttagagggattttttgtagggaggtgggtctcttgagcggtaacctcatcttgttagatgggcattggtttgcttagacaaaagcaaaggggggttgggggtaaagtgtctctctactctaaataagaggcttctgtgcaaatggagttggaggtttgcaaatgagagaggggccttttgaaatcaagtgataaggggaaagtttgggaaggagcaagggggttggtgtttcaaggaagtgagggatgggtatggtttggggttttggaaagcaattaggagggagtggtatgttgtaagtagtagactatcttttgtggtgggtaatggtcaaagggtgaaattttggaaggatagatggtgtggggttgcacattttcgtgtttggtttcctactttatttgctctagctgtttccaaggacgcttgggtgaaagatgtgtgaagtttcactgagggaggagggagttggagcccgcatttctctaaacctttcaatgattgggaggtggatgaggtgcacacgtttttattaggcctcaatgggaagagtgttcaacgagatgtggaagatagggtgctttggataaagactaaatatgaagttttccgttaagtctgtctacaaagccttagtttcaggcccttcagtctcttttccatcgaatgttatttggaaagcctgtgtgcaacccaaagtgagtttttttgggtgggaagcaacgtggggaaaaactcttactttagaccaacttcacctttagcgaatagatgctaacttttccaaatgcgtgaaaaatcgatagatcacatcctcctccattgtgccaagacaaggactttatgagcgttgtttttcttttttttggggtgcagtgggtgctgtcagccatagttaaggcgaagcttttggactgggatgggccatttgtgggaaaaaagagaaaggaagtttggagagcagaccctttatgtattttttggacgatttggaaggcaaggaatagaattgcgtttgaagatgatgtgctgtcaatccaaagacttaaaagtttttttgttttctttctttggttgacaaaattgttcacaacagatggttgaagtttgactttagttggtttcattgattgggtgggttctagttgagggtggggtttttcttgctcctccgtgtttgacaattgtttgttctagcttgggaggggggaggtatttctactttgtacactttgagtcgctgttttggcggctcttttcaatgcacttttatctcttttatttatccaaaaaaatattggtagattaaactatttgttactcatgtatgaatataattttattttattttaaatttttatcttgtcccacttatgcaccgctaaaaggttgatctaatttatctattttgtttaatttaatcatcccatataatttatttctttaaattttgttattttaaaattagcactctactttttctcactctacttctctataagaaccactctatagtacaaaccactttctagtaaaaaccaactttctaataaacttttcttttgaaaaaaatgaaactaattataaactgatctcctttttaactggttgtaacaaagaaaaaaaaacaagatctcattcccacacccatcctatctatcgacatgtgtaccttgggtcaaaatgaagagtccaggtatgaaagcccctaatagcatctctaaaagtgcaggtgttgaagccaaactttctcaattaagaaagaaacagtcctaacctaggaatccatcatgatatgataccaattggagacaggggtgcccagaatctaatcatcagaaagagtaacctaactaacattttacaaataggatgttcttgtgagttagacttagtcgaggatgtaaggggaagggtggaccaaaactaattgtacaaaacccttgcactcctagaatccccacaattactgcatctttagtccaaaatcagaaggaaccatcctccacccccaaaaaaactcaacacaaatacttccaatctcctactatactgtccagaatcctatgtatggggttcataaacctcctttaataaatttttgacctaaataggttgaaaaattcccttcgatgaaagtgtgtgttactaccctgggcctttcaatctttagatgcaacgtagctagtaagattctacccctcaaacttgctgaaggtaggtcccttttcttaggtgataatgctaagaagcagtagggttttctttggctagagggtatctaaacaaaggttgttttctgagggtaccattcatggaagcactaatctcattgaccacagttataaaaggaaataggctatttgcacaaactgggggtaggagactggccagaatccttgaaaggttagaatgtttatacatatgcagtgccaaaatgatgcctacaacctacccattagacacgttagaagttccagaagaaattaatcttctttagaaaccttttttcaccgcccatctagagtctaagtccaagattcccctacctgggtcaaggcatatctgggcttcatcagattgaggattatttgtgcaactccagaaatacatcattcctgtaccctataacagcataaccaagctactttctgccataattgttggcaaacaagttgtccaggctactccccattgctataatccttgaagtccatgaagtctacctatcaaaagaaaaaaaaaaaaatggtccttgaagtcagacccacaatcctcttctgagcctgcagaggaactgttccatgaaccctaaatcccccttccctatgactttaggagtttttagaaggcaaattaggataggcaattatcctaattttcctattaagaaaaagtacctcctttaatctcacattaggtaagatgtgtaataattctctctatttcttttggtttaagaacttcattgttctttcactccatctcacattaggcaattatccactgttcttttggtttaacagccttgcccttgcactacacactgttatttactgtgtgtgcgcttatttggcacatgtacttgtgtgtgcacttatttatttattaattttgatcaaagtttgccatgttccctttcctattaatgcttatcaagaaagaaaaattgataagttggtgtatcttctttgtattttaatccaagtttgatgtgcttgatgacacaggacccag

SEQ ID NO: 13762 - DNA, 1800 bp, Vitis vinifera
  Intron number 4 from transcript GSVIVT01012906001 (locus G SVIVG01012906001) derived from phytozome v7.0 (chr-ID chr1 7; pos 13271685 to 13273484)
gttctaaattttgcgtgttttaatactcttagggggtgtttggtacacgggaatagggagtgggaatagacatctcattcctcttctcccttatttctatgtttggataaatgttaagaaggcggaaatgaaataaaaaattattccggcagaaatcaaatccaacttatgagtcggatttgcattcattaaaagtaggtggtattctgattcattaaacctatttgataatataaaataacctaaattactattttaccctcttatcttgttcttcaaacccgatgtttatcttctttgtaaaggtagagatccattcatcatccacttcttatcttctttgcaaagctagagacccacttatcatccaattctctgcaacaagtgattcttccaaattgaatcaattaaaccttccacgatatttaaaaaaaaaaaatcaatttctaatttatagggttttggatgttcattttgattgttggatctaggattcgtcattgtttgctgcaactaggttttgaaaactcccttctacattttcgaccaggtttaccttattttctctttcttcttctacttctttatatgtgtttcttcttctctataaatcaattaattttttttttttaatttatgtttggaatcaaccaacagacgaaaaaggaaaatagagtggttggtgagttggagaaacttcctaatcttaatagattggacatattgaagttaagtcaaattattacgagtgacccaatgcaagtcaaacttttgttcaatttagatgaagatctcaaggttgaatgggcgaaacaacttcttcaaaccccataaatctccatgttgcatccttgttgatttattgtctttaggttggattgatagaaattttaggttggattttgtttcatcaatttcctatgaacttttttattgatttgatggcttaattttggaggatatactagttgtagattttagtagatatggtacttatattgagaactagaatgaagtttgtgtttttttatttccttttttgcaaataagaaataagtatttggtagctttgacaatttatatgttcttatatatttttttttctctttttttttcttagtaaaatataattctatagctttttttgcatgacaaattatttaaaattttgataaaaaaaaaaacgaatatttaaaattttttaaggttatggattttatcggatatgatacttgttgaaaattagaataaatttgaattcttttatttcctcttttgaaaataggaaaaacatttgctagctttgagaatttaaatattataataaatattttttttttgaaaaatataattttataactacttaagcatgacaaattattcaaatttttaataaaaataataattgaatatttgtgcattatggttatacgatttttatggttaattttttatttattgagtatatatatatatattttagtcttattatttaataacaaaaaacctctcaaattttatttttttaaaataaaagtaaaaataaaaatatattttaaattatatgtaaggatattattgtaaatttatttccttttcatttccattcctattattatcaaacgttggaatggaaacaaataatcatttcaatcttgcattcctaagttcatccaaatgctagaaatggaatcatcaaattcattccattccactaagaaataggaaaggaaacaaaatattatttccattccttattccgacgtaccaaacacccccttaagggttaaagatccctgc

SEQ ID NO: 13763 - DNA, 4942 bp, Vitis vinifera
  Intron number 6 from transcript GSVIVT01029296001 (locus G SVIVG01029296001) derived from phytozome v7.0 (chr-ID chr1 1; pos 17381540 to 17386481 reverse strand)
cattcaagggaactggcagaagagttgcttgaattgttttgatctttggctcctgtttcagcttgtttcatagggagtataacagttttcagaccaaaattacacgagacaatgccccaagggttatcatccttatgcaatttgttggatgctaccctcatagattcttctactgcagtctaggaacctgtcgctatgtcattgatcaactcacaccttatgactaaagattgtatgacatttttgttggtccattggtatttctccattatcgtaactcttaggttatatttggttcccaaaaaacactaagaaaaaaaaaacatattaaggaaaatgattttttttttcttctttatggttggttctcctataaaaaaataacaaagaaaatcaaatataatcaaaattagtaagaaaattatacattttcaaattatttaatttttatatcaaagagttaaaatatgtgaaaatcaaacattgtcaataaaaaataaggttttaatgggtcgtctatgttgtttctttgaatatgctcatttacaagtctctcgtacacttatattggattaatatccattatgagtgaaacctgaatcttcgaattaggtaattaatttaatccaaatgatcaattcaaactatatattcaattcatcttaaatcatcttccaatgatttatataatacaactatttaatttcattaaatctagttttaagagtttaatgaatctacctcttcatgtgaaaatgcccttttaaactgatctttgattctatatttggcatggctatgtgaaacttcatataacatgcgaaattcaaccacaaagttctttataaatgtacctcactagtccaattcgcatggttgtgtgaaccttagcttgcttcatgcgagaaatgcataccaccatcacttaaacatgtgcatttttatcaagacaagttgaactccaacaattcatcttcctttaaatgactttattttcaaacaaccttatttccctctttccacaaaatgctactccatatcctcttgtcaatttacttcaatttaaccttaaaaataacttcacaactcaaaatatttgttagtaaaattgcaagagtaccaatatgtcaattgagcaaaaggacatgattactatccaaaagatgcaaaatatatcatattttatcatccaaattatgtactttttgaatagtaatcaataagtggcttaaaaacgtattagcagatatttctttatagataagaccaatgtcatctatgtatatgcactatgatatttaggttgcaatggccaaggctaagaataaaatatttaatgaaaatagtagtctcgtatgtctaaggcgcataattgggtggtagttgtttaagatagagattatatccttcgattttagtaagccatagttaaatttgcccaatcctttaactaagcaattaagtaaaaaattagtggcatatgtggtttatacctaatacaaaagttaggagtaaggatagcttcttaattatacattgatagtgtattttttgtgggtgttaccgagcttaagaaccttcaaaatagtacccgacccaatgagtatgggtccaacccacaaggatccaatgatttcaatcagagagatataaaaaatgggttattcaaagtgaatggctttgcaagtggagacaacttaggaaacttaacaaagataaagggaaattgaaaaataaataataaaattttccaaaatcaacatatgaaaacaatcaaacaccaaaggcaaagatccataaaggaaatcaccctcagcttaaatcattctcctaaactagatgcttttgacctaaggttgaggggaaatatattactaaaccaatgtttttggcattagattcatataatgaatccaaaatgaaatgatagcgtttagctcaagtgaacccatatcaacacaattgaaatccactcccaaggttgctagtcttttagccctcacaactagtcagcaaacacatgccttttctagaattcccttaacctcaacacaatcaatttaggacattaaaggactaaaatgatgcatgatttacctcatcttccctcactctctcactgtcttaagaaatccaactattgatattgaaattgaaaaacaataacatagaaaaaaaacacacacacacacatacacacaaaacaaaaataaataaataaaacaaccaaagcaagaaattaagttagaacaaaattgaaacttcaagatagaaaaattcaaaaattaaaaaattgaaactacaaatttaaaaactagaaataaaaaattaacatttcattaataaactacaaattgaaataatggttgtactagaagattcaactagaaatgttaactatgcttagattctaaaacaaaaataaactcaaaatattaattatcttatgaagataaaagtcaaaatcataagctttggtagcctttctgacctactactcctacgataaaatagcctcattaaccctacttttactcttactgtaataatggaatcctactattgaaatctgagaattttccttttatactcaaccaaataagtcggtacattcttagaaaagctaaaataatgatttttttttttttttttgccactttagttaccacatggcagcctagggttggtgtatcttaccgctttgctaccacatgtcaactcaagacgtggccatatgccttgaagtaagtacccttaaaggttgttcaaactaggtaatgtttgctaaaagttgtctaaacaaagttgtggatgtttgagtgttacttgaaattacccaagtgtgctaagatatgtttacttaaacgtgttcattttttattaggccttttgtgtgagctacatggctacctgaattgttctaaatctgctcaagcaaacttgcttaaaggtggtcatgtttgctcaagctttttgtgtgaggctacatggctacttgaattgttctatagatctgctctgggaaacttgcttagaggtgttcatgcttgttctggcctattatgtgaggccacatgagcaaggtcatggttggctcaagtgtagctcactttgctcatacttgcttaagcctcttctaggcaggattccttctttactcgggcttcccctagtcaaactcttcttgctcgaggttgttcaagccttttccttgccaatttatttatgcaagcttgaacaaggtcttgtttaactatttcttctttctaaacttgctttctttaacaaacacaagtcttgaaacctctcccacaatctccattaaagctcaaaatactttgttccattgattttaatgtctagtttgcacttaaaacatacaaacaaacacaaaaataatcaaatgcaacttgcttagacactaacagtaaaagtatcccaaatacactaaaataggttctataaagcccattgaagtgttgaatttgagtcctcataagtaacccaacttacattaatagagatcaaaggaagcaggttcgtgtcagtaatagcaagtgacttattgactatgaaatagtctaatcaactacttatatatgagaatccatccctaaggtgtgggtggagtgtattctacaatgattgaagatgagtacatatcttagtgaataccatatcacttattagtggcatttataattgcaggatatgcttgatagattcacctatatgagtgtagaaatgggacatttcttatgagaacttaggcaaggtctatagagctctcataaatattcaagtaagatctatggcctattaaaatcaacacattatggacaactctaacttgagaaaccaatgtggataataaattccttgtctcacataaagaaattatggttcattgcagatttaactttcaccatatttttatgactcacaacctacttattctaaggttggctcataacccaagggcatctgttcttattcattagattctagtatatgcttcctccagtcatcctctattattcctccactcatgcacaatgtgaggaatggttggaaagtgtatgtgtaaaacttttgattgattaacaattgtttaagaggcttaattagccattgattgaaatcaattaattaagttttattggtcaacaaatgtcttaatggactcaaccaacaacaatttccaccttgattggcttaattaattagcaattggttgaaatcaattagctaattagttggatcaatcatgcctccaatcatatattctacctatttgagccaatcttgagagcttataaatagagttgtagtctaggtctttcttcatcccatctcaaagcttctctcctttattcttctctcctttgaagccttgtgagctctttttgttactctatccttaagtggtttttctctttccttctaccacccttctcaagtccttggaagagcaaagcatccaaagctatcatctctactctacaaagtagtgtacctctacaagtaacattggttgttgcatcctggaggtagaatgtccattgttatcctattgtgccaagacacattctcataggagcatggaactactttaaggatcatgccttatcatgctttaaccaaattcgagaagttgtctaacttttatttcaaaaattttagacttgtgttcctacttctctttgtatgtatttctaacagttatgatattgttgattgttgaaaatattctctctagatgttgattattgactcatagttgtttaatatgttgattcacttgctacatgagatgaatatatgtctattatgtgttcaacatgagattattttaggacaaaaaaatcattgtacatataagtgcattcctattgtgtgaaactgaaaaatgataagacggtgtgaattggaaataaaataa

SEQ ID NO: 13764 - DNA, 9391 bp, Vitis vinifera
  Intron number 2 from transcript GSVIVT01003081001 (locus G SVIVG01003081001) derived from phytozome v7.0 (chr-ID chr1 2; pos 8466406 to 8475796)
gctgcagagccaaataagtatgtatccactgcttggtttttactgatgatgtactcactattaatttgttgatatttacttagatgttacttctaacagttttttactttttgtttttcacgttaagaaaatgcataggtctagcaataggtctagaagtgcttcaagtataacacaatgctatagctggcaattcttttgctggcttgtttggccgacctagtctggcctggagaaatttggctttgacaaactgtcatttcctaactcctggtaagttctgaacatggcaaaaaagtgctggaattgccgcaccaccttttctgacctaaaccctgtttattatactgacacaacaaattcactggttggtttgaaaattttgcctcatcctaagttcaggtcctggtaagattaggatgtgctaaataggcataatcttccttagtccaatcttgaattgaggcaatgtcaatagattttgcttggaaagaactagggattccagtttttccagaatgcctgacctgcactgctcctattactgttagtcatattgtcaacccatgatgtaataccttaagcttttgcgtcaaattgttttcttaacatggtatcacagctttggttaactcacagttttcttgtttgagtttctacttaagagacaggttaccaaacccaacaaaatgaggaaaaaactgtgagaagactaataggattcttatagtcaagatctgatgaaggcagtcgattgatgagatgagctgtagactacactgtctttcctcactgggatttaggaatgtgtatttggaataataagcctcttgcttgttctattaagtgactgtttttcctctcggccactttatttattggggtgtatcaatgtatgaagattggggggtaggatctattctttttggaggtatccccttctcctagcatgaaattgtatgcaaatcattttatcgaagagtgcaaaaatggcagtggcataaaacttatttttcatgagataaactcacttgacccttgtggtatcatcaatagaagagaaaaactaccttgagcctgaaatattaagaatttgaggatatctctacacatcattataaatcaaagtaaaaagaacagaaacctttttattgcttaatggaaaaggtacatgatgatgcttagcatactcaaacaccttataatgtattgaaaaggatgacctaatcttaagtgccttaaccaaatctcttcttgggatggaattttcctaaaaaaaaggaaataagggtgaaaatatcattgctatttttggtttcaagtagagccctccttttctcctagcatgaccaattgtcctccctacagggaaatcccataagagacaaggagttggaagaagatgacaaaaatttagatcattagtaatttgatgaatgaacaagaagtttaggaacatgcaatagatattagagatatggaatgggttaaagggactgtaccccagcttgcagcaatagcaagcattccattgcaattgtaatttctgatttactggatagggactgaaatgttgaaaaaatctggggaatttgttgtatcctctgtggctcctgagtcaacgacctagaacccatagaagggccccttgagatgataagagcataagaaattcacttgcctaggccaaagaacatgaggcaccaggcttctccaactgtgcaaggaagtttttggccttgtctatatcttgttgagtctttctttgtcttgtttcccttttctaattaagaattctcttctgaattcatgagatgtgcttgagcaggtttctgactagattgacttcttcttccatcactttcatttcaaccaaactgggcttcctatgaattttcctgcaagtttctctagtgtgcctggctttattgcagaaattgtaccaaaggctatccatctcatttggttttcttcaccaaatttctcactagtaacagcactatttttgctttgaagtcaccagagtcgatccatttgatggtattatcaagcacaacacaacgattgtagaaggaaaaagttgagtcattagggattttgtttgcagatagtctacatttggttcctttttcaggaaaaagtagtgttgggacgtctagagatagagaatgggcatatgtacctgcatatgaagctgcatgggggattttgatcatttgagattttaaggccttcccaatttagtaaactgtggctggttccttttttatagcagttagtctgtctttaaaaggagaaggggctcttgatttcttcaatttataagaaaatttttttaagaacttggaaggatttttgggtggaattggaagaccatttggtttaacttatcccacttagtgtgtagggagcaaatttaatgtcgttagaagtggggtaaagaaatcatgggaaactagaactggcccaagtatgtggggcttcaacagagtgatcaggcattatttgctcattgatcctcctcccaagaatgccaatttcacttgctcaaatttataggcaaccattgtaagtggttgacttgattcatgtctttctcatacaaagaacctgcttcccagtgccttcagaaggatctctctgtccagtctctgactattattccatcaagatagacatggatgcacccatcgtttacaaaaattaattaatgaatggttgaaaggatcccggatcattgattaggaggcctaaggttcaggtaaaagttgcagtgtcttaacaacaagctgaaagtctggaacagagttacaatctgagacctaagaagaaagagtccatttttggggatattgttgatgtggatgcttagcaaagtacagttggtttgtgtaaagaattggaaactctaaaaaccactaggaaattggagccagaggatattttgttgaagaaagaagtattttgaagacaatagattagagttgagtgagttaaggagactcttaacattaaatttttccatgaagtggcctatgctaggggaaagaagaagttactaatttctagaactggtcacttatggataatcaggttaacaatgtaaaagttgcagtgtcttaacaataagctaaaagtctggaacagagttacaatctgagacctaagaagaaaaagtgcgagtccatttttgaggatattattgatgtggatgcttagcaaagtacagatggtttgtgtaaagaattggaaactctaaaagccactaagaaattggagctagaggatattttgttgaagaaagaagtattttggagacaatagattagaattgagtgagttaaggagactctttaacattaaatttttccatgaagtggcctatggtaggggaaagaagttactaatttctagaactggtcaattatggataatcaggttaacaatgtcaaggaggtcttcggcttgtttggtcacctttatttcaggtcagttgaggaacaggaaaggattgaaggttggattgtcccccatttccgatgaaagagcaagcaagtaagattgccctttttaaaatgaagtaataaaggaaactgcttttagtataaaaagaataaggcaccaagtcctgatgagtccccaatttcttatgaaagatcaggctagtaagagtgacacttttaagaggaagaaataaatgagactatttctagtatggaaaagaataaagctccatgccctgatgagttttcattcagtttcttttagaaatgtcagctgactatgaaggaggactttctgaaattattctccatgtttcataatggttggttttcagtaaaagctataatagaactttcattgcattggttcctaagaaagtctccacaaataggattgtagatttcaggcacattagtttggtaacaagcctccacatgattattctcaaggtgctaccatgatgttttttatttgtcttacaggagaacattttcccttccagggcgcttgtggatgagatactgatcttggatgcaattgtaattgcaaccagaaaaaatggtagatgaaaagtccaaccaggagaagtgatgatctttcaagttgattctgaaaatgtttatgatcatgtgaaatgcgaattttcagatcatgtttcatgtaggaaattcagatcatgtttcttgtaggaaaggttttcagtcaagaagatgatcaggaattaggggagttttgactttggttagctattcaattctagtctatggcagcacaagaagatgaggtaggcttcaaaaaaattggattgggtggtccactttgtccttttctctttactattgtgattgatgtgctgagcagattaatatataaaactcaggataaaggtgcatttaattgttttgggtgctatgggctagaagatttaggtttgtggctactaaggtaaggtttttaggggtggtgcaaaccttgttttgataccatgtcaaagaagacatagatatccctaatattatgctaacagaatccctaataggcttttcttacagaatcctttaggttgctcttcacatcttttgttttttatttaagtgataactcatcctccatgtatttttttttcttttcgatgcaaatagattgatatttcttattaaaaagggctggccaaaaagatccataatcataccattttagtttgttaaggaatgaatgaagaactcaagtttataacataaacataaaagagaccaactgaatttgtaatactaaacaaggttcttatagttgctggaatagtagactaaatgcctactttgccactgcctcaacatgtgtttgaaacccttgtaaaagtttttccaccagagcgagacttcaccagcaagatagagagatgcactaggtggtggtgtgaaatagcacctgacatctgcagctgctggtgtgatcatccgtatagggttgtcttcctcactccttaggtttgaaggaaaagtgttaattgattttaggctttggtggtgattccaaggagagaaagtaatcacgtggcccattgctgatgaagttgtatattgatattaaggttgtggtaatcaagtgcacaaccaaatttggtgtgttccaaccatgttgcagtagatgggcgctaagtaattagttgctccatgctacataggttgaatagtttttggaaaattagaaacagtctataaatatctaaccaagctgctgcttctttaaccttttattattgatgaaaactgaaaagctaggtagctactatccaagttactccaaacactatctgagccaagatttcttaaggaaaaatcctttgcaatgagatgaaaccagaaagttctggataatcacttagtatatttcttctaggaaatcacaaaaaaatccttacaataagtaggttcttcccctttaattttagcctcaactactttttgatggtttccaatatacaattagtagcctttatgtgttcgtatactatagttctagtaaaactaaaaaaataaaaaataactgaccttttgacttctaatttaataaaaacttttcccatgataaccttagactattcaaacttgctatcaattctttattaatgactgtatcattctctccttcttagaagaaactcgtcctcaagtttggtgttgttggagagctcttttactttctcatgagtttgaaatataaacttgaagtgtagactgttgaatatattcccatatgttttggcaaatcaaccgcataagcattcttcccaatctatctgatgattcagtggggtcccatctttttttgtatgctgtgttgactgcctagcggtctttgcaagtaaattagaaggctgttcaggagaagagaattgctggtagaaaaatagactcttagatgggcttgttgggataggtcagaatgaagcaggaatgatagcagaaatgggagcagcagctactaaggtaacctggacctcgtttagctaatcccggaaggacaaggatagcattgagaggttgtaaataagatggcaggttgggaataaatgccaattggaaatctttccttgcgttggtgcaccatcaccatgtcaccttcttgaaagctttggctatgcctcttctaatctgcatattttttttactttttattcaactcctccatcttcaatctgatttcttcatgcagttttttcactaagttagctatattttcgccctttaagctatctcttccaatttcttgtaatggagctaaatcatagagatccattggttgctgcccataaataacttcaaaaggacttttgcttgtggttcgattctcttcatagttataggcaaatttggtttgtgcaaccaaagcttcccaatgcttaagattttctccaattgagcacctcaacaaatctcccaaacttcgattgacaaccttaatttgtccatctatttgaggatgataggaagtaccggattgcaacctagttccaagcttcttccataaagttctccaaaaatgagagagaaacttggagtctcaatctaatgtgattgattttggaactccatgcaattgaacaatctctcaaaagtagagaattgctatatttgatgcatccatagtcttcttgcaacaaaagagaaaagccatttttaaaaatctatcaacctcctcaaagatggaatccattcccattaactgctaggcagccccaccacaaagtcccttagaactgcaggaattagcagggaagtgtacaaacctctattttaaacttttccttttgattccttgcacgtttcacacctttaacaagtttgtaaacatccctcctcatttttggccaaaggaacttttgttcaatcatagcatatgtcttaccttgcttaaaatgtccacctacgcctccatcatgcatgtcttgaataatcttttcccttaaggggcaatctggaactttttttttatttcctttgaataggaagtcatcatgcaacaaatactttcttggctgcccattagtacaatctttccaaattgaaccaaagaaaggttacccgggtaaagatatttgaaggaatcaaaacccttaatggtaatagacatactaaataacaacaaacttctttgactaagtgcatctaccactttgttatttgctccaaactttgtgtttcattacaaatgagaattgttgcaagtaagaaacccaatgggcacacctcttgcttaacttttgttggttattgagatgctataaagcttcatgatctacatgtaaaataaattcttgatgtatcgagtaatgctcccaatgcttaagagcctgaatgatagcataaaatttctttatcataagtgttgtatctccttgtgtcattcaattttgctctagaatgacacaggtctgccttcttgacttacaacagctccaatcctaattttgaaagcatcgcagtctacttcaaagagctttttaaaatctggcagcacgaatacaggggttgagctgagcatcactttaaccttctgaaaactttctttagcttgttctgaccattgaaacctctctttcttcatgcaatcaattataggagcaattatggtggtgaaattcttgaggaagcatttatataatgagggttcaatagtgtcttttctttctatcctgaatcatgtgtctttctcctaagacagagagaggtaaataaaaaagtcaaatcgcaccatctctgtaataggtaaatgcctcgttttctcctgaagtagttggaattatttgtaataagatattgactacaattgaaaaggtcttgtcaataaaatttccatttatccgcgatctaggcataggtagcaatccattctataattcttttcattacctcttgtgggaaaagaatcccacaaacaaaggaattgtataatatgaaataacaagccgctgagtattggaaacaagctatatcacttactcctggtaattatattgaagcgcataattggttgaagatcacgaggcgtttcgaatacaaacactatttattatttcgaattttttatatttcttattatttgttggacctattagtcaaataaaatggatcattcctatgcctatgggaagaaccaatcaaagaatttcattatatcccttctaagatcattctatttcatttggtatctcgtagggataaacaatacacagatacattagagaatatatttctttattttcttattcttgatgaagggtctacaaaatgagttcaacttctaattgctttaaccttactcttatcaacttttataatgaagttattatagctactgtccaagtagactacaaccatgttacttcaaacaacttcaaagccaaggtttcttaaggaaaaatctaggaaaaaccctttgcataataagctttatccagaaagttctggataatcacatagtatatttcttcttgaaaattataaaataaattcttttaataagtaggttcttcccttttataatgctagcctcaactactttctcatggtttccgaaatgcatttagtagcctttatatattcatttactatggttctagtaaaactaaaaaaaaaaccgatcctttgacttctgatttaatcacaaacttttcccatgcaaacctttgactattcaaacttgctatcaagtctctattaatgactacattaattatgttctggcaagtttagcatttgtgggatgcatgctttaactttagggcaagctttttaaggtttatttaattgtgggtactaaatgaatattaggacgttttgtggtcatattataactttcccaaaataatattaggattaagagatatgtgatattttctcctctcaataattgttcacacactataaatctttgaaagttgcttcatgatttgcactaattgtagtgttaccctcattttactaagagttaaaaggttttaattgtaggaatcactaatcttgcattttattaattatcatatgtggaattccaaaattggcaattatttttagagtttataaaaaattttagtagttttgactttctaaaagacaataaaatattgcatttgtccccccttctttactatagtaattcaaacttcaaaaaaaatttaaagatgtagcaggtggaatatgtgtcaatatgaactccattctttttgctaacccttgagaaccaattcaatctgcattagaatttttttatttttttattttttttggtcgagtatgaagttcagttttctacagttttttttttttttttttgtaaatgatttgatttttcattttctttttattgattcaggtgcactggattt

SEQ ID NO: 13765 - DNA, 4788 bp, Vitis vinifera
  Intron number 1 from transcript GSVIVT01014693001 (locus G SVIVG01014693001) derived from phytozome v7.0 (chr-ID chr1 9; pos 8706961 to 8711748)
acattgtttcagatggtgaagatcatcgtaagtcacttgactccatgtgtgagatcaagatctagtgaagtcaaattcaacttctcacgttatcctagtttgatgctttagattctttcatttttttttatcacacttctatatttgtcttgttactcaaccagatttaactgggccgagttcaaagcttctctattgaactatgtgatcttctgctgtaccctagacataagaagcttccttgaacgtataaaaatgtaggtccatgccataactgacatgtatgtaattcttttccactattttaatggtgttacattttttcttatatcatactactttcctgagtgatttgttgcttgtttatttcatgttacatgttattgagatatcatgaaaagctagagtgccttaggataaggatgatcagctgatgaaacctttgtctccagtctcatcccaagattgagttgaaaacttaacggtataaggtgttattacctgtcttacaatatttctcctatccctttattgattggttacagatgattgtttcagtttctgtatgacttaatggcaaacaatttccttttctacatatgctcctctattgtctcatggcttttgagtagtttcactgaaagttctgaaatctcaaaagcagaggattcctgcattttgcaacctcacaactcggattggtgaaaataagttagatgcagtgagtgatggaaaaaaatctcagaagcttcaattaatcaactagttgcgacattaggaatccatagagagaaaaataaataaataaataaaaaactagcaagcaaggggaatgaaaataataggaaagccgtattctcctaactgtgaaaaagttagggagttgcatatgttttgattttttcttgttacagaatgatgaaaaccgatggatgaggcaagaccactttcaaattctacaaaatgaagatgtatagggctcatggactgatcatcaaagatatagcacaactagcgtcctagtcaaatctcatttcagctgaagattctacactctttttcttctctaaagttgtactatatcctccattgccaagactgaaagagaaggttatgacaaatactcgctcagagttctttagcttgatctatgtcgtttttctcaaggaggttgcttccagctaacaagtccatcttatagcaagctttgagctaagacacgaggctgctggtgcttcccatattgtccttctttaacccttcagctctgttgcatctgggctctgtctaacaactccatttgtatctaggttatgccattcagccttatgcttccaaaaatacatgaactggcattttggttcaaatccaaatacgttcaccttctgactttgttgataaaagcattgtatgcaaaaatatgaaagcataaggctgaacttggagaaaacccagttgatgtaagtgggattatggaatgcagtaacacatcaaggtctatgcaataatgcatgatcctctttgtaatgtaaaatccaaagaatgtaaagagttatgttttacaagtacttctatgctttttagactacagttgaatggttcttttccaaacaaagtttgaggaaaagaaaaagggaaagggaaaggaaatgggaaaaacaaagtacatctatgaagctcaataaaaatttcttctcttttttccccaactttcctcactctttttcatcacattctcgttcttctcatttttcaatgtttcccctttttctttccctgttcttgagaaccaagcaagcctaagaagttccattcaatagaaattctatgcaatataatagtgaaggcatgtagagtgcagaatcaaaatgcaagaatttaactgccagacaaataaattttagatccagggttggagattctttacattgcagtttgatgaggatccaagtggagtgtgatgatgacagaagaagagagagcacactcccaagaaaagcaaagagtctttagctgatgctgggttgtgctccctctcttctgtcaacatatttctcatcctccaaccaatcattcaccagtcatgttgctgcatggcatgcattcacttcatcatgtcattactgcaatataaacaataagaatatatggattagattcttaggatgacactacagttgaatccctgtgtataagaacatacatgcatggatttcatgtataagatggtttttgctaggaattacgaatttcttatataaatagaaattgaaacaagctgaaacttacatttgaagtacatagctgtacccatgttgtgtgtgtgtgagagagagagggagggagggggggagagagagaggagcaatgaaacagtagcatgaaggagaagtcatgactttgtgagaggcagtggaagaagagagggagagggagaggagcaatggaacagtagcatgaaggtaaagtcttgactttgtgaggggcaatggataaagaaggggagagggagaggggcaatggaacagtggcatgtgaagccttcttatagagactttgatcactcacaaaagccagtaacataaaaaagataatgggcagtttctaggtggttccctcaataaaagctacatttttgttaatattagcagtttcaacacattaaaaagattcttctaaacttggctataacccttcactctcatatttattaccttttctatttacataacccttcattaactactccttcagcacttgacaatgaaccattgtaagcacactcataaatggtctttaaccagatctactgaggatggtcattgcctattgcaggtgttctattatgagtctccctctttcaaagtgaccttatctcaagatgtactagggcttggggcccttcatttctctccagacaacccttttttgtgtccttgatggggctcctctcatagtgaccctatctggggatgcattagaccttctgggaacccttctttttcactgcctgagggcccttttctcgagatatgtggagttcttttggcctttgttaggataaccactggaaaaatatatccataggccatttgattttggtgcaagtaggactcataaaattggggtctgacagatttcaaagttctcttttcactttgtcatgaattgtttacttgggctctgccttacctgtgtattgaattattagcctaccatactgctaatgctttttgtgtagagtctgtagactatatatatattatctctccatcttttggtaaaagtaaatcaattcgactaatccataagctgatatcgatttctttgtacaaagtcttgactcttctaagctacaaatcgagtattgtaatcatcttttcttaagtcatagtaaagatcctatgaaactaataaagtggtcactgacggggctagcttgggccaggaggggctgcctcccttcaaattaaaatcaaatggtgggatagattctttcacctcaagtacaaaggaaagacaagcttttcgtgggactaaataccacaatcttcccacttcttgaccctccaaaatatttctttctatttgtgcccctcttagactcgatttttggctcgcccgttgaaagtggtgtttgtttttttaacttaatattaaatttaatttgtttttagactttaaatgatttgttactaactttttacttctttttaaattttttttattcaataaaaaaagttgaaatatttgactttttgtttaatgctaaaaataacattttaaaacaatcatagcacaatctcaaaatgacccttaccttactaacacttaatacttaatagaaataaaataataaaatacgaataacttaatgctattaagttgtatttaggcggtttttgttttttacttaaataaaaataaaacttaatttaatttaattctaaataaaataataataataaaaaaaacaccttaatacttgatattcttaagtattaagtataaatagggtgaaagttgtgttgagtttgtattttgattgtttcaaaaagttatttttagcatttaacaaaaaatcaaatatttaatttttttatccagttgaataattttaaaaataagtattaagttctaaaaaaaaatcaaaacacgaatgatttgaagtctaaaagcaaattgtatctgcattaacttcaaaaaacatatactaagagttaaattaagttctattcctaaggtttttttttggcaacaatgttaccctatttcatttgctttttactccaaaaaaacattgcaagaagttgttaaaagttcatcatcttaaacttttgcctgctaaacattcttaacctcgatattatttgaatttttttggtgaaaaaaatgaccttcaggctttaattgttgtggtgaagcagtcagcttttccctttgggtcactaataatgcaaggtggtgtgagtggccccaacaaagccaattctagctgcttgaagattgccttgcaccatattatatgcttggctccaagaagttcttcaaacttttttcttcttctttccatagatgatgatgatatgctaggtaaaccaatgtctagttcaggctttaaccacccaaccccactacccacctctctctctctctctctctctattctcaatccatgagagaaataactgacttaaccgctatcccactactttgtatataaccaaaaaatccctaatttgcagagagtaacctcagttgcattgcttttctgcagaagagttggtc

SEQ ID NO: 13766 - DNA, 12640 bp, Vitis vinifera
  Intron number 3 from transcript GSVIVT01037079001 (locus G SVIVG01037079001) derived from phytozome v7.0 (chr-ID chr3 ; pos 8006479 to 8019118 reverse strand)
tattattctcctccagtgctacaaacaatatcgtgtggccccaccatttctgagagcatccacacctcatcatcaaagctctttgaatctcccagttcaacctctactccagccgcatcccttttgcacacacgctaattgggttggaagcaccgcctctatgcttctgagtttgttatatatttggaattgtcatcctatatgattccagttctctatgtatttgatatcttgttcaactttgttttatatataaagaaaatcattttgggcaatttctggggatatgaaagtctatactagctttgcatggttggcaatggttggttagctgatctgaatttaatgaattgagtattaaattagtagtggaagaaacttgattcattaagactccagcttgattacaaatagaatagactttaaatttccagagcttaaatggatcttataggaaatagggaggaacaatataacgttagtgcaagcttgttttcatgggtctgctgttcactgttagcaaggaagaccttgagtctatctctctctctctctctctctctctctctctctctatatatatatatatatatatatatagacccaaggtattccattccactgacccaagagatcccaagaaagctctatttgaagttttttttcttaagaattgctcagcatttgtcaaaaaactaaaaataaataaacaagaaagctctatttgaagttttatctttggaggaattgctcatcatttgtcaaaaaacgacaataaaaataaaaattaaataaacaataaagccttgtttggagttttctctttggaaggattgctcaacaattgggcaaaatagacaataaacaagaaagcatacttcgatgcttatttgctgctaatgaaagcaactcaggaaatgttattagggcttagcacatggactaattgatgattgtgaatggatgtgctagagtctaacagacttaatttgatgcttgacatggttgtcattttgcatttgtcctaaggttgagcctcgatcgatgggtcaatgtgtggacaacagaaacttttttccactaaactctttgtttgccttaatggaacgagtactttatttttttttaagatgtaactgtgaacgatgtcacattactcataatgcataaagaaaatgaaaaggataagaaaattacataaattaatttgtttaagtggctcttaaaggtacacaacaatactttaggtgtagtataagacatttccatgatgttagcaaaacaagttctcttattattctttttcctcttctcttgccttttaatttgactttgttgttgataatttgtcttcactttttccattctagcaaattcttttgaatttcctcctcaagctttattatcttccatttctaatagtcttatctcgacccttgattgccacttcttgttctgccttaattgttgggtaaatggaagatatatctttttacagtgatttttattataatgtatgctcctattcttttattcatttttagaatttttttatttattctccccatgattttccttcttattacaatcattttttttttcatgttatattgtcaatcttaaggatgacaatagggtgattggggatgggttacccctttcccaactcttatcacatttatacaaattaattctcatccttgttctaataatataaaaaaaaattaaacgaggcaaaatgggataagtatgaaaatttctcataactccttgtctcatatcgtatcatttatttttactttatttttttatttttttttaaaaaaatcaattcaaaatatttttaattatattaaaaataaacatatattgtaaaataaataaaatattatttatttaattgaaaagtaatttttttttatgttaaaaatggtaaattttaaaattatttatttaattaaattaattatatataatcgaggtagggctagtaaaggctatactcgaacgcgccttgaaccatctcgtgatttaaaacaaagcaaaaattcaaatccatttttaatttatttattttaatttcgaactcatttctagttcctttatcttaatttcaaaccaatttcattagggtgggaatggaggctactttagtcaaccttgatatctccttacttctaccgattcaataaaatattttcacaaactccaatcctcttatgacattagtccgtgggaccgtggccatgatcaacattgacagcataattcaagtaagcaagcctccatagattactattgtcaagggaactttttggagatactggaaccaaaaacctgtcaagtgctcgagcagcagcctttattgggaactcaagtggtcccacaatgataaatgtaaggaagcaaagaaaatacctttcttattgaccaaacgtctatgctatttttgaatctttggctcatcaacgtattacttaaaaaaagatgcataatattttcttttcttttcttgttttagtaatatatataacattttacaaatcattttctttggatgaattattaagctcgtatttatgatcacatattttaatcaaaagtatattttctacaaagattacttcaatcaataaacccacaaacttaatgtcctgtacccaactaactctaattatcgataatttgtaattcaaaattgtcataaataaccaattttgcaggtaaattaatttcaaggggaaagacactggatcataacctaattaaggctacctgacatgctatgaattttaatgtttttaaaggtatttattgtaatttttgcaagtaaaatggaaagcttcaaaaaaaggcaagaaaattgagtgagaaaagcatgatattaagcaagcttaatcaaatcagctagggctcatcccctaagcggattctttgcttttcttgtataattagtgctccaaaatgttgattggtacggctcacaagttggttgctaattcgaggcactcttgaaaatcaaatctctggaggaaataaaggattaagatgataccacatgtccataggtcatagaaggaacttgaggcaaaaaaaagggataattgtggttttggtccccacttattgataattggtagaggtgacaaaatttgataccattcgttaacacgacatgaactcaacacacttttcatgggtttaggttgagtataaatgagtttgtatcaaatttgtgttaatatgcataacccgttttataaataggtaatttttgggtcaatctgtataatacgaatttgatccgaattgacttatctcataatttttaatatgaactaaattatatctttaaactatttaattcattttaaatttatttttaaataaataggtcaattggtcataaacatatttggttgaaacattaattatataaacgtataaaaaaacataactcaacttgattattaaatatgagacgtgattgttaaatgggttacacaatgtgttgcttatttaggtagtgtttggtttatgttttttacatgattattaattgtatcaagtttgggttgagctatgtagtagaatacctaaactttaacatgacacaaacaccacctacccacatgaattgttacctctaacaatgggccaaaggaatgtaaaatttataaaatttggaaaaattaattaaataaaatggattagtttcatttacattatttaagattttaagtaaatacatctagtttctattagtttgaaatttcttcaaatatctcatctattctttttatttgttattttcatgtattatatttactcacattctctttcactcaaaacaagaaatgatgaaattccaaaccaatggaggtcaagtatatttaaccaaatcttgaaggtagataagtgaaattaaccttaaataaaatagatatgccacatgaaataaagcctcaaattccaaaagaaaaaaattccaaatatcaaccaaaccaaactataaaaccttataactcccttttaccttccacctctctcataaagcaaaaatagaggaacttgcaatcaaggagacaacaacctagatgttgaggctgctcaaccctaatcttagttcatcttgaccattaattcatcatagtcctcatgagggcaaacttttgttttcaatctctattaagctaattttcctcttactactattttatgtttggttgttgagaaaactagaaaggaaagaaatttaaagttgtggttaataagactttttttgttagcctctttgaaccaaatcctcctccctccataaaatcaatgaattttcttcttctttttcttgcttatcaaacaaagcttcaaaacatcaccctcaaagctcttttattggacttgttatcatagagaattgttttacattaccctcacagtttttgaagccttcttaagattttgtaacaaagtttcataaaccacatcccacctatcaatatcctttgagtttttcttacaagggtacgtaggatatcaatgtatctatatttttatctattctttctcataatctacctttcatgggtgtttttgtttgagtgtgtacacattataggttctaggattgctttaggaattcttagaatttgttgttgaaaattgaatattaattcataaaatgtatggtttagacttgagcatcattgaatgatatttaaacattgtttgagagtattgaagagttcatgtaattattagtttatcaaaaaaatgttaaatgggaatattattagtgaattaggttatttagttcaagttgacagttttatgtccttcattctttgtattgactctatatgtttccctaagatttacactatccttaaagactcaaatttctataaattcatcctaggatagtattattcaatattattgagttacttggagtataaggacataattatggcttatagtggactattgtcttaaagaccactagcttgaacgcccttgaagaccactagctcaagtgcacttatgtagcaatccaacactcaattctataattatccaatttcaaattttttccaaatttctaggagtttttaaattgactttagtaactagtaaattctaaaatcttcctagtcaattggggttttgtccctataaatatgctaattgattattcaagttgaaaccttttgtgccttgaaatataatgacattatctttgtattcacctaaaactctccaatatatatatatatatatatacattgttcattgacaaagttgtaattgatgatcacattccgtcatggtgtttaggagtccactaaggactatgcaggtgttacattgtagatgtgaacacaagagttgatgttgtcaatgtaagtcttagggagtatagcatttgatcaaattaatttttgcatactgtcttcttacagaagatggtgagccttcaaattatcgggaggccataaacagttcggattcatctttatggatggcaaaaatacaagaggaggttgaagccttgcataagaaccaaacatggaaacttatgctactaccacctagacgaaaaaactattggaaacaagtgggtctataagatcaaacatgatagccatgaccaagtggagcggtatcgtgcaagattggtggttaaaggatatgctcagaaaaagggtgttgatttcagcaagatcatttctccagttgttcgacttacatcggtttgagtagtcttggctatgtgtgctagatttgatttacaccttgagcagttagatgtgaaaactacatttcttcatggaaagcttgaagaagaaatttatatgcttcaaccaaaagtatttgaagaaaataggaaagagaacttggttcgcaggttgaccaaatctttgtatgatctaaaataggcgccaatatgttgttacaagagatttgattccttcatattgagccttgggtacaataaactcagttcaaatcattgtatatatttgaggatgatgattttattatcttcttgttgtgtgtggatgacatgttggttacaagcctcaacaaagatcgagtacaaaaattaaagacacaattggctagttaggatgtttgagattaaagatctaggaccatcaaacaagattctagggatgcaaattcatcgaggtaaacaaagcaagataatttggctctcgtaaaaaaactatttgaagcaaaatttacattgcttcaacatgcatgattgtaagccagtttctaccccacttcttatgaattacaaattatcctcaagtatgagtcttagtaatgaagtagagaggatagaattatctctaacaccatatgtataagtagtaggaagtttaatgtttgctatgatttatacaagaccaaacattgcacaaacagtaggagtggtaagtcgattcatggaaaatccagggatagaacattggtatataattaagaagatccttatatacaccaaagagacctcaaatgcagcattatgttttaaaggatcataattcattgtcaaaggctatgttgtttcaaactttacaagtgatcttgataaaaggaaatctactacgagctatgtgttcacaattacaggaggagctgtgagctgggtttcaaaacttcaaactattgtggctttatttacgatagaagcagaacacatgaaagctacataggcttgcaaagaagttatttggattaaacgtttattggaggagcttaggtaaaaacaaaagaagatttctttattttgtgatagtcaaagtgccttgcacattgcaaggaatccaacctttcattctaggactaagcacataggagttcaatatcactttgtttgagaagtggtggaaaaaggaacagtgaatatgcaaaagatagttatgaagcataatatagcaaatgtcttgacaaaaccaattaatactgataaattcaattggtgcaaatcctcttatggcttggcaataacataagcaacatgtgataggccaagacataaaagagtgactttaggtaggagaatgttaaggttgaagttatctcatataaaaaaaacaaaaaaaacataaacttccttgttctataaaaagaggtctccaccccctatactatttatcccaaaaaaagcttttatagtctctcctcttaatagagagagaggttgtaattttgtcttcatatagtatatattttttttcggtttttccccgtataggtttccttcttaattgagagggttttaccatgtaagtacttttgcccattattttacttaatgttttatttattattctatttttattttttattattctattttcaaattatcgtcgtgggtatcatttcataacaaattcatcatagtcctcatgagggcaaacctttgtgttttcgatctctattaagctatttttcctcttgctactattttatgtttggttgttgagaaaactagaaaagagagaaaattaaagttttggttaataagactttgtttgttatcctctttgaaccaaacccttttttttccttaaacttgtaaaaactaaaataaaatcaatgcattttcttcttcttttttcttgcctatcaaacaaagcttcaaaacatcacccctcaaagctcttttattgggcttgttatcaaagagaattgttttacattaccctcatagtttttgaagccttcttaagattttataacaaaacttcttaaaccacatcccacctaccaatatcctttgagtttttcttacaagggtatgtaggatatccatgtatttatatgtttatatgttctttcccataatctacctttcatgggtgttgttgtttgagtgtgtacacattataggttccaagattgttttaggaattcttacaatttgttgttgaaaattgaatattaattcatagaatgtatggtttagacttgagcatcattgaatgatatgtaaactttatttgagagtattaaagagtttatgtaattattagtttataaaaaaaaattgtcaagtgggaagattattagtgaattaggttatttagttcaagttgataattttatttcattcattcattcattttattgattctatatgtttccctaatatttacacccactataagaaaaaagagcaataatgatgctttttttggcgtcaataaatgtataagatgacgcttctcgaaagcgtcctttttcgcccctatcaaggaatgggtgcaggcaaccatgtcgcttctagaaagcgttatctataaaagcacttacattgatgcttatctaaatgtcatatttccaaaagcatgacattctttaagttccattatttccaccaaattttcaatgttgacactttgaaagcgtcatctttaatgttcattatctttgacgctttataaagcgtcattgttgattgatatatattgacactttgaaaagcgtcactattgatctacctatgttaacacttacactagcgccaaggaatgtccaaaatatcatttgtctattttgacactaaaaaaagtgttatcttatgtggataataatattgaaaatccccctattgaaatgatatattttgtatgtcttgttatatataattttggctacataattttttataaagtacaaaacaataatttcaatattaataactatatcttccaaaagaaattgaataaatttgggaataatatcatgataaagaactaatgtctacatagttaattaatacgtaaatttgtaaatgtatcaaaatatttataacaagcatattttccaacttcaacataaaacagtacacatgtaccaaaaaaacaaggtctctaaattccttatcaaaaataatattacaagaagaagaagaagaagaaaccaaaagtatttctagccaaaagtattcctatttgttgcatatccactcttgaacttgaaatcttttacctgtgtacatttaaaaaataaaaataaaacaatagaagaaacaaaaaattatgtttagttaatatacatgcaatgaaagttaaatttaaatctataaatggtccatgaaagaagtgcaaatgagaataacttggtatttaatgagatgttatgcttcaatgaagacgaaaaattgtttaatttgatacttgtctataaaatattaatagactttttagttcattattaagttagaggaaacaagttaggctttcaatgatataaattctacaatatggaatgtaatataatattttcttatctatgtcttacatatgaaactcatttctcataaataaatatatgaagataccaaaaggtatggtttataattagtttcaatcataaatcatcatatctagtaatataagacatttaatattaaccatttgcaaatgccttaatttcttcttacaactttcctatattaccaaatttagttgactaataacattccataaggaaaaaaatagtattaaactaaaaattaatataacacaaccaaggaaatagaaacctacaaatcattggttaaatgtcataataataaccattctaaaacttgcctttatttccgattccaaaattacaaccaaaatataataattgaccctacacaaaaaaagctctctgccatctctccatccaacaacaaccttttcatgcaacaacaacctctccaacaacaataacaacaacttctccatacaacaatatcaatttctccatgtaacaacaacaacaacaacaacaacaacaataacaataacattgatgatggtgataattatattactaataatttgatttgtttagtccaaacatataacaataacaacttctccatgcaacaacaacaataataatgacaacattgatgataatgatataataatttgatttattgagttcacaaattatatgttttttctccatgtaacaacattggggatgatgtaataatttgatttgttatattgaaatagtttacacataaaactattatcttctattactatggaggaaaaaattacttatcatgagataagaacatatgagaatcatgaaaatgtgatctacaactcttaatggactgaaatgaggacatctacatacataagatggtaaattaaaaaaattagtccattcaagactttattaataatgaaaatcaagcattgtagatgttaatttatacttcaggcatgggtaaaaattaattgagttgccaacataacccactcagatcgtacttcattaagctcgacttcactatacgatttttttcctttaaactaagaattaattgtacatacatgatgattagttaagttaacaaaaaattactaaagtatagaaactaataaaatttattaatgagtacatgaatgggaactctaaggtttcatgcatgcatgtttgattaaaattaaaacacaataacttattgaataatctaatcattataaaacacctaaagatgttccataattattggtatatttcatgttatccattacccattaaacaagattattataagaaagtatatgtatggcccatgatttccaaatcaagtcacaccaggctatgtcatagccttggtcaaattttgggccttggtatcaaactaagctggggaataacttgtagaattcagttactcaataagatttaaacaaaatttaaaataacacctccattatattcttctaaccacccaaagtaaaaatgacattataattaaaatatgttggcttgtataaggaaaaatagtgtaccttcctcaatctgtctttgtctcaagtcttgccatcacacacctctcgttgtctcaagtcttgcatcacacacctcttgtagaccaatgtaggtcactgtcccttaaaagatgtctatgcaaaacaaataaaaaataaataaattaattaaatctattagtaaataattcatttaatatttatgatgtgtggtcataaaaaaaattcttattttaatattttgtgattacaactacagtaaaattgatgtagcaatagcaaatggaggggtcaaatggacttttgttttaccaaaattcccttttcttgctaagactttcaatgaattgaagttgataatttgggttagtaaatatttttatttgttttttgaattccaatttatcttaacagtacaacaaacataattaatagcataatcaatatataattaatagtaaagaaccctactctgaaggtatgaggaaacctactatcgaaaataataaagaatttggactgactttggtcaatagaatcataatatggattatcgtgcaatgaacctatttaaacaatatccaagtcatatgaagtgccaaaaaaattttgaaaagttcaaagaaatggaaaatgggaagggtacgaagaatgtgaagaatcctcacattcttcgtacccttgctaattatttaatatttttggatttctattttttcggacaacatttgaacaccccttaattaatcttgcctgaactgctcctataatagaatctctataatcaagatgcctatcatctcttaagcacattacaatgaaagtgtttagacgtattctaaccaaaggtttagatgtatagagttataatctttcttatgtctttctatagatttactatctagaagtcttataatttgattatctagttttaaactttatgtttgttcaaccgtcttaattatgtaattagagaaaaacttaaaatatcctttcctataaatttcttggctaaaagtcttaggtagtttccaattttctaaatcatgttgaatgttaggaaaatttactccttcactattcaccatattatcttgaggatcagaggatcaccaagacatagatttgaatattaaattcatttcaaagttaatttagagcattttcacgggtttacaaaattaatagagtaatcaccaaaaatcttaccctcaaacaccttttcctccgaatagaatgggttcctttggatcacctctatggaaaacgttactcctaggatagtcctgaaataaaccacatccatgactctgatacccttaagcacccaaaacactatgataaatagcaaataagtaaattatgtgatataggaagataagatgcttacaagaagataaaatccatcagacaaaagttaagacatatccgcatggctatagtgagttcacatgcctactataggaaaggtaagactcttcaaacaaaagccaagacatcttcaaatggttacggtagggttctttaaacaaaagctaaagagttcacatgcctaaaagaagttccattcacatggttctattggatccttagtttttctattttaagctcttgtagggtaaacatagaggtatctcatccttccccatcattcgtgcttctctagcatcttttctctcccttacctttgatcttcatttctttcctctcttttttctttgacaaaaaggtatggcattttcatgattctttcagaatttctgttgtgagttatttccatatcctcttggatttctttcctcataatgtgggttgtatttaaattataagaaggt

SEQ ID NO: 13767 - DNA, 6761 bp, Vitis vinifera
  Intron number 3 from transcript GSVIVT01007687001 (locus G SVIVG01007687001) derived from phytozome v7.0 (chr-ID chr1 7; pos 10384234 to 10390994)
tgcagcaataatatctcaacaagatataggtaatttactttcatcaagttgaccttctacgttattcatctacgtttaaggtttttatggcattcataaattttatggaagcttaagatgaattgaataataagctattctgcttgtaatttcatcttaatctgaatgacatgtgctcatttaaatggaaccaaagctttcatcaattgtactgcttttcaccatttgatacagggaaaatgataaaaacattaggttaatgaaagtggattatgaatgtagagtaggataatgatggtgtagagtagcaatttcccaattattccctaaggaagggttatagtggagattttggattgggattcttgaatttttaagagggagtgattcaattgaagttgaatgcattaaaagtgctttgttattttttattctttttttataaagaaacaaaacaattcattaccatgaaataagtgcaaagaagaatgggaaatccttccttcataatatcaaccgctacatatctctaatcaaaagtaggacaaaactatcaattttttataagccaggaaagtaatgcattaagaagtgctaaaagaagggagggcaaagtacacaggatttatactaggacaatactatctattccagaaaacatagagcattgttctaagtgcaaaatcaatatttaaggggtagaaaattctctataaaggacatcaaatgtttggtttcctgatttttttgctttcatatttactacatgattagttaaacgaggaatcctactaagagagcactcaaatctctgaagtaaaattgaaaacttggtgaagctacttatcaaatttccatgaacctctttctttcttatttatccaagataggattactgtggaatctccctctactagaaggttggaaatacccttaaggtctttctaccgggctacaatttccaccttaattgctagacccagtccagtatgtttagagaacattctcaatattccatggtgatccatgatgattcatgaacattctttcgattcctagctgtcatggatttctgaatgagcacccatcataagtcaacttgacacaaccaactaaaggagtctatttagaacatatcttctcagctaacctagtagatgcgcatactaggtttgaatttagcaatataatagttgaagggttgtatgtaaataatgcactagttgatgcccaaagggaagaggagaaataaatggaatcccataatgtgtccaacattttcaatctattcttaaaaaccttgcattccccttcagccatatggtccaaattatttgaggctaacaatacatcaatgtggcttccctttaagaagatctccaaaacccttgtaggaaattgttaccatccaccacactcctaggcggaacctaatcaatccaaacaacctatgccctaatgccaatgctattagacaatgcaaaaataaaaaataaaaaataaaaaaaatctaatgattcttcactcttcttacacatgacacaccactctgagctaagggctttgtagggtctcttcatccatagtgagtcattgaaattaaccttcctacttgcaaccaaccatgcaaacattttgactttgggtggagttttggctttctaaatgaaatttgctggaacaaagaatcttgaattgatgggaacaaagactctattggatgaattaattaagaacatagtagaggatgtcaaaaaccaaactctctcattggggaaggtaggtgataaatgcacatggactaaaatcaacataaggatagtgagttttttttttaaaatttttttaaataaaaaaagattatgtcgaaaattgaaattctatgatgaaaatgaggaagaaataagaactaaagaaacataggagtttcttgtccttgctactttataaaggttagggaacttctcaaaagtagatttttgtaccatcactaattgaatactgagtgaaacaagagtaatcaaagaatacttatgtagtggccttctaaggacactaatgagaccacctagcaacaacattgacatcccatccattagagtgtggcccatgaatgctcaaaatgatattgtacataaaacattgctctcccttgggaacctccgcaaccactttctcatgcccattcactctttggtttacaatattaggaaggcaaaagaagagctttgtgagtgaaagcataatttttcattttttaatgaaggataggggtctagatagagatgattaatgaaaaagatctaagtatacaatctttactagagttcccttttggcacattacaatacacatctcccattctctattttatataaaatagatagatttatatgcttgattccaaatggtgggactataataaggctttattgagttgaattggttatttattgcatatgattatttttaacttagttgatagagtggctagtggtatctttgagttgtttaaattatcttttgataaataagagaatgtaaataagtgtaactagtgcacaagagtacacaaaacatatacaaggagtgctaaaaaggcaaaaaaaaaaaaaaaaaaggaaacaaaaacccactccctccctcaataagaacctaaccaaactataaaaccaaaaccaatagagacattgtgcttccatctatgtacaccttaatccatagagataaattgttaaggaaagagcttttgagcctttgatttgacatcttgttttccaacaatcttcagtttctttcctttcaaataatccaaaaaatacataagggagtggctttccaagccttctttcgccttctatctacaaaagagccatttcaccctaggagagtctccctaattgagacaaaaataatcaaaggaatatcaaataaagagaacatcaatttccataaaaccctagccttgtcacaatgaagaagaatgtgataagtggattctgcatctttacacgtggcatgccttatgactaacaaccaacctcttctttgtggttggtccaatcaacgcattaccccaacaagcctcctaagtgaaaaagctcaccttagaaggaatttaggagttccaaattatccctaatggaaaagggataacacaattcactgactatccttggattttaaattagaattgcttcacgatatccaactcctaatcattcagatttcttgcaaaacaaaagttccaatctcctcattttcccctctgctcccataaatttgctacccatgcatctttcaatttggttaaggcaaataaggatgagaataacacacttaaaggctcctcactacaccatctatctttctaaaacttcactttgctctcgtcacccactacaaaggagactcttgtgttaaagagatctcactccttttttagagctttccatggaccttaaaagagtctctcacctcacacaaccactcccccttcccccttttgctccttgtatttcccccttatgacctttcatagcgtttccttttcacacaaataatgccaacaccatttgtacaaaatggttttattttagcaaagagggagattgaacacctagtcctccttttgacttggccttatagatagtctaccgcttcactaagtgcaatttgttctctaaggctactcctccccaaagaaaattcctttgaatcttctctagcctcaaactaaaaattctcagagtggtgaaaaaagacatgaagtaaattggaaaatgggatatagtactatgaatcattgtaagttttttcccttttgagatgtattgcctcttccgcattgaaagccttctacgaaaccactcttcaaccccatcccaaaccacctccaatttgcatgaggtccctaagggaagtcctaagtaagaagttagtagctcccttaccatacaaccaatcttagaaaccaactcttccatgttatccaccataccaactagaatgatgtagctcttctccaaatttatcttcaaacccaaaatgactttgaaccatatgagaaactaacataaattagtgacttgctcctaagaagccttataaaaaacaatagtgtcatgaatataaagatgagaaatttcctccctcactcctttttccccccacttttaaatcgtgacaaaacctccttcttggggtctcaaaaacaaactattgagagcctcctttgcaatcacaaaaaggtagggagaaagaagttccccttatctcaactctctagagtttcaaacaaagcctatgggagaaccatttaccaaaacggagaaattgaatgtagaaatgtaccacttaatccactctagccatttatgctcaaacctcatcttgccaagaatcactataaaaaaaatacccaattgatatgatcataagccttctcaatgtcaaggttgcacaacaatccataatattatttttcaacaatgaatcaacaaccttgtttgctattatctttgcataaagaatttgttttccctccacaaaagcattctagaatttggaaactacttttctcaccactttcttcttgagtctattgaccaacacttttgctaacggtttataaaggcctcctaccaaacttatggttctaaattccttaagatcttctgctcctctcttcttaaggataagcaccataaaagaagcattaaggtttttttactaaccttccatggtcatgaaactcattagaaaagcttaatgctttagttttcacaaactcctaattgaattgccaaaagaccatagaaaagccattcgggcttggggctttgccaccattcaattttgataacacaccatacacttcatcctttgtgaaaatcttgtctagcttcccaaactctttgatcgtctagcacctcaaaggagatagcatcaatgccaagccttcaatccccttctttagaggtcttaaatgccttggccaccccctcctttatctctctctctcttgcttctataagccacaccccattttctttaatcttggtaagaaagtttctttttctatgagcattgtccatctaatgaaaaaccttaatatttctatctccctccttaagccaaatttctcttgatttttgtctccaagatgctgcttccatcaatgcccaatagagtattctattattcttttgcattttacatgtcagaaagatttttatagatcaatccctgttttttaaagaattggcccttttaactatttacctttgtagcaatgtgataggtatctaatggagaattattattgaatttcaagaatttcaagaaacaagagtcccaattgatcctcagatagctattcgagaggctatcactctcctaccagatccaaacaatatccagcccttgtaattccctctcttttcctatttaaaccatctcagcctgtatccagactgtgacctagcctatactaaggctgttacaactaactgtcaggtggcagtacattcctcttctcttttctagtatacacataatgtataggaggcctatcacaatgttgctgatttctcatctctagtttccagatggcatcatattcccttactctgtataggaatgacaataagtcctccctaatttgaagttgttttgggcattaagttccatctggagcacagtttcattatagaaattgatatttggaaaatagtccttagtcaatagatgtgtaccaatttaagatgatgcctcccctagttggttcagctgatttggggtcctagttacagttattatgcaagggtatacaagtgtagaagagcaaacagatgttaaagggcatagctcttttgttgacactcaataaaatggggtgatgagatggatccaaagtatagagcttttgcttgggcaggttcatgaaagccttaccattgacaaggcagggaggacagacctgttgcatgattatatgtattgttacatagctgacctgaactagttaggatcagctattgttgagttggaatcatattgctttcagtgtcattcttcaaaagaaggcatttgtatctttccctttttccatttcaactccagcactccacttgcatctgatcataaatagaccaaattgcatttattttcagcattgttgcatctgatgccttatatttctgtggtaactgagttagcagaatctatttatctctgcctagatgtagccggtaatatatggactcatgtttacatgtatcattttgagcctgttccagcatgggcatggttatatggaatttagatgtttttgaggtttccatgctattgtcctcttattagaatgttatgactcactacttatcagtttgtaagatgatacatttgttgattttctaaaattttgagatagaaagatcttccttttatctgaccatattgattttggtttatttacctccacaatccttgtcttttaacatgcttgaagcaatgaataaatatataaaaaaaataaaaatatctctctcaatacattgacttttatgtttgtattcctctgtcctctcaatttgctccttaacgatgtttggactttgactctatattctattttttttttccttttagatatttagtgaatttttttatttgcatcatttagtgctaaggttatcctagtttactgcctgatctgtgccccaatttgtcctttggtatgtcaaaagctttggcaacat

SEQ ID NO: 13768 - DNA, 1620 bp, Vitis vinifera
  Intron number 2 from transcript GSVIVT01036762001 (locus G SVIVG01036762001) derived from phytozome v7.0 (chr-ID chr1 9; pos 22889122 to 22890741 reverse strand)
ggtttcgaacaggttcaatttctttctaaattaatatggtgggcatgttttgcatttgattttgttttcatagacatggtcatcactattttgaatttaataagatctattgagctaattttgctgctatattatgcctcatgtatattccgccttaacttttatggcatgttcaatagattccactaaaatcaaaagaaagagagtgattccctttcctgcccattcctatgtttacttgcatttgaaatgaaaaatatgtgggacccaccacaatttggggaaacccattcctcaagtttaaggaatcccattctcccacccttcttatgaatgggatacatcaaaatttgaggaatcaaattttgggaatggattgcctaacttgctcttgtgcctctaatttataataattattatgcctccaatataatagtacattatccgaaatgatctctggattgatcagaagatcctttcaattggttagaatccgttccttgaacaaaactagatcttgtggaatcatattgaatatttcacaatacattttgtatcttgctgaaaaacatactatagttatttattatgtgattaataatttttattaataaaagagagagtaaattaattaaatgtcaattttataaataggagtatactttttttatccaaaaaaattataataaattcaagaaataagtttcattcctatgctctatcattgaacatgtttttgcttaacaatcataaatctaaaataaatggatatacttataaagctaaaatatccatttatatatatatcataaataaataaaaagtttttcttaaccaaattctatttaattaaacaacattataaaagaaaaatgcaattaatttaagaaataagttttatctccacactgataaatgtggaaattttttataaaggcattatagtaaaactttatatttcattttgttcccttcgttgatagtaaacagttcaaaggaatcagttttattctcattcccttgcctaatagttttgtaaacacttaaatggagtttctgatcctgattctaattccttttattcacttttcttcccattatgattctattttcattcattccatttcccgaaaagcttagtaagcatgccattaacttttggcatgaaatgaggttattttttttggtagctcaatgcttaaaagcattgtgcttggttcctgatgagattctgttggattgaagccaagcctttacaaagatcgtaggcgctatcttaaagatgagggaaagagaaggggggttgtgtgggagtgggtggggcagttgggggagatttgaaaagcttgcattgcttctttgtggagctctttttccattttttccttcttttttttaccaaattttgtatacttcgaaagatgtctcaaacttccaaacctttttatttaatgcaaacaaatcagattggggatggagatggtgtggtctaaaaatactacattcatattaaactgggatatatacttacatgtatttgaacccttaagtcattgatatgtgaggatacaaagtcctaatatcttctaaaacctttttggggatgaaaatcctgcagtt

SEQ ID NO: 13769 - DNA, 4374 bp, Vitis vinifera
  Intron number 14 from transcript GSVIVT01034895001 (locus GSVIVG01034895001) derived from phytozome v7.0 (chr-ID chr 18; pos 16152923 to 16157296)
aaggaacttcgtgtcaaggtttggtttccttttttgattagtcttgtcttctttttgcattcaatccttcacaggaacataaaaattatggatttgaaagttgtgttgctagcaagcttgtgtgtgaacaacaatgttttaaaaggctataagacaatcttgaggtgttttggcgactgttgtatacaatgtgtgtactttggtgcaccccttttggcattttaatactaaatgcatttacctatcaaaaaaatcttgaggtgctttgtccaaatgacctcaagaggaatccttgagagatgtaaaccttaacttaaacaagtaaataaataataaaaagttctcaacaaatcaggaaaatactaataaaatcacatgaaaattgaataataagaaaaccttcaaattcataatgacacaattaaagatttatcactgtcaataataagaaatgagtttgttccatgtaattctgattagaaaactgtaggaactagtgtgctcctctatgttccctagcgaaagaatttggagggcaagagtgcctccaaaggtagctttctttgcttgggaggcttcctggggtcaagtattaactcaggagcaacttctaaggagggggttctctttggcaaataggtgttttctttgtctatctgaagaagaaacagtggatcatctcttacttcattgtgtcaagacgcaggtcttgtggaaccttcttttctccctttttggtgtatattggactctttcgtgtacggtgaaggcaacccttcttggatggaatggagggtttgtggggaaaaggcgcaagagggcttggcaaatggctcctttatgtatattttggtcagtttggaaggagagaaataggctagcgttcgggaatgaggaactctcgcttcaaaggttgaaaaattcttttgtatgtaatctttggtcttgggttaggggttccttagtggagagtcattcttctcttgtaagttttatagattggataggctcctagttagggaaggtggtgtgtatactccctatatacttcgagggcaccggtttttggtgttttctccttttgattaatatacttcctttttacttatcaaaaaaaaaaaaaaaactgtaggaactagaaggtacccctcttgaacatttcccccctaattcatcttggttttatcattcttcaaaccacattgaaatttaatagaaataaaacctggtccagtggaagcaaataccattaatccaataatgtgtagcaaaattttatctttgaagaagaggaatctgtcactatgatatgtaaatgcatcattctctatgtatgttcttttttgaagaattttaagtaagaaaaaactaggtttattgatatcatgtctataatttgctttctgttgtgtgtatatatttttgataagtaaataagcaaatacagcaaagaaaaggtgcaccaagtacacacagagaatacaaagagcgccaaaaagtaggcaaaaggagaaaacaacaaatcactacccaaaccaaagacatcaccctaagtaacaaagaaacaatgcaacagagggctcataaactgatataaccaagccctattttgctaagagaacaagactaacaaagcaaccaaaaaaagagcaacaagagcctgctcacctaagtcacccccaggaaaactaagaagctaacaattgtgaaaacctaacacaaaaagaagagacaataaacaacctactgtccacctcccgtccccacgccttaaccctagccctggcacttgaaaaccaaatccaacccagattttttgcttcttctccctttaccgcttgagagattgtagttaacaaagtattccaacttttgaagctccctttcaaaccaagaaggagaggaagacctcctcttaaagcttgatcccaccactctacaacccttgcaggcttccaatttactcaacagggagccaacttccttctcaaatccttccacaggcaaacccatgtgctcactgaagaagatgaaattcttgtaagctaaatcgacaatgttctcattgaacgccccatccttcctgcccatcaagtctttccttgggcagccctttcttaaatccgcctcatcaccgcatgaggccaagtctgtagtcttgttaatggtaggaagcatcattaggaagtccagttcaaagcccttcctggaaaacaaaagcaaaggttgacaacccttatccttactttctactggagacccctcgtttgactccctccatgagagaaggcaaatatcccttgccaacgaagcacccccatctttgagaggaggagacagagtgagagacttgtctcttaggagggaagcggatgacaaaaccaaacccacaaagccattcatttcaaccaagagtgcaacattagtagatggtgaaccaaactcaaagcacagagttgttgacaaggtgtagggattaggaggaagcttttggtacaccttacattaactagttagcatgaggggcctcttaagcaaactgttgggtccactagtgcaagggccctcagcagaaaaggcttggcccaaaatagggagctcagaatccatagcgggctggcccaaagagaagtaaaagcaacaagaggaaggctaggctcaacacactcaaagcctcccttttcttggcccaaaggaaaaataagacttgaaattatgcccattgatccaaaatgggtaaaaaaaggtgggctcaaggtccaactcctcaccaaccccttcaaccttgaaaccattgccgcaggaagagggcattgtacccttcaaagcttgttcaaaatgcaaaggccttgttgacattgcctgacattttacacgaatcctggtatctacccccactttcctagtcgcatgtggcctatcctttcaatcatccttcgaggaaatcgccaacaaccttggtggagactcccaccataacggaacgtcgtaggttgaagaccttaccatcacatgtaagagcccagtcgccctcttcccgttggagctaactagaattctagcccattgtaaatgtcgtctctccactgtctccacatcacagccagaacacttctgcatgcgtccccctctctcttaaagaattccatttcccgcaagtgcgaaggaagcataataacttttacccaagtatctttagcaagagccctttccttcaggcaacttgcttcagggcttcaccaagctatcttcaaactctgcccttttatagaacaacaccacaagctcaacaccccttcagcgtcctttagcattataaaaaacaaacaaaatcaaagtgccacccaacaacattagatgaagattcccaactagcctccagttgcttctaacccatgagcttagtgaacccaaatctagagcctcattggcaaaaacaccccaactacccacaagacaatgctttaggcgctccagatttctcactatatccttgcccgctccggatccaaacaaactctcccactaccttcttactactaggaattgcatctacaaaagaaacatctttgcctggtgtttcttctgcacacatcctccttcgatggtcaatcccctatggcaactatgaagacttgtttattggcacaacaccaatgctcctcaacttgcttgctagagtcttcgaaccccctcttaacaccccttccttttgggaagattaaggaaaatctttccccttggacaaccaaactgaacactgcaagaatcttcccacgttattgcttcggagttccaacttaaaaacccttcccccttccttccactccaatctaataggcttactattacagttatcacaacaaagttcaaccccctccaacctcaaagtaaggcatctcttgccaaatttgatccaagaggaaaattcacaacccctctttgcaatcataccaactacctttccttgaatcatctcctttgagatctcaaaggatttcaaatccaccagaaaccaacacttttccccccatttctcctagagagctacatcgtgtctctattccaaggcccataacaatgatattgtgtgtgtataatgtaacccatccctttatggggagtctgtttttgtttgatggtaattgatctggctgatgtgcatgttttgttccaatgtatgattggtattgcttgtgagaagttggacttattctgtctcgtatgggagctgagactgttgttgctagttttctgcactaattttggcaagatataaaaagtatgatgtaaattatcctatgcatttattgataatatggtgcttttctgatttcagggaacttatttgcatcataagcaaatcaaggctgc

SEQ ID NO: 13770 - DNA, 2868 bp, Vitis vinifera
  Intron number 1 from transcript GSVIVT01034910001 (locus G SVIVG01034910001) derived from phytozome v7.0 (chr-ID chr5 ; pos 32037 to 34904)
ttgttaagcttatggatatattttaattttggatattatattttgacatgtcttctatgatgttaattaccatggttgtaactaagaaccacattctttacaatcaagttcaagacttgcaaggtagagtccttgtaaggaaatgtgggtgcaggaacatatgctaattgaagccaacaatgcgttgaaaaggaagatacaaattctcaaatgaacctggtcttttattttagattgacatcctgtgttataggaagtgggtctggtcagcctagtccaaaggccattaacaggccttctaagtccagcttggttaaaggggatttaggaatttgagttgtattagtagtaacattgatgaagaaaaacttcatgctagatttctattgcatacttactgtcaaaattgaagaaaattttggcttagttgatcagaatatggatcctagttgcagtagttttcaataagttttccccttgtcagcagcagaaaaactgggatcaaaatccaaaacccgccatatggtggatacaaattggtataacaagtcttactaaatcttgaggaaagttctttagatggtggaattgttactaaatggaacccatttgatgggtcttgacatggtttcttggtggtcattgcaagtcattctttagaattgcattcaaattttacaggtttgagcttctactctctcataatatacctcttgtttttggctttttattgtgacagcaaatttccaagtacattgatgggcactataaaaatttccagaattttctcaacttccatctgataatgtgccggtcggtttcagttgtggttctggttgggcaggtaatcctctctgttttcagaataaggctatttttttttacatctatacttatgcagccatcatacctcttcaaattatgaacttgttgtgttggaaaaatcaacatatgtatactcttgtttcaattccaattcaatcaaaaaacaattccattagaaggtcaagatttggtgtatgcagaattgttatagatgagacgctaggttgcagccagtcaggccagcccaaagtgaatcttttgtttggaaatgatttcagtagccacagatggtgccatttcccccctatttttcaaaaaaaggctgcttttcctgcagaaatttgtgttgtggaatgattttcattgttcaaatgacattcaaagttttgttttccaaaattttcttaaagatttggacaaaactacacacaagtcattttaaccaatttttcttgacatgaagagaagaattccaacatcataattatggggatttgtttattttcttacaatttgtttgaaataacatctcttgagctgatagttagagttatctgggttttgttgcattctgtaatctctcaggtatatactcagaaacttgtaagaagtgacaagtacaaaactggaaaagacaacaagtatgttgagaagaaggttatatttgaagataacagggacatattaattgggaggatccctgtgatggtgaagtcagaactatgttggatgaatggtgtcgagagaggtgactgtgaatttgatcatggaggatatttgttgatcaagggtgcagagaaagtgagtatccagttttaatttttgttctgttcgtatctctgtgtctttttgtggggaggggagggttgttcggctctgttaattcagggttgcaattctacatgataagtctttattgtggcatgctgaggtaatgaaataaatgttataacattgatgcatattttgctctatggaggaaactgaatttcatattgagatcgtcaaatgtcaccaaaatagttttagtaatgtccttatccacagattaaagtagatggtatccttttgaattgaataacaacatagggagcctggtttcttttaaagctattttgagcttctattgattgtttttttacttttaactcaaattgttgacttcagatgtcactaccacaatctgaatttacctgttataattttttattatttaaatgataatacagccagtaatcagtctagttatttactacatttggggtgcatcaccactggagaatctattgacttcataataatttggccagttgtacaatttactcagcttattaccatgcagttaaaagttttaaattcctggacaatctggctttgcttttcctttcttttctttttttaaataccattttttgttgtagaatttgtattagctttctattggactgtaggaagggtttagcaattacatagtggtggatgtggctttttttggaattgagctaggattttttacttcactagttagattcataatggcagtaaccacttttctaggtagtccttatatgtctgatttgcatagaaatattttgaactaaattgtggcaactggaaatttttatgggatgtattggtctatttctattagtcaacatgttcacttctggtaaaagtgaaaggggagttgcacttctgcttgtctgctgtagtgagtgatcatttgtgtcactgtagcttgtttcaactcatgctattaaataaatgcactattgtgttctcttttactatttattgtttcttttgcttatttttccttctattagtttgggctagaacagggcagtagattaccacttaaatttaaatttattttattcccagggtctaatttagccttttccataacagcataagcttttgtattaggtgacatggttgatttctcctcttctcatctctgctactaaatttgtttctcttttgctactaaatgtctgttgtgtagttctctgaggactttaccttccttctatttcatta

SEQ ID NO: 13771 - DNA, 2270 bp, Vitis vinifera
  Intron number 7 from transcript GSVIVT01033170001 (locus G SVIVG01033170001) derived from phytozome v7.0 (chr-ID chr4 ; pos 8892461 to 8894730 reverse strand)
caggtatttgggaagtcttgttcccttttgacttcttttaaattgtcagggactattttcttttcagaattccatgattgtatttctgttttctttattctagttatttggaacttggaaatgattcagagatgcttgagagcccttggtttgacttgtttgttgtgaatatagcagtttcccaaccagggtgaaagtgtaaaactttgacacttgtcttgacctttcttaggatttaggaagttgttatggttgccatggtctcttcttcccctcccttcctatctcctgttaacctcaggtcagagctacctttgtttaagtagcaaagaactcaatcctctccatagaagttgacactaagcttttgccatataagttaatagtgatgttctttaccagaaaaagattcaaataaaccaagatttgaacaaactgatgtaaccatgaattctgtcaattgatgttccctgttacttctatggatagaggtggtggaaacacaggagtgtatgcaatgcaggatgggagtgagatacatgaagtattacagttcaaaactagtagtttttaaagacttacttgaagatcatctggcatcttatcactttgcagcatttgtttctgctgtggaaatcctgtgtcccaacactgacacctttgtccttggtccattttttttatcgcttcttaatacaggaaacaatgtccaattgtatcaatcaggaagacaaatcttagtttcattttgttaaccaaatgctttggagatctattctaatatggttatctgtccttgtctgatagatgtgagaagaaaatggaaatggctgcaacaattagaagatagaacaataacagtatttgtgattggctcaccaaacatttatttgaaatcagaaatttggattttgaaacgtgttaccaactttagattcaattattattaccctcgcatttgttgtgaggttgtaacagctgggctcagtgcacactcatctttcaatatccaatttgcaagcaaaatggccttcatataagacagggtttaggcactgacaatcctaatatttcctttaggattcaaaacagaaatcagactttgaacttatttcttatgtaggttaatcaaaataatagattgagtttttcacacacaacccaacaattaaatagtgccatttgtttcttttggagttccctttcctttgttcagccgaaccttcaggcttcatgttcttttcttctgttggccggggaaatattatttttctctcagtttaaggattcttataaggtgcttatgcttaaccacattcagcaccctgaattaggacacaaccctgatcatcatgtaataaaatctaataataattgtaaataagttacatctgacttcgacatcagttggtgggcaaccatgattacatggttctgcatccactgaacttgcacatccagttgataggactacgggttaattctctgtagaatagttactatccatttatagtgtagcagtataaaaatcaagtgacttgttaaaagcagcatgattatctccttaaaattttccatctccaatctatgcttcttatagcttcataaaccctcctcgtagaacagcatctctcaataaatacatagagcaaccatgatatattaagttcttggtggtgctcaagctgggagagctaagggatataaactatgaagaagtgttgtttctgctctctttagttttatatcaaagggaacaggccttcacattgtttttttcaggtgttaagatctgtattgcggttttttatggctctattgtttggttactctcttgttggtgcttgtctaaatgaattcttcacaatcatttacttggatattcaaagatcttgtaactcataatgcacaaagagttggttcttggaatttactgtttgtgcatgtatctttagttctctcttttatgttatatatctcctttcttagttaattttacttattgaaaaatggtttgctgggtctctgtctttgtataatgttgcatccttcttacttttttatattgtgataaagaattaccactatccaacttgtctagctgcacttatcattcgactttcttctgttatatgtaaactagatcttctattgcaacctattcattctttcttctcttgatttcatttttggtagtttttaccccattccttacttatgttctatttattgcagacctacttgcaatctatcactgtgaggcttgagga

SEQ ID NO: 13772 - DNA, 4609 bp, Vitis vinifera
  Intron number 1 from transcript GSVIVT01015109001 (locus G SVIVG01015109001) derived from phytozome v7.0 (chr-ID chr1 1; pos 1104480 to 1109088 reverse strand)
tgctgaattcattttctgcacttacgtgtatcagagtagggtggcaaatgtgaagaattaaagtgatgcccctctttaaggccaagacgagagctaaagttgtgtttcattggtttaatgaggagttgtcatgggatatagaatttaaaaacgattaggatgagaacttgaggggtagttcggttggtccgaccttgggtttgctccctaatggttaccaatggtttatccgattattaacttcagggtcctgtgggagattaggatgagagcggctataggacaggatatatcccatagaatatggttttgagtctcaattttattttaacaaagaatcaaaataatatcatatcccatctcgccaagcctataagcaataatcccgcctttctaggctcaaaaccatatctttggtgaaatttgatatttattaagctcaagttcattttaagtcttaaatttttttggtaaaattaacgtatatttattaaattattaaatttacatatttgccttagtgaaattttaagaaacaaatttacttaataaggatacatataaaaggcatggaagttacaaaaaactaaaaacaaggatatgagtcataattgtaaaaatatattctaagtagattagatgtgataaataaaatgaaagatatttgagattttgatttaatatttaaaattattttttaaaatatatttagtttatttaataacttaaattaatcaatattagtatacttgttactacaaacattttccttcaatattatttaacttttatatatatataaggaaaaataacttttgtaacttttatgtatttaaaaaaataaattattccatgttttcagaaaagaaaaatcattcttttaaatttgtattttcaatcctggtaatcaaagaacactttgccagatggcaggtgtatagtactactccattcaacatttagaagtatggtattaaccatatgactgttggagagattcagttatttaggctccacctcatatgtctttcaattactttggaaaaataaataaataaataaagaagctttcaattcctataatatatatatatatatatattcattatttaccagtttttatgctttaaaataaattttatatgtgatattttatttttatgcaattattttttaaaacaaataaaaataattaaaaacaattaaaatatgtttaaaaaaaaaaaaacctcatttttataacaattcttaaaaacttgtttcgggatcaattgattattcatgagaacagttcccagacacgaccagatcaggatgggttagtgggaatgggttcaaatcccctcatagggctaaggtagcaccggtatgggcttaggccaaactgccctccatacaatttgggctagcatttgcccctcctaagccttaggtggcacccctgccactatttggggggttgggcttaggcccaatatccctccctacgatttgagctggcatactctcccatgttcatgaggtacactctcatgagaaattcaagtgcttttgcttgaactttatcaatagatttcctttgctgacgttagatcctcttagtttcaaactaagaaatccttaaatcttttaaaatattcaatttaaaactataagtctttcctaagcaacaatttaattcgctcaatattccccactaggatgcataagggaccttcccctacaaaaaattgataatcaccttctcgatgtcactaatgatatcgggttgactaagagaaatctttttcgtgtgcatgaatctaatttgaatttcactcaagaaaaatcatccttttccaaccttagcaatggttttgtcatttcatccaatagtccactaaaacacttaggatttgaaaagcaaagcttgttcgatcaaaaagtacacccacaaaaatataaattaagcagtccttttaagtagttaaacccccccaatcaaaggaagtgggcactattttagaaatgttaaaggaattgcatttacttaatattattgttattaggtcataattgacctttaagcatggggcatggttggggtaattggatccaactaatcatgtaggtacctataaagattcattattatattaggatttaactctcaaactcaactttggtccctttccaacctatttgctggaaatgcaaggaacaaagggaaagttaggaaggaaaaaaataaaaaataaaaggacatattcccacttcacatgttctgttataacatgtttagtttgtcttggcttgggttttattttaaaaggaaaaaccctaattaattaatctcatcttctacctttgatggccattactactgtttaaataattgagtttttaattaagttaattacctaccatgatccgtattgtttgatacgtggaattaatttgtatttctttagctgcattaacagccggcaagaatcggatttgttttgagaaaatcatcgagctcatagtttagtttttcacacgttacgaccatcggtgatattggtattgttattattatcattatcgtcatcatatagttattattatattataagatattcgagggtggtggaaagagcaataacccctttattcacattatcacatggcaaataaacctatgcaaacttttagtttgataaatatatataagatgacttattagtatcgaaaattatttagaataagttatttgaaatgattctcttgtatttagtaaggattcttaaatgttaaaaagattgtacttgaagattaggtacaatttttaaaggaatccatctcaacaagacctatctatgtcttgaaaaagtaaggatatttaggatctatttggttgttgttttttaaaactgttttgaaaaacagttttttgtgttttcagaagaaaaaaatttgtatttggaaattaaattttgaaaaacagtttttgttctaaaaaaaaaaaatttggttgaattaattaaaaagttttttgaataagtaaaactaaaaacatgtttgaaagttatttttttaattaataaagtgttttcttccattaacttgatattataaatatataaataattttcatatgcacaatttatttaaattaaaaaaatattcaattttaaaatttttacatcagttataattttcttaaacaaaggatgactttgtcatcatatgtaagtatattaattttaataatttaaggaagaaaaaagggtttgagggtgagggtgtggtgattgggtggagttcacctttgtgaaaacacaaaaaacagctaagaaaaaaaaaaacatgaaaaacaatttattatttgaacagtgaaaaaataaggaaaacatctttttattgtttttaaaaaagtggtttttgagaacacaaaaaacaaaaacacaccccctttcccaaacaaatttttttttgttttttgttttcaagaatagaaaatagttcttgaaaacagaaacaaataggccttagggtttgtttgaccatgtttttaaaaataattattcaaaaaaaattaaaaaaattattaaaaattatttttaagagttttaagaacatccataaaaaacaaggaaatacatcttaaatttattctaaacgaacatgttttcacaaaggtctcaaaaaatctttttttttttgtcaaaattttaataactgtgattctttagttaaaaaactgtttttaatagcaaatttaaacaaaatctctttttttttttttttttctagaatgaaatacaagagacagatttttcattcaattataatttttaaaaatgttcaaattattctcattcttgataaaaaaaaaaaaaaaaaaaagtttaaattagaatttccaaatgaaatcaatcacacaacaaacattttctacttttactttttcatccattcctaattaaaaagttaaaaactataacaaacagctccacaatcaaccaatcctaactgcagggcagatggaaaaaaaggccaaaatttatagacaaataatggtggaacacatgagtggcagagatatgataagtgaatgacttgaatagattccacatgaaccatatcagtagatggagtaaagcccacaacaacaaaattcacgatcagaaccaggaaaatgtcatttccagcaatcactcatgtgggcctttctcctaagatcaaaaaaatcaggctgccaaaagctggggccaccaacaaagacgcctgctcaatcaattagggggaaagagagagagagggatgtgtagggaatcatcaacttgaaggtagtcgtaaaggacatttattgcataaagagaataaaaaagagggaaaaattgaaaaagcaagaaagaaagaacctaagaagaggaagagataagcatggagaagctgagttccaacccaaaaaggaacctttgggtcccttgtcatgttgttgggggtcactgtttatacatatatgtctgtctcttatagccactgtgctttgttttgaacttcctatttgaaaactttatctaacttttttccctatcaataccatcagagatattcctattggccagaaaaaaataaaaaa

SEQ ID NO: 13773 - DNA, 4186 bp, Vitis vinifera
  Intron number 2 from transcript GSVIVT01015403001 (locus G SVIVG01015403001) derived from phytozome v7.0 (chr-ID chr1 1; pos 3306648 to 3310833)
aggaggaaggaagcgcaagtccacttcctgagaaggtattgttactttggtctatcttgatattatctatatctatcggggttttacattactattaccatctacatatggcttcgccattgatttgtttattaaatttgactaccttcttgatgattgtttaatctgtatgattgtatcctttttatttcttgataagatatgcttaatctgcatcccatgcaatttgtatatcatgtattaaaatcagatgccaacaagactcatagcaaacaaaacctggtatctaactaattgaaattattaagaaaccacatatttagcagtttcacataaaaaatttactgttggtaaggaggatcacttcacatacttgagctagtgtcagcctatggatggtaaaaaacaagtacaataattgtgaattcatgtttttgcacctctcactgtcgatgggaagcaatgtggggcagggttcttactttggattagctcaaaaacaagggttggaggatcccaaatagatgttacatttgcaaagaagaagaagaaacggcttaccacatcctcctccactgttcaaaagtagctatattatggcacttgatccatgcccttttggcgctcattgggtgatgcattctacggcaagaggtgcccttttgagttggcataggtcttttgtcggaaagaagggaaagaaggctggaaagctgcttattctaaacgctaaggagggagagaaatagggtagctttcaagaatgttgagggtggcgaccaaactattaaacaatccttcatgtaccttttgttggattgggttgggatgtctataagagactgctccttgtccatcttggaccttgtggagtggttaggctctaagagtgtgtttagctatgattctagaaagtatttatagtctttctaatacttgaaaaataaaaattttcaagtgttaaaaagatcaaaaacagctcctagaatcaccaccaaatgcactctacgtaaggcatggttggtgttttggtgttcccctcactttgtttttggcctttttgatgtctttgtatatgtcgtgtatactttttgcatctccttaagtgctgttaatacaattaatgttctacttataaaaaaacaagtcaagttttcactttgttgtgtgaggaaatttgttcctcttttaccaaaagagatggaagtactcatacgaaaagtcagaaaactcacctctataaataattatcaacaatgaaatattagcatgatgacctagtaaatataagagataaaaaattacataaagtacatcttgaagtttgtacaagtgtctaaagggtcttctgttggagggtcatccaatgctttagaggagacttgtctatctagatttggcaagcagccacagatggcatattgattggatgacttggaatttttgatagtgtatattgattggatgacttagaatctttgataatgagaaagctttctctctttctctctctcccccgtccttctctccctccgtacctccgtccctccgtccctccgtccctacctgcgaaccacactcttatatagaaacttcaaaccactctcataaatagaaactccaaatcacactcaaagtagaaacttcaacttcatttattagtacattttgggtatggtagcttacagcttcctcagcaatgttatctgatcaagatggtatcagcggctccttgactgccgacaaatctagatggatgtgtttcctctctttagagtactagatgacccttgttctctctctctctctcgctctctctctaacttcaataataaagggcatcaatatgctatttttcagtatggttactcacagcttctgtattatcaaatattctagagtcatttattcaagacgccacctgtggctccttcactgcacagcaaatctagatagacacatgttctttgtacataaaatatgcaagatatatacaaattaaattaataaataaacaaaaagaaagaagagattgaaaagccagcataaaccccacctacccgagccctatgcctcaactcccactaattatctataaaatccaagaaagttctccttgctaccatattaggttccacgttcaaacaaaaagggattggaatgcaatttctttgagcttccaaactgttcttttatcccttctcacattcttccatctttgcttcttctgcaaccttcaacctaaactcaaaagatgctgtcaacggccttcttcttctttttctccttctcctccagcccacaaatttatcatgccatctcaatatcaaaagaacccaagaaacatcaaaagcagaaacattaccaccaatattgaaccagaaaacaattatgcaaccaataatcggcattcttcccatccttgtagcacatatatcaccaatttggaatgaatttacccctccttcctaaatggtcaatagtgggtttgccttacgttgtgtgatttcaagagtcaacgtattgcagaacttccatccatagtccacgtgcaaagaatatatggaacattacctactaatccacatatttaaagtagagtatgaattatttatttatttatttttcacaagtagaagggataaatctatcgatattagtcagaggcaaatatagacatcacaaaatcagcatttaatgttggttgggaggtttccaagttgctggattatattatcctaatcatggaacatctgaacctggaatattggaaacttgatacaaagtttcttcagaattacctttctccttatttacttgtgttttttttttccttttatctttaaattagcagcttcttagttctcgtacgattactcgtacccctgggttgaagttttctcaaataaagacttgcgtattttaaaaatgtatctatctgatccacttgtacaagtagggtctgataccttaaaattacactgtgcctttcactcatatatttttttcctcattttatttttttctttcacatttggttagaagcaagctgttagcctaaactttacaaaccaagaagcttaaatttcaagggaagaataatagtatggaacctcagatgcatttaaaactattttattgcctgacacgtactgattttatctgcctctcatctcatgtttttatgttccattttgtagtgatctctattatggtcaacattgcactcatttgatcacttatgcatgccatttattgtttgatttttagcagaggtatgacagccttgctctagcatgtattgagtcacatgagagctctagttagatgaatctaatatgttctgaactatttccctcctctaaatgaataaatggaacttccctaatttgttttcttgcctattttacccgaggataagcttaatgtttgattaagctttgaccccttatgctaagaactagggggaatttctgttgcaagtgaaataaacgtgtaaaacttttaaaaagtctctggaatgttaaaatctcacattttgaagtatcgtgttgttttatttattgtcagtttctagctttctcttttttggagttttattcttcatttaataaaagctgtggttacccttggtctatagaagagccaactcactcacataaagacaagaatagaatttcatagtagaggtttcttctgtgcgtgcatagttttaaaaggcacgctttaagtgcacctaggcttaaggcacaaccacttcctagttatagggcctcgcttgccaagacatgtgccttgataaagagtcacgccttgtggaagagtcacacattgtctactttcctcttcctttttaaacacttttattctggaaatttctaattttatatcgaagtttatataatttcactactttattaatgaatgcttcttttaaatgtttggaatcttaaatttttaattgattatattagattttgaatcatatttgataaaattgatatgcaccaccagttgcatttcacttcactcaagtgcacgccttgtgttgcaccttgcgcctgagggtttcttttaatgaacttttatgcatcaactataccctgtatttcattatattgaagcctatttttgaaatattttttgttctgtttgaatctttcaggtacagatttccaattcccct

SEQ ID NO: 13774 - DNA, 11938 bp, Vitis vinifera
  Intron number 1 from transcript GSVIVT01020937001 (locus G SVIVG01020937001) derived from phytozome v7.0 (chr-ID chr5 ; pos 16854405 to 16866342)
tggatagagagtaagaccatagttttaaaaggctcaaggtgcaccaaggtgcaaagtcctcctacagcccgaggcgcaaggctttaatgaagtgaggcacaccctattttacatatataattgtggaatttcgtttttcctttttcagtctttttacaactggtttttatagctgtttattacgtttgtatttaattcttctttctttatttaataggatttgaagtagaatgttacccaattcctatctatcttgtttttgttccctgagttaatgggagatttctctcctctacccaagattctagttagctaattttaggaagtctttctctaccatgtatgttaaacacctaagtaatttttattgagaaaaataagaagaaaaagaatagagcaggtttgttcctgactcttctctctggttcaacaactctgaattagaccatttccttatgcctaaatacggcccagccatcggaatggctaccaaaaaacaaagttcaaactctgaagtcacaattccaagcagccatggaggtatggacagctcccatctgcccattacaggtcataaactaaatgggcaaaattttctccaatggtctcaatccgtaatgatgtttatatgcagaaaagggaaggatgattacctcactagtgttgcatctcctcctgctaaaggagatctcaaattcaaagaatggaagacagaaaacaacatggtcatatcatggctaataaattcaatgaacaataacataggagagaattttcttctctatgaaaccgcaaaagaaatctgggacgctgctatagggatgtacttggacaatgaaaatacagcggagctatttgaaattgagggaattcttcatgatttgcgtcaaggagatctcccagtcactcaatatttcaaacttcttactcattattggctgcaatcggatatgtctgaaacaaatgattgagaccgctcaactgatggggccaaatacagaaaaattgttgcaaagaaacagatacaagttcttattaggacttaataagaatcttgacgaagttcaggccagaatattgggaatgaaacctcttcccaacattcgggaagtcttctctgaagttcgtcatgaggagagtagaaagaagttcatgatggggtctcaaaactaccaaccaactgctgaaagttctgctctggctgcacagggatcacaatttcagcgtactgacaattgacaaaggaggcaaggaagaccgtggtgcaatcactatagaaaactgggatgcaccaaggagacttgctggaaaatacatggcaaacctgtagattggaaaccatctcgtccttagaatgatagagagagtagagggaatcatgcctcagttgaagataattcagcaccctctgaatcaagtcccttcaacaaggaacaattggaactcctacaaaaaatgatcaatcaatcacaacagggtgtgacaacctccaattcattgggtccaaaaccttagctcaaaaagataattttcttaatgctttaaatgtgagaagagagaatccgagccatggattgtggactcgagcttcagaccatatgacaggaggtgcttcaagttttcataaattataacccatgttctgataactttactattcaaatagttgatggatctctctcaaaagttgttggtacaggttttgttgttatttcaaagaatctaactcttgattcagttcttcttgtcccaaatttagattgcaatctattgttagttggtaacactcatgaaaagatgtgttactaaatttttcccaaaccattgtgaatttcaggatttggatttggggaagatgattggcagtgttgagatgttttcgggactctatattctcaaggtcagtgataatcctgaagtacaaccccaaaaggcactttgtaaaaaacattctctttcaatttttagttcaaataacaatagtgttattatgctatggcactatcatctagatcatccaagttttatgtatctcaaaacagctttttccttcattattcaataaagattctaaagtgctctaatgtgagatttgtcaattattaaacatgtttttttttttttgataggaaacgacaacgggatatattgataaaaagaagttacaactagaaggatgagaaatcctcccaccaaagaaaaacaagactacaagaatcaaataaaagaaatacaactagagaataagcaaacggtctatttacacaccgctacccaatcaagttgtaacatgttaagaggaatccctttaaaaaccttagaacaaaaagcccatagagaagccaaaaaacaaatagaatcccaaagacaccctgaattccttgctttatcctcaaaaatccttgcatttctttcccgccacaccacccacattaacgcgatgcacgcgtcttgccccttaaacatgttcgcaattcttatccctttcaatcatataaatcatctcatcatttttctatgacccatttaaaaacgtgacaggttctagatggtttgtttcttttgtggatgatcatgctggaattatctggatatttcttatgaaggaaaaatctgaagtgggtcaaattttcaaaaattttaataacatgatttagacccaattccatacaaaaattcaagtgttgaaaactaacaatgttagagaatatttcaactccattatgggagatttcctcttaagcaaaggcatcgctcatcaaagttcttgcattgaaactccccaacaaaatgggattcctgagagaaaaaatagacaacttttagaagttgctaggtatataatgttctccaccaatgttccaaaatatttttggagagaacttgtacttactgcagcttatctcatcaatagaatgcattcttgtgtcctcaattttcaaacactatgtcaagtccttctcaaatcttatccaaatactcggcttctatccgttattctaccaaaagtgtttggttgttttgtgtttattcatattcaccaacaaaaccaagcaagctcgatcattgagcaatcaagtgtatacttcttgggtattcaccaaaccaggaaggctacaaatgttactccccaataaccagaaaattctataactccatggatgtaacatttttcgaaaatcagccttattatcccaaatatgatattcagggggagcatatcactcaagaatatcaattttgggaaacaaaaatcacaactagcaacattcaaacacttgagtctcatattccccagtaccatatccctcatagtctaagtcttccaatcaccgagtctttagacaccacagttgagccacctaggacttcttcaattcactcacaacctatcaagaacagtgagttcattgtctactcaaggaacaagactcaagaggaaacagagcaaagaacacttcccaagcaagttcatcaggctgaaccaaattcaaacccaagtgaaatttccccaggtagcactaattttaaccatgtccataatgagttaaaaaatgatgatcttaatctgcctattgtcaaaaggaaaggagtacgatcttgtacaaatcatctgatctataattctttatcttatatggtatgggatttgattcggttttattcttctctataggcttcttgtactgaagcttttagaggagttcctctaaatgttctacaactcaattggattggggtttgagtttcaaaagtttgaagattgatggggtttatctttgtttttagagttcaattgttgggagttttctccttttttcaatttgtgtaggaaggacctctcatccttcccttggtttttttctctttctcttgtttctttgtctctcctgtatttgttctatattaatataatcttcttcgtttctgttcaaaatataataataataattttttatcttatgatgggttgccacttgtttttcaggcctttgctactagccttgcagacgtttagattcctaaaaacatccaagaagctcttcaaggcttacaaacgtttagccttacagacatttagattcctcagaatgagacatgggaaattatggaattacctcaagggaaaaatccaattgggtgtaaatggatattcaccctaaagtacaaggcaaaagggagtgtggataggtttagggctcgtttggttgcaaagggaatcaccaaaaccaatgggattgactatcaagagacatttgctcctattgccaaacttaacactatccaagtgtcgttatcattgattgttaacctagattggtctctccatcaactagatgtcaaaatacatttctaaatggcaacttggaagaagaagtgtacatggaaatcccttcaggttttgaaacaaaatcaaatattgataaagtttgcaggttcaagaaatctttgtatggtctcaaacaatctccacacgcttggtttgacatatttacaaaagctgtaaaaaggtatggatactctcaatatcaatctgaccacacattgtttgttaaacattctcttaaggggaagatggccattatcattgtatatgtagatgatatcatcctaaccaaagatcatgagaaagaactttgcaaactcaagaattttcttactaaagagattgaaatcaaagatctgggaaatctcaaatacttcgttggaatggaaatcattaggttaaaaaagggtattgtagtctctcaacgaaagtatgtccttgatttactaaaagagacaaggatgcttggatgcaagcctgcagatacccccatagatcacacagtcaatttgggagctaaggaaggcagtgcccctatgcataaaggaagataccaacatcttatgggaaaactaacttacttgtcccatactagacctaagagtggtttctctattagtgtggcgattcaattcatgaatgatccaacaaaggaacacatggaagtcgtgtattgaatactaagatatcttaagatgacacctggcaagggcttatatttcaagaggataatgaaaaggaatattgaaatcttcttagatgcagactaggttggatcaataacagaccgaagatcaacttcaaagtattgcttatgtgtggggaaatttagttacttagcaaagcaagaaacaatccgttgtagcttagagcggtgcaaaggcagagtttagagctattgctcaaggaatttgtaaaggaatatggctaaaaaggttactagtggagctaaaaattcctttggaaaaaaacctatgaagatgttttgtgacaatcaagttgtcataagcattgctaagaaccctgttcaccatgactgaacgaaacatgtggagatagatcgtcatttcatcaaagagaagatataagaaggaataatcactctgatttgcactccaccaggtctctaaacaactaatgttctcactaaagcactttcaagatccaattttgaagacttgagttgcaagctaggtatgatcaatttttacaacctagctcggggggaagtgtggaatttcatttttcctatttcagtctttttgcacttagtttttacagctgtttattaccgttgtatttaactcttctttctttatttaataagatttgaggtagaatgttacccgattcctatctttcctatttttgttccttaaaataatgggagatttctctcctctacccaaaattctagttagctaatcttaggaagtctttctctaccatgtatgttaaatacctatataattttcattgagaaaaataagaagaaaaagaattttctctcaaaattcttccataatcaaatttaataaccatttatttcctatgcttttcctcctctttttcttctttttctcttcttctcaattttcacaggcgcacaagaggcaaaggctgagctagggctttgtttttggttttgtcggcttcaaaacgggtatttgggggctgcaattcaagaacaggtccaaaacaaagtcattttggccctatttttaaaatttgaaaaaaaaaaattaaaaggccaaaacaatgctgttttggaaacaatgaagccaaaaaaaaaaaaaagccctagtctttgcaactcagtcactaaagaagaagaacaagaccagaaaaagaagaccagaagaagaagaagcaggaggaggagaaggaaaagaagaagaaaaacaaaagaatgatggagaaggcacacctgtttgacgtgtcgcacctggccgaaggtaagcacctccatgaagaaaagaagacaaagaagaagaagaatgatgaaggcacacctgtttggggtgtcgcacctggccaaaggtaagcgccttacacccctaatcaacacctccatgaaggggcgacgcctggagtcaggagtcagagcatggcatcgcaccgcttggagccaaggcacacctttcacaactatgagtgagacaaaggcagttgtatgtaacttgtggagtcccttaagaagagtttggtgaggaggtgggaccaaagtttctaaaggcgaaagcgtaaggcgaggcgtttttgtgttcgtgaggcgaggcataagcctcgaggcgttaaggcgtaagctttttgagcctcacattatataattaattaatatttttaaatatataaaataaaatagcataaataaaaacatgaaaacaattcattagaatcataaaaaaaaaaaaaagcatactagttccctactttcacaaaaaaaccataacaaagtcataaaatagattctagattcaactatactaatagtttcaaactttaacaaaaagccaatttttgatccttaaaattggccaatgcctctttgcattctaatctagcatcttcactaactttgttgcatggtttcataccatgatgagttccggctaagtgatgcttgagtctattcacccctctcgtgcatctttgattgcaaaatttacatcttaaatattgctccccggcaacttcgataacatactcacacaaaatcttttcttgaatttttcgaatcggaggaactcattctaaaaaaaaaacaccaataacaatattcaaatttctatataacaatataattgactaaaaaataataagacataattgaaaggaatttaaaaatgaaatacaaaatttaattggtttaaatttaaaaaaaccaatattttttttagaggaatttaaaaattatacacataaattttaattggaatttaataatgaaataaagaaaatttgggtgaaaattaaaattaaaccagaaataaaaaaataattttaagcagccaatttaccgaaatatttagaaaataaaaatggatgaagggagcttactggcttagtggctgagactgagagcatggtcaaaattattggctaagagcttggccaaatgattgaaatatatatagttatatgcatatatattggatgaagaggcctttgattataaaaaaaaaaaaattgatgaagagggagaccagccgactaccaagagagagaccagcctctgtgccgagtctgtcgactgccatggaagatcgagaaaaccatggaagatggagaaaaagatgaagccaagagggggaagcatgggagacacgagttcgcgacatatctggagatgaacgagagggatcgccgccagagaagatgctctgcgattggtcgccgcctgaggttgagcactctgtcaccgcttcaggtagggttcccttttggagtttttctcccaatttttgttgccttcaatcgggactcgggttttgctttagggattagttagggttttttttttttatttccattcatgaccacatcagctcctacaaggcgtgcaccttcttctcggagcgtaaaaggcgcgatcaaagcgcgcctcagacacgcctcactggaaaaggcgtacgcctttcaggagttgcgttttattatttacgcgtcaaggcgtttttgccccacctcgccctaaggcgcgcctgagatacgcctttgaaaactttgggtgggacttccttattctccttagggcttatgattttgtctccacattaaacaaaccaaccttgtgtttgaaattgcaacatgaaacataattgcccaattcaattctcatggaaaatccaaatttccaaaaagaatcaaatgaaagaccatcaactttttgagtttattttttttttgataagtaaagcaagatatattaatgaaggggcaaagagttacaagtatacagggggtatacaaagcaacaaacccctcaaaaagccaaaaaaacagcaagcctcaccatcccttagttggacgccaaccattctaggaaccctataagggacatacgctccttaccaatatacaatctagcccagctccacaaactacacacaaaagaattcttaagcttttggatatctaactctcctcccctaaaagctagcctatttctttccttccaaaccgtccaaaaaatacacaacggaatggatttccatatctttttccttttctttcccacaaaagggcccctccagctagttaaaacctcctttacagtttctggaaagacccactgcacacctgataacccaagaacaatatcccacagaactctgactactatacaatgaataagaatgtgatttacagtttcttcttcacaaccacatagaaaacaacaattaggaagctgtcatcctcttttctgaagtctatcaagagtgagcaccctcccccaagtagcctcccaagcatagaatgcaaccttagttggaactgaatccacccaaatgcatctagaaggaaaaacaatatcattaggtctggtcaccaatctataggcttctttcaccctaaatttaccattccttcctcccttccaacagactgaatcttcctccatagaaggcttgtaatccctcaaaacatgcagcaagttccctatcatatccagctcccaatcattaaagtccctcaaaaatcttagattccaccccccttggccaaaattctgatcccacatctcctccacagtcgcattcctatgcgaagccatagcatataggtgggggaagtttatcaactttttgagtttataaacgtaacagaacggactgattccatttcattgggaaaccaaactacgcttaacaaatccaatgactaaactaaaattggttcaccagtttgaaaatatctgtgatgcaggagactgccttgcccctgaattcccatttcataagaaatagatgttgtacaatctgatgaatagttgtaaccctccatacttcttggataattagcttctcctcatgagtttgtgatactaaagctcctagttgcccatgtgcttgcaaattgaaaagaaagcaaaagagttcaagttccaggtgcatggtattggattctatctcatctaataggcacctttcccataaaaataatgaagctaaacagcatgtaaaagaagagaaatactacacaatatcacaaatatgacacactaactagcagttctcagaattgcagagatagaaacttaggcttaagcatttcaacaacatgcagtttgcaattcagaaactaaaaagagttaccattgttccatcaacaatgattttcgttcagaacccaccaatcaactccagcaaaaccacaattcaattattcgactcgtaggcatgagccctgcaaaagcaagcttcttaaaaaaataagtacacaaaatctattcagtctacctttaaaaaggtcaagatagaaaacagctctatatcattatccaaagaaaacccaaaagtcaaaacctttagataaatatttgcatgctccacttgtctcatgcagaacccaaacatcccatcaagtggattgtgatgtcctggatatttcagcccaaatgaaaaatcatgattgctgtgactcacattcacttgaatagctccatcaagaatttgtacagaaagcaaaggaaagagtaggttatataaagtgaacaaagagaactaaaactgatattaatgtttcccacaactttaggcagatagtttcagcccagcccatgttgagcagagccccttaaaaataaaggtaatcaagaagatacacctcaccatgagatctaagaacctgactacaactcaagcaagttataagttgtcaaattcaaacccttttcatacatgatacatggtacagtggaaaagattggcctcacacaggatcaaaaagggagtttttatttcccagcatccaaccagagtcatggacctataaacactccaattggcatgcaatgacatgagtatgataaatagaaatgctgactttcagacactctttcaaaagtttccagcatcaatctccttaggtggtacatcaatgcttgagcacaagaacaccaaaaacatactgcactcaggtatgatgcctaaagagagtcaagaacaaggagatcaaatttttactgattaaagggcttcctagatgggattcattatatgagtaaatctttatatgataacaaaatcaaatggaatacatctctttttcctggtaaaattttacctcacctctactctactccactaaatctttgccgagaatctgccatctttgaatgcagaataaaaggactagaacctcaccctctgtccagtggttaccatctccattgaactatgaaagagtttccaaccagagccatttaccaaacaacacctattaatcacacagaatttttttttcttgataatacaatagtctttaagacagcataatggttgacagtaaaacaaagggggaaaagtaacaaagaaattagaagtagacatgcaccaatgaactaaatgaacaaaagggagcacaaatggttactctatctccaatgaactatgaaagagtttccaaccagagccatttaccaaacaacacctattaatcatgtggaatttttttcttgataatacaatagtctttaacacagcaaagaaaataatggttgacggtaaaacaaagggggcaaagtaacaaagaaaatagaagtagatatgcacaaatgaactaaatgatcttataataagaacatgaaaatatattgaattcatatgtaacaatcaaagataaagttctggcacatcaattattcaaccataacatgtttcaacagaaagctccattttcgttccctatcaacacaaactacatcattcttcaagatacccaaaaggtcattatatatcaaacaaccttgttgtgcagaggctccaactccacaataacaaatcatcaagattctaacaagcaatggctttcacatggcatattgtgatgacaccctagcagccatactagcaacctgagcttgcatctgtgcagccctgagttttgcacacatagcccggtggaagaactgctcacgagacaacaatctcacattcttcaagtattgatcaaatgatattgatccctcttgcacagccttatctaaggcataaattgtgtcctctatagacaagtcggaggaagtgcagtcaagcatctgcttggaaagagcatcacaaggctcaaatgcattatctacatcaagatttcccatattacccaacttaacctcattctccctcaaccatgcctcaagaacatcagcattcatcaaaaccatctgcaactgctgctccagcccctccttctcatcctgcaattcctttacacccctcgatagctgctcctccctttgcctcaacaccccctgcgccccgaacatcccttccatctccgcctcgcttgtcttcctcaataccccaacatcagcatgcagcgattcaactagcttattaacagcatttcgccgaaaaacctcgttagggtcctccgtgtgccgctgtgggg

SEQ ID NO: 13775 - DNA, 5375 bp, Vitis vinifera
  Intron number 3 from transcript GSVIVT01013934001 (locus G SVIVG01013934001) derived from phytozome v7.0 (chr-ID chr1 6; pos 7015317 to 7020691 reverse strand)
gacttccatccggaaaagggagagagaaagcgaaagtgaagagagggaacaaccggagataaaggttttaaagcaagaagaagcctcaccggattctgacagccccgtggtggcagaggcggctaatgttttggaggcgagtccgctaacgccgtcaagttggaggaccgtttgggaggagagagacatggatggggcattccatttgcctccgttaaccccgttatcaccccatccttggattggatattctcggctcataagttgaagggccttagaagaaagtcaagcgttatggttaatttggttattctttaattccctagtattcaatttattgattcgtttattcataatgtttgataagcaataagcatgatttcctttaaggatatttttatcttttatattttatattcttattattaattatgcaaaagttgaggaccttaaatcaatgctttaactaatttttagtgtgaattacgtaatttcataaatcattgtttcaataattcattaagagagtattgccatgtgtccatatgcgtggaacataaaagtggaagaacctgaatagaggaaaagctaatgtcaaatatcataaggtttggtccgtttgttgtcatgccatatttgtggatgtagcaacattcgtgtacttgtatgacatgactaatgtccagattgccatctgtccatgcttgtgctatcatccgcatgatgagacaagatgtgtatgagtatatcgactcatgttaccatgtctccactcaacatttgatttactcgggttaatttcaaccattactgacgcgtaacttgcccaagttttgtgtggatgggagtgtgcgagatggagaagggaacttatttcatgctctcaaacccccataagtgagacgtcttcttgaaagatctcaccaatggcacattgagtcacaatatagccataagagagctatccattgctcttgatgcaatgacatctacacaattggtctaaatgtaataatcagttgttgtgagatgctttcttttgtgcttttaatgttttcatttgttgtttatttcccgtttattccatcccatggtatatggtggtagtgatgttgttttaggtacttacgtattgttgagttttggggtaaatgttccaagttatttaggtaaatggttggaaattaatgatcttctttgtttttatcatcccattgcaaacttaccacctcatgttattagattcacatctggtcacatcttgtcaatatgtgattgcaaatttgaataagattcacatactgcatgtgataacgaattgaatatattcattctgaacaccttgcatgacagcaaaataggaagacatactgtaggtgaagtacactttgatatagaaaaaataataagtatatttttcaattacctattcattaaaagcgatggatcactagaacaccactattgatgtgaaaattgacttcacaattacagttttattacccacacgtatctttattcaaaatttcatataggtgttgtactttttgtttgtattgcaagtaggtcctcaaaccaatattacaagtaggctttccaaccaatcttcaaagtatataaatggtataacctttaaacactattgtttggatctatgcatcatgtaaacgacctcgatttgtaatgtatatcaaccatattggttaggtatgttttaaggcaacaattctatatttcttattttaaattaaatttgtctattaatgttttaagaaaatatggaaaaaagactcatgcatagatggtgttttgtttgcatcagtattaacaaatacagttgcaattgtgtgtatgaggagccatatatggcaaacgaatacaagttctatgttgtttttgttgggaggagatgaggtgtgtacagaacttggcttgaaagccaaactcaaattattggttacaagggtaatgtttagaaatcataaaaaaaacacatcatgaggttgtatcggcctgggtaatgtatgagcctcggtggaaaaaaacctaaaacacctattgaatcgtctaggtttgaaaaggttaatcaagatattaagaaactagtagaagactaagaattaaaaaagatcaaagatcggaaatcacatttcattacttcttttgcattgggatgtgttgtaacattcataatcatattttctgttcaaaagttcttttagttatgctcaatcgtggtacgattaagttagacgttgcatttgttgttgtttttcatcaagactagtcatcttgaagttgttattacgtatcttccatgcaatggtaccctggttattcccctttcataacttattcaaatgtacaaacaaataacattgctaaaacaatgaaaaacaaaacatggagtcacaaattttggatgatgaaatttaaaaataagagtcaagccaattttcaaaatcctttaaaatccttcacgataggtacctttgtacacccttgtacatttaacacatttaacttgtacacttagtgtaaataccttgtacacttgcacaaattctatagacgtataatgaaatttgtgcatatggttgagttaaccatgtttccattgtcatggttcggggaaaaggtagaaaattgaacccaatttagattcctattcatcattagtgaggtagtttattgaatgaatatgtacaagttcaaataaatctatgggatgagtatgtgatcaaacaatgtgtgtgaggaatgtgccccatccttggaaaagggaaatgatcgagcgagttttcaaaatcctttgaaatccttcaagataggtacccttgtacacctcacacattttccgtgtacacttagtgtaaatgtcttgtataatggtagaaattcaacagaggtaaaactaaatgtgtgcatataagtgggttaaccatgtttccattatcatggatcaaggtaaaaaaggaaaaattgaacccaatattagttcctattcatcattagtggggtatgtaatcgactgaacatgtacgagataaataaaatgcatgagatgagtgcgtgatcaagtaatgtgtgtgaggaatgtcccctatccttggaaaagggaaatgagagaatgagtttttcaaaatcatttgaaatctttcaaggaagttagtcttgtacatccttgtacagttagtacatttaccctgtacacttgcacaaattccatagacctttaatgcaatgtgggcatatgggtgggttaaccatgtttccattgtcatggctcaggaaaaagaataaaaacaaaattgaacccaaatatatgttcctatccatcattaatggggtaggtaatggaatgaacatatatgaggtcaaaaaaatgcatgagatgagtatgtgatcaaacaatgtgtgtgaggaatattcctcatcattttagagaactatcccatgatttgtgtattttgtttcttactatggtaaatgatggaatatatggaccaattgggagaatgttagattttcctaaacgaaatttgacctataatattccatcaattctgggaacaatgttacactttcctaaatggctcctgattgtcataaatatagctcttgtggttaggcccctaagcctccaatctctattcggacatatatacactattgatttaagattgattaagagtttagaacacctcaacccatctaaatatcaaatttgattttcggattcccaaaccatcaatggttggaggtatgttttggttcttcctttgtttgcatttgatatgtattattaaggttttgagcatgattacattagtaatatatgctttttgagcatgtttagattgattttagcacttacaagatgtatattgtatattatgtccaaacatccttcctccccaactacaaaaagaaatcgaaggaatgagaaaaactaataatgtaattaaaagtttttatttacgtaagatatagttaaaataaggtatgaactcatgatacacataattttttattaaaaaaattgtaatatatatgtttaaacttaggtaatatttaaaaaagaaaaggtcttattataaaatttcaaattgtgccacaaacatatttggataagaaaattgccgatcttaatttatgtagaataaagtctaataagaagtgaaaagtactgataatatttttatttttaccatcatttttatcactttggatagataataaataataattagcaaacaataaaatttatacaagtaaatagaaataacttttcattatattttattctcacattccatataaacatgttactaaaatagtattagtgataaaatagtggtgaatgtgacatagtccataagaaaatggtttatttgtttaatttctattggaggaatggcatacacgtaagaagaaatgtcctagaaacaactcaactatgtctgatggagcctccacaagtaaagcacatacagacaaaccccacccagtttctcgactccacaattattgaattgaagattcttccctctgacccagaaacctcgaccgaaacctcgtctttccatatctgtttttctacgacattctcttgtgcatatagaactccaccacactcactcctcttcactacttccagctctctctctctctcactgggatttatctccaacatggcagataaagtttcatcatttcaactcgtccaccagcaactcctctccgactttgaatgtgtggaaaccatcgtttctgatgtaggtgaagcatcgcaagcttcaacttctgaatcaagcgtttccacctcacatattgttcaagtctctgattacttgaaacccaatgaacatgaaaataactcttttttcctccaccgctctacctctgctccatctggggtcttccagtttgaaaccaaatcccaaaaaacttccacattaagtcaacggcgacccccactcagcatctcagttcctccgccacccacttctcagccctcatcggcgccagttgccggcgagatcaggcactatagaggggtcaggcgaaggccatgggggaaattcgcggcggagattcgggactcaaatcggagaggatcgagggtatggctggggaccttcgagacacccattgaagccgccagggcttatgatcgagcagctttcaagatgcgtggttccaaagctattctcaatttcccccttgaagcagggaattggtcgggttctgacccaccggccacatccggccgtaaaagggagagagattgtgagaccgaagtgagagaacaggtggagataaaggttttaaagcaagaagaagtggagtttccgaaatctgacagcacagcg

SEQ ID NO: 13776 - DNA, 644 bp, Vitis vinifera
  Intron number 6 from transcript GSVIVT01025160001 (locus G SVIVG01025160001) derived from phytozome v7.0 (chr-ID chr6 ; pos 3867342 to 3867985)
gacggtgagtttttttttcctcgtttggtacattaattttgtttttattctttattttttgtgaatgaaaatgatttcagtgattccatttctagtatttgaaataacctaaaaattcaatattggaatgattatttgttctcattctaatatttggtaataataggaatgagaatgaaaaagaaataaattgataataatatccttacatatggtttaaaataaaatttttatttttattaaaaaaaataagtttaagagttttttttattactaaataataaaacaaaaaaatagtcttgttatgggatgaaaagacatcgggcttaatgaatgaaatttaagtacaaaataataattttatattttttttatgggataaatgaatcaaaataccatctatttactatgaagtgacacttcacttataagtagaatttgatttctaccaaaatcatattttttatttcattcttatcttcataaaatttatccaaacatgagaacgaagaagggaatgaatgaaatgtttattctcacttttcattcctacgtaccaaacaccccttaattcatagacactacagccttaattctttgtattttatattcaaattttgatgtctagttgccatgttgcagaa

SEQ ID NO: 13777 - DNA, 12474 bp, Vitis vinifera
  Intron number 13 from transcript GSVIVT01019950001 (locus GSVIVG01019950001) derived from phytozome v7.0 (chr-ID chr 1; pos 12487416 to 12499889)
tggagaactgccagaattggaaccgtttccttgaggtaatccttttctttctagtgcttaaacttcttcattctgttggaaatgtaagctcaatcaaatggatcttatggatgcattacccccttattatagcattggtatgagatatggtcatggttccttcatggttgcactcacggacttctatgtatctctttttttgctttcctagttgattattgtaattgtgcattatcatcctttatttcattcttgcttttatagtttcttatcattattgtcctgattgacatgtatgaatctttttgctttaataattgtctgtctctaactttctttagtgattgactgatcaataatttctatttacatctgacctatgattgtcatgaagtgatactgattgaatgctcatgtcattgaatttgtaagaattctgaagaattaaggatggagtgctctagcaggttcactgatttatttgagtctcatcttattttccttcttgatcagctttttgctgtttcttactcattgtttcacatttctattcttgcctcctcttatcttcctcttgattttccctagtttctcttttcatcagttgtttctgcaccatcttttatgtgcttttttttttttttttcctttcaatttgcattctcctgttctcagggttcattaactccatctacctgtaaactatttagtggcattgaactttaatcatatacattagtcattcttttatccatgcatggttaatgcaaattatatgggttcatggaaaactcttgaaaactctataacatttgcttactctagtctttgctttatttatattgttgttttattagtgatttcaatgtcccttttactgcctttttaaattgtcatcagacaattttagggcaatttttcagtgttgatcatgtggaaattccttctctaactatattttttccattaattcaattcaattcaatgatgtcttaatattattattcaaagatgcagttgggttccatttggaaatgtagcgcatgaagacttcaaatcttatattccatctcacagtttgcaaggagttcaatgtttgatcacttcacataacacagcttttgactattggtgcccaatcatatcattcctccttccaaggaaaagtgcaccttaactcttttatgttcttataaaataaaagactcttaatatgttcctcgtaaaatgagttcactgtgaactttccatcactagtatcaatccatcttatgctattcaaccaccaaacacctcattcccctgcttgctgtgaaggtggcactgattcattcaccatccctagtttcctgtcttgaaatgtttaatgaagcttgaaccctaaagaatgaccatccctcatttttcccttgtactctgccaccctttcctcctttccacagaatgaatgtttagatgcactttctttagaaattttgctcacatcaaaggcccagtggaaacccaacttgattcacactgtgagtggaaaagaagatgtgctcatcagaactttggcaaccttttctagagcctttccataaacttacccctaagggcatcacacatgtagcatggtcactggacatcacatgacacaattatgatgctgtgtgggaaaattctgaaagagtaatacgccacgagggcagaaaataaacaagtatgtgttcttttatgtaaaactatgtaaaatgacatatatataagtttaattaacttttctgaaaaactatgtaaaatgacatatatataagtttaattaacttttctaaattttcatagcaacattgtagagctttgatgatgcatcttgagaaatttgatgcatataactattttaaataatatttgtgatactcatttgttatcatcataatttttcttcaaaatcatgttatttttgaaaaagtgtgttggctatgcttacaatgtgaaaaaattattttaatattttgtgttcaacatgtgcccaaaagtgtaaggagtgtcttgttcaacatggacacaactcctctttgaaagtgtttactacacagactcatatttcctttgagatctatatcctcttgtccttcctctatttccattacctttcaccacaatttaccattctccaccacaaatctctgaaggctttttattcaacaaggctttgttggacaatcccaaccttcttaaacatttatccttttatttggctagcaaaccaacttaagtcctatgagatggtaaaggcacttatttaataaggcctcgttgaacaaccctaaccttctaaaatatttaacctcttatcctctttggcttgcaaatcaacttccatcctaccaaatggattttttaattggtactcattttgtattatcttgtcatatttgcccaagagatccggcccaagtagtaaggggttaagggtagggcgggggaaggctccaagttcaagtctcaatgggtacaaagaaaaagttacctatctccaaaaaaaataggtacaaagaaaaagttacgtatctccaaaaagaagaagaggaagaagaagaagatacaggttcctaacacttgttgataacagggtcctaacatttgttctcatttaccttggcattctaatcttgggtgcattgtttatttataacattattaggggcaccttagttgtcctcataacgggttcctaacatttgttgataaacatttgttctcatttaccttgacattctaatcttaggtggattgtttatttataacattattagggacacctcagatgttctcgtgagccttttcaaatgttggattgtctattattatgctttgtacaacacttcccatttgattgaagctttcctttattttgcttggaatttaactctcataacacctcttgacaggttcatcatgtttatgttcctatagattgaaaacttcaaactttgtttcatatttttaaaatattttctgattaattttgtttttattcattggatacctatatcttcagtaattctataggaattatccactccaattctcaattccacattctcattcaccacttttctacatgttatgaaattagaccaacatagtggcatggtacaatgactttaacactataattatctaggcatgtttacattttttgctaattttttctctggatgttttgtttttaaaatccaatgaacctctcataccttggagagttgatagatagatctgtagtttgaaaatgtattggggtgtttttgtcattggattggaaataagcactcttttggagttctgcttgtaggctgaaggtatactttcagagaacagtttttgtgtcgagtccccaagctcaagaacttcagtctgttaaacccaagggaaatgagtttagaacaacttttgctttcaaaatttcaaaccaaccctgtgtatacaattgaatttgggtgaagtggagagtgatcaaagcaaagcccactccaaattggagctcaatcaagttttatctgtcccttacactcaccttgttgctatctaacaagaccaagaatcagttgcaaagtctgtgagtcctgttggtctagagacaattcaagattactcatccttgttaatccatctcaaggtacactatgcagaggctcactaagtgcagcaccacccttcttaccactagtactcagccttaaggcttttccaagtagacaagaatgcgataatggcggagctcacacaaccatcgctctactgttctcaagctcggaccccaactccagcaatcaagaattgttgccctgaagccttcattattgctcatttagagctcaagcctgtggcttcctttacctcaattagatgctctctctcatctcttttcatggaaaaggaagatcatgcacaacaataaattcaaagccaatacttcctggaattttttctctcaacactagtggtcactctcacttcacactcttccatgctcaattatttcaactattgtattgctttttctttctccatctcagttgctggtgctctggtttatacagagggggaaagtcaaccttgccattggttgaaaggatggatgggacttctcatcccaagatagttgacctatcactctatggcagcaggggaagtatggagtcttctcaagacagttggaaaatcctcttttgtccttggcagaggatgggacatttcagaaacctttttcagctgggttgcttgggagtgaaggcctggtgcaccttggggaggcaagcttggccttcttttctcatttcaggagcaatttgctcggttggaagcattggcccaagcaagcaaatcgggtgggcgtaggcaatcccagtgagtgaagggaaataaccttcccaagttcatttaggtaactaagtggctgtggttgtctcaagcattgccctccattgtgattttgctcagggtaccctaactaacctaggtgactgtagaaggacttggcttgagtgaaatctgtatatgcttggccaatggctatgtgtgctcaagaaacagtgatgtgcacttaagtgaaagtgatatcccctcttgagtgaagtctgtttgttccttgaatgaaagcgaaagggatgtttgcttgagcaaagtcattgaccacagtttcccctttcttttcttaacccaaaatttgcttgggggaacttcaagcaagatgccttgcacattcttgttccttgctttgctttcatcaagacttgcccgcttttcctggagtaagtagtaagcaatctttacttcctaattcagcacatctacactcaaattccatttgatatctggaaaagggtcttaagctaaaagtccagctgctggacagtgatggcactcaagaaccagcagattggggcctttttggtgtctttgagatgcaaatcacatcccctcgccaactcttagttggtcctgagggtaagtaaagtgagaatgttgtcatgccatatggtgtaatactgaattgctttttcatgtcccatcacttgttgaaaggaaattggtcatacttcactaggtttgttgtcacctttttttcccttttaccaactctttcctactcatccttgcatgtcatcttgttagactcccagaatagcggttgatttaccataggatttagttttgggaagcacttcctttgagtggagccatcgtattttctgtttctctttttgcctttttttttctttttctttttctttttctttttctttttctttttctttttttctcttttctcctttttttttttagtgagggctgaatgtttcaggcttacaacttataccttagtgtcatataacaagaattactaataactcttggtcaattggctcatgaaattaggtatgcaaggacctgtcagaggtcaccccttaggcttcacctcgaactttagcagaggcctataataccagctaagaaggtagtcctttgttggctcatgtagtgagctgggtaacgggtagctcccagccagtcggctcagggtaccaggctttcaaggacctttttaagatcacccttctggttattgttcaggcccccttggttaagactccctctttggacacattttgtttctcacatttcttgtttctgtttttatcttttacacttttttcttcttatttactcttctctttttttcctttttctttttcttttcagatatttatttctccaatggaatacttccttttatttattcagccttaggtgggccttcctttactctgagggtctagggagacagtgcgtgtactagtgtgagtaggagttgagtgttaaaaattgttttgccatttgccctccttgttgaaaagtctttagaatgcttctcagccatcacaaggaaatgttaattcaattgacctggaagcacaattctggtgagagcttttcatcatgcccagtgaggttgaagtcctttaccaattagctaatctggatttgcaaattatcatagattattcattagtagaatggaaagaattacccccctccccccttcctttaagatatggttcgtgctggtgttactcaaatagttcagaattgaagacaacatatggacttaattttcattgtgtaagttcattacagtgcaggtttttcaaaaattggtaaagggtaggggtagagcatttaccccaagcatttggttcttcatctgcactactgccagtatctgtgtctgcagtggggtctagtggggatgtgacattacaggtatagggaaatcccatggtctgcatttgatgggccattcattgctctgcacattttcgttaagtgttactaagcagcaaatttctttgtgccaaacccttcatcacccatccaagtctgctcctcattctcacaaattgggtggttccggtttatgagaagctgtgtgattagtttaggaaagggtagatggagacgcttgcttcttcttgatgcctttctgcggaggcggtcatgaaagcttcaaaaatgacctcaggcatgtagaaatattctcctttgctgaagtggtggagcaggcataggcaggtcccttttcttttaatctatgggtcatattgacggaaatttagagttagtgtcagattttggagccttggatgatgaggaagttcagaatccatgatataccttcactttgactcccagcctttgtgttactagggtgaaagatcatgtaccactatgcacatgttgtaatcgtggggtggtgggtgttcttgaagcattggcatgatagggatagggaattttgagggctgaggcaatggcttcaattgtcaattcatattggaactattccacagtggtcataaatttaatttcatccctagaatagataatcacaatgtcttgatagtatgtcttcactaaccttggcagagcaatatcagggagttgcaacactaatttactagagtaactgatcagttgggccataccctcaagctcatctccattaggagtcccctttcctgatattctggatagtcgttaatggctctggggtttttggatgtacctcttcatcagtcagtgggttggtcttccatacaatgatgcatctgagctatgagatctatcagaagagagggcaatggggtggacactggacccattgggtacagtttttaatcttttccacattgtgtttctaggtctgcctgccttagccttctttcagttgggatgatcctttcagataaggggagacgggggcaatctatggtacaactcttcctgagcttggttttgtatggaagctacatccagctcaggcagaagtgatagtgctgcgtttgtcaaattttcttcattccaacagtgtgaggggctcatgacaacaagctccatacctgtggccccaactgcagcttgagtaacagtatctttatgtcatttgcttctatttcaactgcaatgcttgctcctgggccttagcagttgagtcccttgccacctgtgcttgctcatttcattttaactcatttaattcagtcacctcatctggctactgtggatcctctgatcctgattgggatattgctgttgtttcttctgtttctgctctgtgctctaagtgagggcttcagtggctttcatagctttgatttctttcaattagagagtttgcttactcctggcctggagtggggttgtctgctctcgatgggtatcaactttgtctctggtagccatggtccttcttgattctcctgggtgacagtcgcccaggcgttcctcagggctgccttatcgtgcatttcttttacaacctttgcccactggagcctcatggcttgcagttgctcctgttcttctgcttggatgagcattattggaccactgcagcccagttgctctgtgtttgccttgttaattcaaagtctttgcctgtgggtgcattggtggagttaggcactgatcccttcccttgtcttgcctctgggtccaatgtttgtgtagctgcctcaccagtgctgtcaggaattatgcctcactgtgtactactgccattgtgttagcctttcgattgtcttgctcaattggattagatggggtttccatagtttcatccttattttcttcattttggccttttgctagtactggttctggcatgtattcattttgggttggctgcttgttgctttgccctttggggattattctggcttctcttagagctcaattggccttgtctcactgcccaagggtgcttcaaattctccccaggtgtcaggatcaaagtcataaactctgttatcatcatcagcagcaggcagagctggtggtgcagggctgtgccattagatcatcaaatgatcgtttgcaattggctattgaatttgctgtgcattcttgcagcaccacttcctgagtagtgttgtaatcttgcagctcccgtctcatagccttcacctcccccttctactgaggccacttttcttgtttgcatgagcaagatgccctttaatgtcatttgactgctgaggaggaactggtggcactcttgatggggtgactgctggttcttcctcaagttctgccgtttgctcatggggttcagttactggaatgggctgtacaatttcaggtgttgcttctgacaggacaccttcagtacagatgggcttctgttgtgtcatgtgaggcatttctgcaggctggactggtgctgctgggccaagctcttttgcttccgtgttcctcctcctggttttcctcttgggccttgcccctcttcttctgttgggttttggtcatttttctctcttccttgtctggctgtgtagagttatagctgatagtccactgagcaaccccatatttttctaccactgttatttctctcctcttcatcttcaatgggttggttctgttgtcccaagtaatgggatatgagcctagtatacatcaacttcactttaagactcttctcagtacaaagaacctttcagccatggtgacattactctagattttgtagcatcatatggggggcacacaggtccctgaagaagcttctaggggatctcacttaaacaatctgcattcctaatgatggtccgtgggggcataaattgaaatggaagatcaaatcagccagccaatatgattcctccaaccaaccttgtacaaggtacttctttgtctttcctttgctggatagtttctccagaatttcatcataagggggctcattggctctgcccgtccagggccttcttttgcttggaggattgtgtttgtggcagcggccagagttcttgcgttccaacaatagtccctcccatcaattgaaaagtggacctctaggattcctgattctcctttttgacctacaaggtgcggtagaaagctctgactttttctgcaatgtattgatcccttgcttgaggcaatgctctatccttttttggcaggttggttcagccataaattcaatcacatcaattgttttttctaagattttcttctagtgaagtgtattccttgcccactggcatgtgctattcagggagttcaggtgcaggtgggggaggctcagctacttgacactttccccactttctggatggctcttgggaggctgggccttgcctaaaccttttcattctaatcatttccctgcaataagggaggaacttatttagttgctaatcaggcattaatcaaacatctacaagtctaatcttttggagcagaacaacaattctgagttgtgatgatgttacatcctaatccaaatggtgaacctaacaaagatacttggatgtggaaatggttgctggattgaagatcaatagcactctttgcttggaagggctttctagcaagatcctctcaaaaggatgaagttgaataacctctaatttgagtgcctagttttaagtatagcattagggtttcatttgggtgaaccttgcttactcgagcaaagtctagttgtgcatggtctcctagtccaggaaagcatgtgttcactcaggtgaactcaggatgcttactaaattcacccaactggagttgatcttgttgagcgaaactctctcgttcaaggttgcttatgttctcttgccaagcaaactgccatttattcttccctctttgatgtgtgtttatttatgtaaaatgcaaccctaagagagtcgattatctcatggcaagtgaaggatcctcctacttgttcctgaggttctcaagcaaaggtttcaatctttgaccattcaccttaaatgcctctccagtctttggatttttgacttctattgctccacacgaggacattgtttggacaatgtatggtttcatccatctagttcgtagctttccaaggaacatgcggagacgggagttgaacaagagcactttctgtccagaaaggttctttgcaaaattgctttgtcatgcatggccttgatgctttccttgtaaagctttgtactctcaaatgcttcatttcttatctcttcaagttcattcaactactgtttcctcccaataccggcctattggttatacatattcaatttcttgacagcccaataggccttgtgctcaacttccataggtaggtagcaagctttaccatataccaaacaataaggtgacattgttaaggatgttttgaagtagtacgataggtccataactcatcagttagaggtcagattcatgccttcttttgccttaactaggggctctttctcatctattttcaagaaacaagaagacaatgcattacaacaaattcaaagcccacacttcctgcaattttgtctctccacactagcactcactctcacttcacactcttcccctctcaattctttccatcgatgtattgccttttctgtctctctttgtctctgtgtttagttctttgcttggggaaagagtcaaccttccctatggctgaaaggatggatgggatttcccattccaggacggtcaacctgtcatgactatggcagcaaaggaagaatggagtcttctcaaggtagctggaaaatccgcttttgtccttggataaagaaggtacctttcattaaacctttttaagctggggtttcttgggagggaaggtcttggggtggtgagtgtggccttattttctcaagttgggcatagtttgcaaacatggaagcactggtcttggtgtttgaattgggtaggtgtaggtcatcccagtgggtgaagctgccaagggaagtaaccttcctgagtttgctgtggcgaaattggttagtgggcgaaccacgtgggcgtggttgccttgtgcattaccctggtgcaaactaagtgggcgtggttgccttgtgcattaccctggtgcaaactaagtgggcatggttgtcttgagcattgccctccattgcaatttcgcttagggtagcctaacctaggtgagcatggtaggacttctcttgggtgaaattcatatttgcttaggaagtggctatgtgtactcaagcaagagcgatgtctgcttgggcaagttctgcttgttcaatggctatgccacctatgcccaggtgaagcttgagtgacgtcattgggcgcagttgcccattctgttctgaaccagaagtttgctcggacgaacttgactgcagggatactatgctcaaacgaaatgccttgcacctccttgttccttgctttgcttttgttaaggcattttgcttcctcttcctagactaagtagtaagaaattttacttcctgattcgtcatatccccacgtaaattccattagatatctttggaggggtcttaagctaaaagtctagctacaggatcatgatggcactcaagaactgatggtttggaggttcccacatcctttttttggtgtttctgagatgcacattaacttcatccaggattgctttgaaaatttgggatttttggttgagagttgagtggatgacaacttcttatgatcttcattctttgtttcatattgatattgatcttcttcacttcatggatgtaggcacactgtggaaccacataaattcttgtatggttgctcgtttgtttctttattgccatgctttatcacattgtcattgcagcccgcccaatggtaacattgtaaatgaatccaagcttttctaatttgaattgcatatctactaaaaataggatttacacaatatcaagttagttatatgcatttatactagataggcatgtatcacatgagcacacagttgtcttcttaagcttgtagggttgctccactgttgtatttgaaaaagaaattatctttgattttttgcacacattttgtgatgtgcattagttatcatcctttgctggcattttgtgatgtcaagaagctaattgacctttatttgtctattgcagatacact

SEQ ID NO: 13778 - DNA, 4966 bp, Vitis vinifera
  Intron number 1 from transcript GSVIVT01034904001 (locus G SVIVG01034904001) derived from phytozome v7.0 (chr-ID chr1 8; pos 16288490 to 16293455 reverse strand)
gggtgtaagaagctttttataggcttcacaatatgaactctcattactcatcttaaagatgagtaaattgagttcataaataaccatcaatatggttattcaccactttatttacaacattattattagtattattattattattatcatcatcatcctcatcatccttgatattatgtttcccatttttaaaaaacttattcataaggtgtctattttttttagatcaaattaatagtaatttaatccactaatttttttttatacagaggtggtttatactttggacccattattggaaaaagaaaaaaaaaatcttatgatttctttttcataaaaaaaatataaaataaataaaaattgttgtacatccattatgattaaaacaaacaaaaaaaaaatattatcaaagaaagtaacagatcacgttatttttattcttgttgtctcccgataagctcaaaaaaaatttaaaatactactattttaatcaaaattttctgaacttttttaataccgacatatttttccgactaacactcgattttatgcatccaagtgtgttggctttatctaaaattgatggggaaaaggacagaaaagttttgacatttgcaattcaaagcccctggcatcatagcaatttgcgaattcaaccatttcaaaattaattttaaatcataatgagaagtggattattggcggactgccaaaaaccacgtgacacaaaagaacaaataaaaagtaagccaatggaaacataaaattatttttgggcccttgtctttggtcccggtttgatgtttcgattcctcgtgattttcaaccgtctgatcaagatatgaatcgtccgtccctgggccacacgaagaatccgaaaatggattagaacaacgaaacggcgtcgttgtcccgtaccaaccaggaacttccacgtaagctagtgacatgagtttgaatcttcgcaaaaccaattagtatctctatgactgtatgagatatttgttgcctgtggatgattcaaccacgtggaacactcaattttgacatgtggacacgtcagggttaaatgattggtgatatttgaagacgtgtcgcccaaagacttctaggagtttcgttgacgggtcacacgtaaaaatatctatttatgagaaggctaataccatctttacgaatgtgttttccttttactttgtaccgtgaagcggcaaaaagaaaattaaaatatgagaatggaggctgtgaatgtttttttttttttaaaaaaaaataatcctggaaaaagatttgtttaggaatagttttaaaaatagtttgttttgatattttttagaatatgagtgcaaatttgagaccaatttcctaaatgttttcaaaaataatttataaaatattattttagaattgttatttaatattttataaaataaaattaatgtttttgaaaataattttataaaaataatattttaaaataatttttgaaaattattatttagtgttttataaagtaaaagctctacgaaaatataaaatatttttaatctactttttatatatattattttagttttattaattcttcgtgtttacataattattttaaaaaaaataatcatgaaaaaataagtgaaaataaatatgtcacctagaaatgtcatttttttttaagaatataattttatttttatttttttgttattaaaaatattttttccttaaaaatgaaaactattttaaaaatcatttatcaaacaagatcaaggtcatgtgttttttgaaatttatttttaaaaactatattttattttttaacttaaaaacaatttttaaaactaaatttaaaaaaatatgatcaaatatactcaggtttttaacctgaaaaaaaccgacagctcatacttattttttagaaattattatctatttcactttaattttaaaaattattttcaaagaataatgactaaaaaaacaaaaacaaaccactatttttaaatcacaaaattaataaatagactttaaaatttcattaaattttatatatatttcttaaaaataatatttatctataatgatttatttttatttattcctcatatttatataattattttaaaaaaaatcatttaaaaaataagtgaaaatagcttaaaaacattgaaatatgtaccctcaataaagaagaatgaaagaaaaaggaattacacgatttaccactcatccatcgtcataggaataaataaaaatgagaaacaataaaaaaaaattcaaaaaataaattataactatgaaagaaaagaataacattttgttttattattcttcactgtttcccgtcccgtcagtaactgcgtcatccctcccagattccgaaaacacgtgaaacaagcaaataagaagtgaagcaatcctcgagcaaaataaaatggttaaaaagtggaatcgggttcccttcctcgtgattttaacccggaatcaagattccaatcgtcctgtatgggcccacaagaagaatccgaaaatggtactagaaccacgcaacgtcgtcgtatatctttttgcaaaaggtcgaatttccacgtaagctgggcgataagttggtaccacttattgttatcgattgtaatgtttccttatggaaagctttatttgaagattttggctgtccgaatgcaatcccgccacgtaggagaagacacgtcaatgttaaatgattggtgaccaactgatcattttcattgatgagtgagactgttgaaaggtgttttgagtggtaaatgatctcggaatatttcccggtcctttctttagaaaaatctgttaaatttgtatataaaatttgacttacatgtatttttcaaaaagccaccgctatttttatcaaatatttttacgaacttttcactaaaaacacataaagataacaattagttggcaaaaagtcttaaagaaataaaataaagtgaataaataatagtaagaacacgatttgataatgattttaaaaaatatttttaatttttttaagagttccatttatagtaattttagaaaatatttttaatacttaaaaatttttatcattcaagtattaacaagattaaaaatatttttttaaattactataaaatgcattttaagagtgtatttgataataattttaaaaaatgtttatgacatctttaatacttaaaaaataaaaaatttcaaatattaaaaagattaaaaacattttctaaaatcactatcaaacgcactccaaaagtcagtttgatagtaattctagaaaatgtttttactttttttaacacttcaatttttttatttgacagtaattttagaaaacgtttttaaaaatttctaatatctgaatttttttatttttcaagtattagaaatgttaaaaacacttcctaaaatagctaccaaatatactctgcatttgacaataattttatgaagtgtttctacaatttctaatacttaaaattttttatttttaaaatattaaaaagactaaaatcactttctaaaatcactatcaaatacactctaaccgttttgacaatgattttaggaagcgtttttaacaattctaatacttaaaagataaaaaattttatgtgttaaaaatactaaaacatttcttaaaatcattaccaaatacactttaatactcgaaaaattttaccttattagaaaaattagaaacactttaaaaaattactatccaacacattgtaaatgataaatttttcaaatataaaatgttttttttttttatcaagttaatgcaagaaaattatttttaaattttttttttttgtcaactaaacataccctgaagaataagggggaaattttttaatactattgaaacataagaaaaaaattaaccttataatttgtaaggattaaacataacttaaacaaaaattataattttaattttatttggtcacgttgtgccatgtaacatgataaagactatttttgttaatatatgaattgtaataaataaagtttatagggtttgtctctagaatttaacattgactttaataaattccttggcatttagaaaataataattcatataaccctgaggagatattttgagtttagagaaaaattcttcggcggcattgatttgtgctggtcaatataatgacataataggtattttctattccaagtaagatttttttcttttcttttctttcaaatttaacatcatggggttagtttagacataagagaagactcaaatctaatgtctttttttttttttttttttttaagaaacaaaatatatattcttatgcttctttgaattaaaagctactcataataaggcaaaacatgaatatgtaagaattttcttcataatttctttataaaagaaaatgttgtgataagtgataactgctaaaaagttttagaaaattatttcattatccttgcacttctactcagctcggagtcttgggatatttttataaaattacaatgagttggaatttttatttttcaaattaacatattagaaaatatttttaaatttacagtaattcgatttcatattagatctgatattgaaaatgtcttttaaagagatatctctagtataaatttattttttaaatttaatcttttttaatgtatgattgaattcaattcttaaatttaattttttttttgaatgtgtgattgatatgaaaattacgagaaggtgtctataaggtgttgttttttccctagctgatatgaagattattgacttggtaaaaactatcgtggattcctcagtaattgaagagacaccttggatggggccaaaactacatagaaccctcaataatttcataagtgcctttttgaagaatttttttttgtaattagcttaaagttcaaaaaaccccaagtctctcgactaacctcgcctataaatcgagagtta

SEQ ID NO: 13779 - DNA, 7980 bp, Vitis vinifera
  Intron number 3 from transcript GSVIVT01003111001 (locus G SVIVG01003111001) derived from phytozome v7.0 (chr-ID chrU n; pos 7328677 to 7336656)
aggaacacaactgaaggaccaggttggtgaaggtttcttttttttttttttttcctcccttcagagctgcattttgtataaacaaataaatcacatgtggaataccatatacaaaagcttgaagttatcatttgcatcagattattgcacatttcaagcagatgtatggttaaatagccaaaaaaaatagtgacatgtggcctctatataagctatgttaatgtaggctttaaggaaaataaacttttattaatcctcttttctaaaaaagaaatacacgaaggatattatgcaaatttatatagagactcctctagttagaaaataggaacttccctaaaaaatagagactcctctagttagaaaataggaagtttcctaaaaaatagaacaggaaactaactaaaaaaattctaagtaaatctgaatttaaaaatatcagatttgatcctttttcctaaaaataacaacaatattcctgaattcttgacactccccctcaagttggtgcataaaaatctatctcgtccaacttgcttgttagatagtcaaaaactggtctatgaagtccattggttaggatttcagccagttgtgtagttggaacaaatggtgtgcatacaataccaacttcaagtttttcctttatgaaatgtccatcaatctccacatgtttaatcacatcatgctgaattggattatgtgcaatactgattgcaacttcattattgcaataaagcttcaaaggatagattgttggttgtctcggctcttttaagacatgcttaagccacaatacttcacaaaccctatgtgccatcactccaaattcttcctccacactactcttggctaccacactttgctttttactcctccaagtaaccaaatttccccagataaacatgcaataccctgagatcaatctcctatcagttactgaattagcccagtctacattcgtgtatacttcaactcctcgctgcccattcttcttaaaaaatagtccatttcctagtgattcttcaagtaccttaattgtttcaaaaggcgaatgcatatattgacttatcacactaattgcaaagacaatatttggtcaattgtgagataggtaaaccaacttatcaaccaatttttggtaccttgtagtatccatcggaaccctagtttctactttttcgagctttacattgggatctataagggtaagtgaaggtctgcaaccactcatttacgttttctttaggagatcaagaatatatttttgctgtgaaacaacaagtcccttctttaactgtgctacttccaatccaagaaaatagctcaaggctctaaaatctttaatttcaaattcagcagctaggcacttcttcaaatgattcatcttaaccatattatcttcggttagaataatgttacccacattaactattaaaactataacttcacctcctaaagagtattttagaaatagggtgtgatttgtttatccttgacaaaagcctattttcttcataaaatgggtgaacctctcaggtcaagcccaagaagattgcttaagtccatataatatttttttataggtttgcttaagtccatataacgacttttgtagcttacaaacctttgagccaaccctttttatcaaattctggaggtagatccatgtacacctcctttgggtctccattaaggaaggcatttttaacattcaattgttgtagtggtcagtccaaatttgcagcaattgataaaagaactctgactatattaaatttacaatgggagaaaaggtttccaagcaatcaatcccatatgttcgtgtaaatgcgaccatggaagatgacaaattcttataagatacgaaattagatatgggatgttaagtacaagacctaacatcttttcgaaatgcaatagggacataaagatcactaagagactctagatgtttaatattggaagaagaacatggtttaggtggaggcttacctttctcaagtggtgagattagatctgttctcaggacaaattcatggccttgctataaagtaggttcctccatcctttgaatacaatttctccttgagtaaacacaaagctcttgattttttttacttgtattttcactgatttcaatattttcatgatcttgatcatgagttggcattaaggtaggttgtccaaaatttcaatagctaaatcatttgttcccaaagtttgtctactaacaaaaaactcatcaaacgcaagtgcctttttttccatttttcctgaagagttttctaagaattttcctgaagtttcttattgttgttgaactaacagtgactggaacaatggctagtctaactcaaacacctcactaggaatgaaatctacacttttactccccctgaggatgatcatgactaaaatatgatttaattttaataaagttggcatccattgttacatacattcttctggtacggggatcaaagcatttataccctttttgtgttgaagattatgcaacaaatatgcatttggatgctctaggatcaaattttccatgattatgattatagacatgaatgaatgcagtgcaaccaaaaattttaaaaggtaaattcattaaaattcatgaagtaggaaaatacatgttgaaaaaataaagaggaatttgatattttcaaaccctagtaggcatcctattgataaataagtggcaattaaaatagcttcaccctaaatatatttaggaacttgtgttgaaaagatgagtaatctagcaacttctaaaagatgtttgttctttctttccgccattccattttgttgaagtgtattaacacaagaactttgatgtattattccatattccataaagtagattcccaacaagtggttaaagtatttcattccattatcaattctgaaaacttgaatatttgtttgaaattgtattttgaccattttgtgaacaaatttaaacatttgtgctacttctgatttttatttatttattttttttttatatagcaaatacacctaagaaacccttgtatgatcatctataaaagtgataaaccacttttttcttgtaaaagtgtcaaccctagaaggtcctcaaacatcattatgcattacagaaaaaggtttagaggctttataggattgtgaagaaaaaaatgcacgatgatgttttgcaagttcacaaatttcaaaattgaatgaaaatggatctttattaataaacaactttggaaacaaatgcttcaaatattgaaaattgggatgtcctaacctcaaatgtcgtaacattattttattctcattagttactaaaacagattcaaaataagtactttgagcttgtctacctagttaaatttcatctttaaagaaataaagtcttccactttgtctagcattgtcaatcatcttctttgagtccaaatcctggaattcacaacgagatgagaaaaaattaccttgacactttaaatcaaaggttaatttactaacaaacaataaattgcaagacaaattaggaacttgaaggacattatagtgtgtaagaagtgaggaaattttgatagatccttttccaacaatagctaaaagtgattcatctgctatttttatttgtttgtttcctgcacaaggactataagaagaaaacagatttgaagaaccagtcatatgaccggttgcaccagaatctattattcatgggtaatttgaatcaaggctaacaagagttgtgggaagatgattacctttctgggctataaggaataagaaggggattgataaaaagagacttgagactaaagaagtttgtacagatgctctatttgatccttagtaaaagaagatgtttctaaggaaggttgttgccctattcatcgtttccagcttgataggcataactctccccgttgggtttcttctttcagtttgatggcttgttgtgaatcttccaatagatgtcacaagtatgtcagggctttttatagtggtcataccatattctatcactctttttaaaattccttttttctccttcatgatcaaaccccttagtaaaaatggcaaaactgtcagattttattctagcccttggcgactcaaggttcatcataatggatcttctagcctcttctcttctaacttcaaaaaaaccttcttggggggatgacagtggttttctccccaagattcgacctctcacttcatcatgggagttttttaagaaagagcttatgctctaataccatgtagacttagaggaaaataaatttttactaatccttttttctaaaaaaaatacataaaggataccatacaagtttatattgagactcctctaactagaaaataggaacttccctaaaaaatagaacggggaactaacttgaaaaaatcctaacgaaatctgaatttaaaaataaatatcagattttatcctttttcctaaaaataacaacaatattcctagattcttaatagtcaaactgctgcttcagaagttattatgaaatataagatagaatataagcgagtagcatgtcctattggtagtcttgtaggcaaatagatttgtgatgggcttatccaacacaaaaataggttagagggatatagtcttaatggattgagatatatactaactcaattacatgaatatttcagtgagcaaagtactcttgggaacatcaaaaacctcaccaaaactcttcacattgactaaagattcaacaactaattttaaattgtttgaaaattttaatttgagagagagagagagagcaaactactctagagaccatcaggtacctcaacaaaactctttcattgagtaaaggttccacaactaattttaaattgtttgaaaattttaatatgagagggagagagggagaaaggaaaagaaaatttcatttttaagtttcggttcttcagaaaagagaagaaaagaatctttctcatctgaaaattattactttccaactcactacatttttagttgtttgccaaaaaaaaaaaaggctgaaatttctaagtgagattattgatatacatattggaaatcttttatagcacattttggtacaaagaatgacattatagaactttcttaatgaggtttcttactaattttatttaaattcttttgaaatttttattactaacttttttaaatactaaaattactaagacttgtatgtatattatttcttactaaaacaaattttaataaaatttaaacctcattttttcttaagtttttggatgttttgtttgtattttgaatgtaaccatcagtaaaatttggcaactttagcctttttaggttttaaacttttttatacagtatactacaaggattgcataattcgatatataatgcatttctgttagattttttttttttttttttttttgggtacctttcttgactatgcttttaagtacttgattggttgattgataatgaggttatcatgtgatgtctttagaaatgaactcaatgagaacaattttaaatgtgtttgaacagaaatattacaaatcaatttttaagttcttgtatttattattggtctaaaaattttcttggatcttatttttcaaaaggtttcccctttaaggtaatttcctgacagccattcgcattaatggtgttccagccatccacaatgttttagtatttgcccattgtctaatttaaaaactttgtatgctttctttaattaaatggaaagtccatgagatataaacttgacgcataacttataattgccaaagaaattcataaaaagcttgttctgaaattagatatgggtgcagttttttatgggctaaaataatacactaactagtgtctaagaggatgcatttttttatggggatgcaacctaggtacacataactatgtaggtcatcatctccccttgcttgcagttaaggtgtttgtcaatctcttaaagtgtgtagatcttaagggatgttattgcttagtaaatggttgcggagtttcacaattgagtgggaaactttatggaggagggtcgttgtagggaaattcaaagaggaggtgaggtggtgttcaagggagaagaaaaagacattcaagatgggtttgtgagaaacaataagaaatggttagcttgcaagctatttgagaatgagcatcttgatgagtgatgtttgcaggtccaagttctgacaggatgtgtggtgtggatatttctttctaagatcctttcttggacttgtctttcttaacttctcgtaagacttttagggtgactgagttttgcaagggggtggaaagtgaatccaagatttcaaaggagtttgcaagattgggaagtggtgatagttgagtctttattcaggtcatccatgggttggttatgatggtaggttggtgtggcagcctttcaagtccagtcacttctttgtgaagttctatagtgaagcattaaattcaggagccttcattcagtttccagtgaaggaggtgtgtgaattctgggcaactttcaacattggctttcttgggagacagttaggggggaaaatactcacaaccaatcagctcttgaggccaaggtgcactactagagactggtgctgtttgtgtgggcaaagagaggattcaagcaaaccatatactttttaccttgcaaatggtctcatcatttgttatctttgttgttctcattatttgcggtctatttggtcctttcatggtcagaaaagacatgttgcttgaatggtatgatagctttatggggagggctgaaaagaagattcggaggttgggccttctatactttgattttgagtatttggaaagaacataatagggagattcttgacagccttaatgttcagatttaagaataaaagacccattcctcacattattgttcaagtggttgtggtgttcttaggttgatgacgaagtttttctcatctggattgacagtgtgaggaaggcttttgctgtttattagttttttgtttctctgtttttagtttttcatttacccatatttttggggtgcatctggcacacttccagtgttcttggattgtgccacctttttttattggctcttttatacaacatacttttatttgctatttaaaaattaaaaaaaaattccaaaagttagggtatgattggtggtagtgtgagcttatagcttccttttggctccctctatttagctcctgtgtgcttgtgttgtgctccccttgtgttagacacttctttttaactaatataatacttttctgtaaaaaaatatataataaataaatttaaaaaaaataaaaaataaaaaaggatgagcaatatggtcagccattttgtttattttttataggagcaatgtagccagacatgttctgtgacagcaagtcaatggttaaatttaagaactcttcaagttttgccaattggtgttatttgtgcgagcaggaagaagaattagctgaccatttatatacatcatgggatttaatgtggtttatggattttactattttctacttttggcatcccttggatgcttctttgtctcaattaattaaggatattttgagtagttggcatggaagtaatgtccataaagagaagatgaaagtatgtattatagcctcactatgcttattttagtgtatttggaagggcacaataaataaatctttgatgattgcagctaaaaaaagaaaattttgacttttgtttgaattcaatagaaattagaaggctgttctttgtagctatctttgatgttttacaacttcttatttacttatcaaaaaaaaaaaaaagacaaggaaaaagaaaaaggaagccaaattccctgccaaattgctaggagttaaaatagaaaacatgtctggagtttcatatctttagttgtgctcatgagtgttgtggctaatcaattttccaattttcagcagaaa

SEQ ID NO: 13780 - DNA, 8042 bp, Vitis vinifera
  Intron number 3 from transcript GSVIVT01034217001 (locus G SVIVG01034217001) derived from phytozome v7.0 (chr-ID chr9 ; pos 12930848 to 12938889)
catccccaatatcaggcaacttagaggttagtcaggattttgccctgttcgtgccttgttttcttaagattaatgttattcatttcaagttcaaacatccactgttttgatgcatccatttcattttcatttcaaaacaaaatgatcatcagtatcccattgcaattgcaacattaactgagactgcttttccaaggaattcgataataaaaaagtagcatttcatggtccgaatgctgaagtgttagcaaccttggatacttcattattttatggatcttgatgcttgaggagtctatcaattttttcatatcttatatttgtagaatacataaataaagaataccatgaatactgttgctaaccatttttatcttagttctgcattctctttgtaataaaaacaaccatttggaatgaagtacagaattataatagactattttctgagcaaaagcagtgtatatcttatcaataaagcgcattttttggttggcctatcaaaaaaaaaatcagtatggttgctggcctgcaaattgcaattatcattgttttgcactgacttatcaactccctctacctattgctcaggacgtggatctttatccaccttttaaatatacaaaaaagtaagccttattgtagattatcttgtttagcgagccttaagctggtcatcctcacccctggattacttttaattatggtcttgtggtttcttggttgctttaagttatgatgtgaaagtgtggttagtttgttttgtattcttagggtattattttgtttagttggaatgcttctatggtacaacacttatgaagtacttctcccactaaactccaatattttctatttgcagcatattttcccctatcatttctataagcacttgaaataagatattgaaaatggtctgtttgttctttttcagactaccaggtgtaataaccatgaccctagttattataatgttatgtttttttttttaaatgtgcatttttgctattacatgctcatttcttgaagcgtatgctggatgaaattttctttcttcttttttttttccaacaagtaatgtgaaatcagttttgttaatggtagataccttagtgagctcctggacaataggcaagcaacacacctatgcaatccatcacaccttctaggatacccatgcatttactaagtttacagagattgaatatggacaagaaatgggtgtgataatcaagaaattgtctgaaactgataaatgatttgagttttttgaaatctgatatttgtgtcagcctagttcaaggttctataataattgggactattaatcttaaaattatttggtgaaagcttctgaatgggaattttggaaggagaacattaccttacatgggactaagagagctacatctaaagcacatgttatttttggtagagcatgatgtatgttgtaaactcaaaccctaatagctcgagcttttagaaaagttggcgacttaatatggtatcagaaactggaggttcatttatttgtctacaaaatttgtggtttctctctttaagcttttgaggaaaggttgtaactcaacaaatttataagatgaatattgcacatttttctttttcttattcctatttccaatagatttgggtgcaataaaaaggatttttttttttttttcatctgaattacatacttttaagctcaacaaaaaaaattatttctgtacatcccttccagtgatgtagaaataacttggaaactccaggcactgggccttactgcttggcttttcactaaggttctgcctgtatatgtaagactggcaacaacggatcaagcatgcatactaaaaccttaagaatggttaccatcatttttgcatgcatggaattggaacctaaaacctgtaaatcattggaaatttttgtgttgcacaatatttagaggtttaacagctggtttcgggccatctcactctatgagcccagagtgtggaaagtggttcagagttattcaattccattgacatttggcataaaggtgatctgtttgttttagttttgtacaaccatagttgtgctaagctcttgtaataatgcacaaggactgtgcttcaggattcaagcacttgggccagatgttctctcaggtttgaggaaatctctagcatatattgtgattaattgcaatttttttctttatattatgggagaaaaatattaattaattaaagaaagagtgaagaagaaaaagaaggtaggagtccttcaacaaagaaagaacacaaaggccctcaaaatcaaagaaggctataatagagaaaaaccaactcctaaggagatcccactatccttctttcctttgggtaggtagtgtgtgtggttgagttctttttgggtgtaaaatggcttctaaactccttaggcattaggttacatgggtggacccccgttttgttgggcacctttaatctatttatttgctattaagcactagggctccctttttaaccagttggattgggaatctatttgaattgatacccatccttgggaatctctgtcatactgtaaactagtctcccataagctaacacttgccttgaacctcaacttcccccatagaactctctaaggctctctacagggggaatggcttttgcacgagcattcataaaaccctaggattatggaagtgaaagatcacatgggcagaaggatccactagctaggactaacccctcttcactggctccctggagcaaagaaacctaagctgggctcagccagtccttagatatgatgttcacaggaatgcctgaatgctcctccataactcaatcccacatcttaccagctgaccctctattctaaaaaaatatagctttcctttgcaactacatcacttacatagtggctaacatagcatcctttaaagaacatttttccattctattttgcaccttctaaggaggcttaggtggatgatgttcaggtgataaagggtgggctactacagtggaacctgtttcttaagaattttcaagattaggagatggatgatgtcaagaactacttaaaatgctactacaagtgttaggaaggagtaatggggaggaggatagaatggtgtggaaggctagtaagagtgagggattctcagttaagtatttctactctaccttggagttggagggaaaaatgtttcacttcagagaaagtgtggtgcccttgggctcctactaaagtgggtttcatcttgtgagaggcagcatggggaagaatcctaatcatggaaagaagaggatggtttttggtgacttattgttatatatgtaagaatgcggaagaatcagcagatcaactccttgtctattatggaaaagctaggggatggtagcactttttgttctctttatttgtcatcttgtcggttctcctttcttcagtgacggaattgttaatgggtttgcaaaggagttttgtagaaaagaagagaagaaaagcttagagagcaactcctttttgcttatgttgaacaatggggcccaggcataattgaagaacctttgaagtgttgcaatgcttagatcaatctcttaaggattccttacttgcagcccatacccatcatcttgagggtctcttcaagatgatattcaacctaattccctgtccttgctagacctcattgagtggctgtgttctaagtaattagaacgtggttgtgggttttttttgccttttagatgtatacatcctgtgcactgggtgtgcatccgtttttctatgggtgcttctaatatattctcattttgcttataaaaatagtggctaacatagcacagtgccatcaatttgccctgctcctcctgctagtgccctaagtagagataagtatcaaatttaaattttctttggaaagtccaaagaatcccggcaacaaagataagccttttacaaagctcataagaaattcaaaaatgtgggataaatggtcaactggctcccactttccaaacaaaactagttgtatattttgatggtttcacaatgcctcccgatttgaaacttatcatttgtatccatcctttgcagctagtaaccatgcaaaagcctttattttggattgcagggtgagggatgcttacatgcccagtttaatttttccataagggattgagatgaattttcacttttgaaaaggaagtggaagagaaatggtttttcctattcatgaaccgacatttctggtatggagcagatcaaaacaaatatatttttcaaggccagaaaggagaaaaaaggccattatgttgcagtcattaagatttctgcataatttgaaattccaaggagaataatttgggtgagtataaagattagtgataggaccttcactccgctttgagattgtattcaagcaaggaaaggaagattccatgcaaacatttagtaaagaaattttgtaatttgaagaaaaatgagagagaaatatttttctttttttgataggtaaaatttttatactcattgggacttgaatctgaaaccttccacaaatcctccccaactccttatcacttgagccaggcctcaagggtagaaagagaaacatggctaaaaatcgttaaatacaatacaaataaaagaaaattgtttatttgacatatctaaaaataaattaaaacagcctacagatggggacatagatcacattggttgaggcaaaagagaatacatgacgaagccttgatacataaggtttacacctatgaataatccctttaaattttttattctcaaggcttgtatgaaaaccttctcatgagctgagccttggaaatgctttttaaaccctaggaggaggcatccagggaaatttagaaattatagccttttcttctaggaaggctactcatcctttatgggatccaatcttaaagaccatctgaaattaaaatttgattactcatgtcactgaaacaaaataggcatttagtcacctgtgtgaatgatattatagtttactcttatttaaattgggcagtataattgaaatcaactgaaactaagttattgccatgttattggatttaaaagaacagcacttcattgcttgttctgctagatggttgaggagtatttgttattattatcaattggtttcctcattgaagtgcttcaggatggcagtttcacaatatttacagagagattgaagtcattattatgagttgtattcatctttttgattggattcctagttcagctttatgtgccaatactctttaggagtggtgctattacctcaaagtattttttgggtggttttgtttctccttaaatgcttgatcatccacttgtttttttttgggtttatactcatttccttgttcacttcttaacgaaactttctcctgtaaagggaaggagaacctacatacacctaactcaagaaatatacacaatagaaatgtgaaagaagtgtgatttaagcactttatgatgatcttatggaaaatccaaattcaagagggaactagtatagccaaatttggttcgtttggattgcctggtatcaaattgatgccctaagactagttctctaattatctatgttgccccagttctctagcactcacacatcctttttcttgataagaaagcaagagaaaaaacatattaataaaaaaggctatacaccaaggtagacaggttatatataagggaaaacaaaaggtatagtcataacgaggaaaaacacaaaaaactgctccctctcttaactagaccctacccccattcttttttttttttttttgataagtaaacgactatattaacgaaggcaaaaagccaaagagcatacaggaagtatacaaggctacaaaccctataccaaaaaacaaaacaacccaacccctacttggaagctatccactccaagaaacctataagggaattcgactccatatcaatgtacactttagcccaaccccaaaaattatacacaaacgaagtctttaacttctgaaaggctaacacaccccctttaaaggctagcctattcctctccttccaaattgtccaaaaaatgaaaagcgggatggatttccatactttcttcctttttctccccacaaaagagcctttccaactactaagaacctcctttacagaattaggaaaaacccactgtacaccacacaacgcaagaatgatatcccacaatccttttgccaccgtacaatgaattaactagaccctacccccattctacaaaattgaataaagacaatgctgcttctgcgatgtcatcctaactcaagacaacaaacttaacacaaaatgaactcttcaaagaatgaaccaattgctctgaattttcaaagattctttggtttctctcttttcacaaagtctagaaaaatacatgacgaagcagcttttgaggccttcctttgctttcttcccacaaaggaaccatgccaacttaataggttctccttaaccgacaaaggaagaactcaagtgattctaaataaagtaaaaagcaagtaccatagctccctagctattgggtaatgaagaaggataggatctatagattccaccttgtttttatggaggtaatatctatttgccaaaaaccaacctctcctttggagttgctctaatgtcaaaaccttctcccaacaagcttctcaagtcaaaaaaactcactttagacaaaactcatgaattccaaataatagttttggggaaaagaattgagcatcccgactccaacatagaatatagatattttacttagaaaacaccattccttgagcccatccacaccaccctatccttctccaccctcttcacaaacttcccatccaatcttcagaaaaaagactccgcaaaatccaactcctagtcatttagatgtctagaaaaaccagggttttagtgccctacctcccctcactctttccaaacatctgtttcctaggcctctttattcatcgtttaggcatacaggatgggaaagacgtgtaagggttcctccccacaccatctatccacctaaaaccaggccctcctcacatcctcaacctcaaaagaaatcttagagttgataaggtcccacccttttctaatagctttctagatcctaatcccatgcccacctctcacagtgcaagatctccagtttccttcctctccatatcctgaattacctgcttccaaaaagcatctcctccggaggcatatctccaacttcacttttccaaaagggccctactaaaaaaatgaggacttctgatgtcgaggccccccttcctcttttcattgcatatgataaaccaatttcctaagtgcaccccttccccaaagaaaatccctgtgaatcttctcaagccttgtcctgattttacactaggaatgctaaagaaagacataaagtagataggtaaactggaaaacacactacaaattagagttagcctccctctttatgaaatatactgcaaattcctgacccacatccttttaagtttaaacttccaacacttcccattttcactcaggactcacaaagcaatttctagtatttttgtataatatcacatttttaatttgcataatcttaaactctcatgctttgaccccttcaaaaaaaaatgccagttctcatctcactctagttttcagagagcttgtatactgagagaaataactgtccgcttcctgagaatgccttgcaatactcatgctttgaccccttcaaaaaaaaaaatgccagttctcatctcactcgaattttcagagagcttgtatactgaaagaaataactgtccactccctgagaatgccttgcaatgctatggtattataaataccaagggagtatcttctctggttttatagttgagaacattttatggttgaacctatttagcattcttaaaattaattagatgttggatttcatgaaaatcttgaggtagaagtttaacacacaataataaacatgtaggtaagctgct

SEQ ID NO: 13781 - DNA, 8055 bp, Vitis vinifera
  Intron number 21 from transcript GSVIVT01018715001 (locus GSVIVG01018715001) derived from phytozome v7.0 (chr-ID chr 16; pos 10694154 to 10702208 reverse strand)
aggtgctgtacgattttcttttttcatttataatttggcatagttttgaaatattttttccatatctttagcatttgaaacttataatatagattgcattaccaaacttattaaatggatttgctttgaggaagagtttacaaggattcttctgataattgttatagctggatttgctttatgcatctatgttcatggtactatgtacaacttttctttagtttttcaaatggtgcagtttacttttatgagggtttagtctgagggtcttcttgcgaagcacattaaaccgagggattttttctctcatctttcaaaaattttcaaagccattactattgtatattataattgatcttttcaaaattttacaagctatgaatattgtatccctctagatattctaagtatctgaaactgggcaggaaacaaaaacaatgattaaaaaaaaaaagcactgcagaaaaaaagggcagaccataaagtggaggttgctattgttattttttatttcttcaatacaagtagatttatgggctagactttgtaaccacaaccctttattttaggagattcaaatcagttgtattttaggagattcaagctagctgtaatactatagctagcaattagaaatagaaacaaggaacacaatcacaatctcccatatttagaaaataaaccacatcttggattttatccttatttagagaataagaattatccgagattctctacactccccctcaagttggactaaacacattgaatagacccaacttgtcaaccaatcttaaacaccggcttgaatgatcccttagttagcaaatctgcaacatattgtgatgaaggtatatacacgacacaaatgctcccctcttcaatcctttccttgataaagtggcggcccacctctacatgttttgttctattgtgatgcacatggttatgggagatggtgatggcaactttgttgtcactataaatcttcataggctcatttctcataaatttcaaatcatccaacaatatctttaaccaaagtaacttgcagatcccatgtgctaaagttttaaattctatctcagcactacttctagccaccactatctgtttcttgctcctccacgtcactaaattaccctacacaaaggtgcaatatccggttgttaacctcctgtctttcactggttctactcaatttgcatatgtaaaagcctcaacactcctctcttcacttttcttaaggaataggtcctcatcctagagtcactttgaggtgtctcaaaatctaacacagaacttccatgtgttcttcataaggagaatgcatatactggctcacgacactaactgcaaaggcaatatcagtttagtatgagaaagatagataagctttcctattagacgttggtatcagcttttatcaaccgatgtactttcagattgtttgcctagtttcaaattatgatttatgggtgtatctgcaagtttgcaccttaacatccctatctcctccaagagatcaaggatgtacttcctttgagaaattgaaatatcacttctatttcttgctacttccataccaagaaaatatctcaatgggcttagatctttaatctcaaattctgctgcaagagatttttttagcctttccatctctacaatatcatcagtagtcaagattatatcaacatggattatgagaatcataggcttatcccctttatgtctatagaacagagtatgatcagattgagcttattggtacccttgttgatgaatagccttcgtaaatctactaaaccaagcccgtggagaccgtttcactccataaagagattttttgagcttgcaaacctttccattaattctagcgtcatcaaatcctattggtagatccatagacttctttctccaactcacgattcaagaatgcatttttgacatcaagttgttttccaaatttgttgccaaggataagagtacttgaatagtatttagctttgccactaatgcaaatgtctcttgatagtcaaactccatatgtctgagaaacccttttgcagtcaataggggatttttttccttggcatttccacaacatcccaagttctattcttttctagagctaacatttcttctcttactgtgtttctccattctggcattgataaagcttcctatgtagttttcaaaatttccatagattagttacaagagcttgaatagatgatgacaagtgattgtaagctacaaacttggagattgggtgttgagtacaagatcatattcttttcttgagagctataggaacattaagatcattacctccaaaagtaacatgtgggttagaagtttgagtacttgatattgattcaaattcatggttttgcaagaggtccgttaggtgttccactttttgagtatttttttgtcttgaataaacaattggcttgggagattggagttgcaagtcctcctatcattgaacccttgttcatggtcatagtaggttcgccaaagggtgtttatgactattcaggctcacatcccaaatattttcgtcctcactaactctcttctcttgagggaaatttttggtgaaaaaagatttgttttcaaagaatatcaaatccatagaagtgtaatatttgcgtgtgtttggcaataacatttgtaccctttttacgtaggagagtatcctaagaaaatacattttcgagctatagggtcaagtttacttctattattatcgtggatgtgtgcaaaggaagtacaaccaaagactcttaatttaagtgaagagatagattggttgtgaggataggatttgagaaaacaagttactggtgcttcataattgagaatttgggttggcattctatttattagataacaaggtatttttgtacattatttgtgaacatagtggctttagctacttctagaaggtggcgattgtttctttcaataatgccattttgttgtggggttattctgcagaaacttctacgaataatgcctttctcagagagaaaaccttctaaaatagattttaaacacttgctttgcttctgatttttctttcaaaagatatacccaacaaaccttagtgtgattatcgataaatgtgataaaccattgtttttcgttaaaatgtttaacacgtgaaggaccccaaatatcactatggaataaagaaaaaggtgatgacactttgtatttttgaggaggataagtggtatgaacatgcttggctaagtgacaaattccacattgaaaaaaatctccattatgaaatagtgatggatacaaagtttgcaaatatgaaaaacttggggggctttgtctacaatgtcacaatattatttcctgttctccagaaagagacttacaacttgcaatttaagtttgtttattcaattcaacttccttctcaaaataatataagccctcatgttctctagaattgccaatccttttctccgaagtcaggtcttgaaacacataagaaaactcaaagaaatgagcaccacacgttaaatgtctagttagcttactaatatagagaaggttgcaagacaaatttagaatatgcaaaaaagaatgtacttcaatattagggctaattctaatagttctagttcttgccactgttgaaagagatccatatgctgctttaaccttgaaacttcctaaacttggattatatgacgagaagaattttatgtagtccatcatatgatttgtggctctagagtcaatcatcatggttctagatcattgttgtaactaccaaaggttgagaaaaaaaattacctctctatgctaataatgaagtattagagtcttttgatggttttgccaggggtcaaaagaaaaaaccaacattcaccaaattcttattaaaaataaattagaggtacaagctctaatttatacaaagtagaacgtgaaacaaaccttaattctaggaataataaagtcatatctcttaagattttgttgctattaatcaacaacatttattcaaaatgaaaaaagtcaaataacgttcaaataagagttgattattcggctattagtttgaaacaaaatctgcccataattagaatgatttgattttgtttgaattatcttccaacactccgcctcaagttgggcggtacaaattgaacatgcccaacttgtctactaattgttcgaatcatcttcttgatagtaatttgataggtacatttgctagttgtttattttgttggtacataaatcatgcaaattgtactatcttcagccttctcctttataaagtgtctgtcaacttccacatgtttagttcagtcatgatgaactgggttgtgtgatatgttgatggtcgccttattgtcataatacatcttcattggcatctcctccttcacatcaatttctcctagaagttgtttaagccatagtagttcacacatatcatgagcaattgcacgaaattctgcctctgcattgcttctagctactaccatttgcttcttactcctccaagtcgctaagttggctcacacaaaggtgcaatagcttgaagttgatctttgatcatctagggaacttgcccagttagcattcgtgaacccttcaatgcttctcttttcattttttctaaagaataatcctttccctagagatcctttaagatactttagaattctatacatgacttccatatgttctttgcaaggagcatgcatgtattgactcacaattattattgcaaaagtgatgtctggtctagtgtgggaaagataaattagcatccctactagacattgatatctttcgacgttgataggtgtgctttctttttgttctccaatcttctttaccgggtccattgaaccatcaaaaggtttacatcctagcatctcagtttccttcaagagatctagaatatatatatttttttaggaaactgatatttcactcttgttccttgccatttccatccctagaaagtaacatagaggtcctagatctttggtttcaaactcagcagccagcttcccttttaattgttccatctccactagatcatttcctagtcactataatgtcatccacatagacaatgagaatagtgaccttaccatcattgtgatggtaaaacaaggtatgatcggattgatcctgtgtatatccatgcatcatgatggccttagtaaatctcttgaaccatgcacgaggagactggttcagcccatagagagattttctaagcttgtagactttccctaccttccttccttgatcaaatccaggaggcaattccatgtacacttcttcttctaggtctccattcataaaagcgtttttttatgtctagttattgaagtcaccaatccagatttgcagcaagggataaaagaattgttatagtattaagtttgaaaatcggggcaaacgtttcttgatagtcaataccataagtttgtgcaaatcccttggctaccaacctcgccttgtacttttcaatgaacccatctagtattttacaacaaacacccatttgcatccaacttgcatatttcctttgggcttgtccactaaatcccaagttcggtttttttccaaagctttcatttcctccatcaaagcttctctccatcgatgatcttgtagagcctcatgaatgtgttccagaacttctcctaaaagtctggaaataaaagtttgaaattgaggtgagagatggttgtatgacacaaaattggatattgggtgttgagtacatggccaaactctttttcttatggctataggcaaattaaggtcacttacctcaggaaggacagtttgttatgattcttgacagcactattggtccattttggtctctactattcttgagttactactccttgaatagacacaaagttctggttgctgtagtgaatcaatctgtttttgttgttgacaccccaggtccggctgggtttgattgttctggtttgtcaatttcaaacactagctagttaaggaggtgttctggctgttcaagtgggtaagaaggccagtttaatagttgttttggtgatatagttagattaggcagcaagtttggtggttgttctggtagtgggcttagcaatgataattcccaaaaattctctttatctacattctgcccctgaagtgaatttttggagaaaaaaggtgagttctcaaaaaaatgtaacatccaaagcgacaaagtatttttgttttttaggagagtaacaacgtaccccttttgtgtggctgaataaccaaggaagacataggctaatgctgtaggatccagtttagttcgagtttgatcaagaacatgaacaaagcctttatagccgaaaaccttaaggggaagttggttaatggactaagtttgtggatataattgaaggaatctttttaatggtgtttggtaattgagaactcgggtaggcatatgatttataagataataggttgtaagaatggaatctccccaaaattgttttggtacatttgtggtaagcataatggatcgggctacttccaataaatgtctattctttcactcggccactccattttgttgaggtgtatctacacacaaactttgatacataatccttttttctaacaaataattccccaaaatggtattaaaatactctttcccattatccgttcgtaagacttggattctagcattagattggttttgaatcatttgataaatttttgaatgttggttctacctcatttttttctttcaagagatatgtcactatgtatcattgcaaaaggtttggatgcttagtagggttgagaaggataattggaccgttgatgtttagcaaattgataaacatcatactgaaaaacatctttattattgaaaagagaaggaaacaaatgcttcaaatattgaaaattagggtggcgtaaactaaagtgccacaacactatttcttgttgcttagtcctctaggaagattcacaaccagcttatagaacttatccatccttggtattgtcttccttgaagtagtagagccctccatattcctcagcactgccaatcctattccttaggcagcaaattacatgataattttgggacatggagaacattgaaaagggttatatgaggcactaaaattatagtaccagtccctgcaacagtagcgagagatccatctgcaattttgactttaatgtgtccagaacctggagtataagtagaaaaaaagacttgcacaacctgtcatatggtctgttgcccctaagtctatgatccaagggttgagtttttctgttgttccactcaaagcagtctgaaatgtacctttttgggctaggaaggatgagttaatgaggttttaggatgtattagtgcctgattctgctggtaccaaggctaacgatggtgttaacaatttgtagagcttctctaactgctccttgtttaaggaaatattgacagagctctctcctttctgctattcagtatctgaagtggctgtgattggatctctgacagtgacaccaaaggttgtcatttcttctgttgttgcaagtatctccatgggaactgtcatctttacaggctgtcagggcagagttatcagcagtagtattgccaggaacagtaggagttttttaccccaccaaccatcacacatttacatgtttgcaatttccaatattttaatccttgttcacatgatggctgttatattaattttatttccgattcagataatatagtcataacatttgctggaattttgcgaaatcagactcagcattttgagattttgaaaactttaagaccatatttagtcagtctagattgaagaaaagaccttattctagaaacttatgaactaaaaacagagttttccctacttagaatattcattattcattactggttttgttcatgaaagtcattttcccttctatattttgttgctctatacttctacttgcatattcaaatggatctgcaaataatttgattttgttgataggtcg

SEQ ID NO: 13782 - DNA, 2674 bp, Vitis vinifera
  Intron number 3 from transcript GSVIVT01009604001 (locus G SVIVG01009604001) derived from phytozome v7.0 (chr-ID chr1 8; pos 9807690 to 9810363)
ccaaaattacgacttctccgatttcattgtaaaaagttgggatgtgcaaggtgggtcgattcaactttgagtattaaaatcaaatcgaattgatctaattagtttgtatatatacactgaagaattgatttaattgaacttaaaggagaaaaatgattagtttgacttgattaacaataatctatataagttggtttattttgcttcagtttataacatcaaaaatcaacttttttgttttgctaatttggactaaaataaaaaagcccgtgattagacattgttgatcaaatgatattattacaactaatttcaggtcatattattataacttaattacaagaatagatattattaattataacccatgtcaatcatattaagtagaccagtcatagataaagttataaaggtatgatttgaggatcatggaatgagaaaaatgtataccaattaataatggaaccaatagttatattgcacattattagtatgtgcatgtacgtacaactttcaattcaattcagtttggtttattaattttctaaataggtaatcgaattggtataatttagttttatatttaaaaaaccaaaattatttaaaaaatatttgatttgggtaagttggattgattttatcaattgtacaccctaaaactaaaggggtgtccatttatctagttacaattttgccccagttgattcacatttttacttattattatccactttgtttacgcatgaattataattttgcagaattttgctttatgagattcatatttgtacttattattgtcaactttgtatgctcaaaagttacaatttcccctcatcatgagattcacatgtgttgctgtcataattgactttccacaatcatgtataaattattacattttaatagatgcattatcattttggcattaaacaaaatggaaagaagtctctgaagtgaagttaatctcacttaggtaatgcaagtaacaataatagagcaattaaatgcataattaaataaatgaaaaagaagagataacaagtatgaactccgattaatatatagcccaatcctatactctcctcaagctccaaatacaagttgaggttccactagcatttaaggcttcaatcgagcgttaatcctttacactcaattctcaatttcaatgaccttcttacactttcattcaaaaaaattctcactcttgaatctaattaaagataacaaagtctaaactcaagatgatataaatgaaaaccaagatggttttttcttggctaggatttctaagttaacaaggaagatcaatcgggttaagttagattttgatatcttagtttgcgagttttttaggatcctattttaatcttattgttttatcccaaaaccgtgtgagagagaaatgattaattttagatgacaattgtactccaaaaattattggttcaaatttattttaccataccaccatgttatagttaaagacacaaaattgaaattaaagttaagtatattgttctcgatttggtttagtaatgacacaattaataattgaacttaatgtaaaaacaagtctaaaaacttcaaaagtttaaaatgtaatttcattattagttttcacttgccaactttaatagattatttttcataatattagcaaaggatacacacaccaaaagaaaaatattataatgtcattggtgaattgatctaaactttcaaaataaaggttttgattaaaaaatcataaaacttttttcaaggataaaaaataaaggtcaagaatttaaactactaaacctcaatataaattttggatgattcattaatgtcgtccattaagaagcatgaggaagtactgagtcataaatgtgaagaagatgaataaatatttatcgatataagatctaagaggtaatagtgtgttacttaggtaaatctatatacgcttatttcaaagttcatggaatcttattatgattaacaaacacatgtttttaacatccatagaggttgaaataatacgtggagatgacttttaacttatattttgtgtgtttatgtataattttgatttcattttacggtgattctaaaaagtatttttagtttaagaagtgttttaaaaaaaaaaaagtatttaacaaaatttaataaacacttttaagaatatgaaaattcacttacagtattttttgaaaaaaatatttgacaaataattatcttaaaaacattttcatataattatattaatgaatttgagatagacttgaaatttattaatttataatatcttatttgaacataaaattttaaccaatacctattcaatcccgtaattattaaaatcaagaatatacactcataatttatattaatataaagaagtagaaagcactttcatctcaaatttaagcatagggcccaaattttgttgagagctggccggatgtcatcacaagcaagaaaactagaaaacatggctaaaggctgctacagatgtacctacgtgcttgactgaaagaaaggatttgctacaagataaattgtccccttgtctgtaaaccctcaagttgtgacagcaaaaaaaacaaaagtaggccaaagaatttgtcactattaagagcccagagaggtctacgttcaaactctggtaagaggagcgtgc

SEQ ID NO: 13783 - DNA, 4228 bp, Vitis vinifera
  Intron number 8 from transcript GSVIVT01015361001 (locus G SVIVG01015361001) derived from phytozome v7.0 (chr-ID chr1 1; pos 2984637 to 2988864 reverse strand)
tgttctgtgcagagagtccacactggctatacaaggtttgctgtcatatgtgccttttgtaccttgagatgatttattgttttgtccatccaagtgccaggttctgttgctttgaatggttctcttgtgcttccctgtgctataattattttctctggtgctttgaattaatatattgtctgtctgcttgctttaaccgttttctgtagctatgaaaggctaatattcttagaaagatcatattgcgttcatattgaaaaatctactgaataatttaaatgatggtaagtatggagatgatgtgacacttgattaaggaaccaaattttcctaatcttttttataatgctcttgttggtggccctaacctccctagaggttaaattatggttctcacagaattttcctaaaattatgctaatatccagtcttgcttattgatacaatggcaaacctctcctgactgttaaatctggcgatggaaaatgttagcattgctaaatttttctttctaaagaaggtttgtagtttgtttggctcattgactttggggaaatattcttttgatttcaacttacccttatcaaattaagaacaaaaacttaagggaataatgatcttcttaagttatcaagtcaaacaagggtaaaagcttcttttttgagacaaaactttagtgatattcactgttgaatatggtgatgagggaatgctggtaatgacaatatcattaaattaaagatgaagcgcccttgtcctttccatgcttatttagaaatctctcttgtttgtagattggttattaaatctgttcattggaccctaaggaagggtcctttccatgcttatttagaaatctctcttgtttgtagattgcttattaaatctgttcattgtaccctaaggaagggtctcacaagcatgatatttactgtcaaaattttctcattgtgtggcgatttcaatctttttcaaccctcacaagatgcatgatattatagcacacaagacacaacttttagggaaaaccccccaacttgtatcaactctttttcttttttgataggtaagtgaaaagattttagaaacaagtgccaaagaagcaacacaccaaagtacataggatgtattaactctcaagtaactagaagaaatggtttgaagctttctctgaacaagactcccataactttctttactttcttgggcgagttcatgcagagaggacttggcaatgcacactttataataggcaccaaacactacccatgctttaggaatcagcccacaaacctcacccacatctaggtagtggtgcctttcatggcttcagttgttgccatctgtccagcagttacattacttgcttctgctcattccacctataccatactcaacagcccactctcttggtcatgccacctttctagatcttgttgcatcattgcatgttacctgccctatcattgcaaagattttcctaactcatgccatgtgtttagcaagcatctaacatgtgtctcatgtcaaatgccttgcaacatcccctgccaagtgttgcctccttgatgtgcctgcagccctttacttggcttcccccaacgccaaggtgtcacacccttgtacctccaagtgctaggattttacagtctagcaacccttgctgggtttttcaccattgctaagtgttgaaccatgtcaagcccacttgtgccacttagcccattcatccatgtgtgggtggccgatgtgtgccaagtcccctcttagcacacattcttgttgcaatgttgcctaattgctaagccttcttctcagcctatgacctacatttgtagtattattgaaaagaagaagaattggctgaattacatttcattgatgtcaattgatgtaattatacagaaagtaaacttcggttacacattagtctctcctataattaagctatcaccaatcagtctaactacaatctaggaatacaaaggggaaactgttatatacagaatatatcttctttatatagaagatttgctagattaatttcctaacaattattggcccatgcatgtcaaccttgttaattccttccattcaacccatgcatagctcatgccctgtgccacaaccattcttgatggcattgcacccatggattgcactacactgataacattgcaccgttgggtgcaggctggcaaagtgcaccatcacacttcattcatatttgaggctccatgtcatgcctttggagtcatatagctgttgtcatccatattctatcatcactcttagagagggccacacccccttaaagtgcttttaagcatttcccactctaatataggagacatcataagtgcttccataggcataataaattttctttaatcataaaaaatctagaaaaatactctatcgattggaaactccttctcaaggcatttcctttgaaggaaaaatctcaacccaatgaaatcccatacttgaatttttgctgagtcaagccacccatgtgttagcaccatgtgctacccccttaagtcacttccaagccaatgcctagaacccatagcacttgtccctttgttttgatatggtactcagccttgcaagcatccccaattgtgttcttgtcttgaacatgacatgttgctcctcgtgctataggcactcatggttgcaaggtgccatcacatgaggctttggtcccgcatcaacatagtcaaggtgctgacagagggggagaaatgatctacttccaaggaatctccctcctttattttctttatcagattatttcctagagtagtagacggtttgagatctcatattcagttacaaaggttgagacctcataggtgaaagtgacgcagcatcagccctgaccaacctgtaaactttttttttttcaattgtctggattgagatatcttgtcatggatcactaattttgatgttctacttagtcatgacccaaaattgcttgcaatatgctatttgatttgtcacttgagagtttagatctaatgctgggcaacgagaaataatcattgtcctgttcttctgaggaacctcccaacttgcttagcggtatgattgcaggatgtctttcaattaccagatgcttaatattttcgtgtagcctatcatctagatcattcaaattaaggctatgtgtggtttcctgaaagtaccgagaaaagaaaaaaaattgttaaggaaaatgattttctcatctttcactttggaaaatacaaaagaaaatcaaacataattacaattagttaaaaattgatatattttaaaattatttaatctttacacaaaagagaaaaacttaagtgaaatgaatttgaagtaacttatgaaaataacttattgactttaaatctattttttattttccttaactttttctttctatcttctttcattctcatttccctcaaaattttcaggaagcaaacatagcctaaaagtgttgtcaatgtcttaaggattggcatggaataaaccagcttttcatcatgaattacttgatttaaaaaaagtctccttaaaaatctctactggacattttactgttccttaaattattcacttgaatcaccatatccagcataagcaaaccattgatgtaatggtgtgcattgaggcttctctattgttgcaaggggcatacaattatgatcattgcaaaatatccccactgatatttgtgacttgtggttgtttcttactgttactttttctagattatcttcttttatcatttccttaaagttaacaagggctagattcaactttcaggactgcctcatatgctcctttgtgatattgttgtccatctgatgtgttctgcctcttttgttaatctgcttgggcattctttaggttgcaagggactttcctcgaataaaactctttgctctccttaaacagataaattggctgatttctcagtcaaacatggggtagatatgaagaccacaactgtctcgtgcactttgtcatcttttcatcatatgatatgtttctttgcctcttttgttgatccacccagcctctccatctcccagatctctccatcccctgggcctgtgtgtgtttgtgtgtctttgcttttttctgctaatatactatgctcttgttgggacataggctcttaaaattttctcatggtgttgtagaaaggaagaattgctgaagctgaagctgaatttga

SEQ ID NO: 13784 - DNA, 3248 bp, Vitis vinifera
  Intron number 2 from transcript GSVIVT01002660001 (locus G SVIVG01002660001) derived from phytozome v7.0 (chr-ID chrU n; pos 35734274 to 35737521)
ttccttcaaacaacaggatataggtaagtaaaaatcttcttatgttagattttcatttttatatgagatcttttagtagattcctttttctccttttaaaattaattttctgttctattttgttttccaaattcttgacacgatattatctgaattctcaggtaagatgttaagtgacaataaactaatttccaatatacagggataaacttaggttagcatgcattgttcaatctaaaattctgttttagttaagcttgggcttgcttgagaatgataaaatatggaaactttactatggaaattgatggtaccaatgcatggagtttatgatttgaaggtttttatgataataagggaaccactcctgtcaaagtaatggagtctcaagtttttatctgtacccctaaaccatgattctcttgctgccttgaagaatattattggaatctcccaagaaatcccatccttgaccatcccaaaggataggtcttgatatgcagtctacttaaactgagaacctttttttttttttcaattacaaatataatatttgatataaatagcaccataaatgggtgattaaaaaaagggggaggggggaagacaaggcaaggctaagagcctaaccttcaggccaaaacaacaacctctaaggtaagcaccctattgataaactggagaatacataagcacccctttggaagggactctttagaccaacaggtgggggaggcttaagaaggccagtccttcaaaaccaactccgactgctccaccttcctaaagatcatttggttcctttttctttcaaatgcactgaaacaaacctaaaggactagtttgccgtgttgtctctgcttcctgaaaaaactaccacattaaataaagaatcgctcactggttagtttggggtggtgtcaaaaggggggcgggggtcagtaccaggtgaagttgtattatgattctttgcctactacatggtcaattgcgtttcttgcacaggaggtttggcgattaaacacttcttggaaagtgacatactatagaacaattaataaggggatgatccttggcaaactaatgtggtttgtgtgagatgtgcggggagatatctaacgatattttcatccgctgtgttgaagtccgattattgcggaattgcagaatatcttatgttctatttttgagattcaatgaatttttttccaattgaggggcttatgttgaattgacatgtaataatagacaagtgtcagaggaaggtatggaaggtttgcttatatgcttgtttttgtgcttgtggagacaaccaaatgaccgtgtttttgacaaagagaaaatcctattgaaagggtcttctataaatatttaattcagtgggctagagtcccctcagggttagagttcaactctctttgggactttattgatggtctagggtagctagggattgtggccttgcattttcttctctctctcgacatctcttggtcatctctgtatacctcctacatgtaagggttgtctctccaccaactatagatgccagctagagtaaggaaacattttgtaatcccaatctcgcaattatagaagtcctttatgagcctcttccccaccttcttaacattagtaaccaacaaccctagcttttcaatccttttattttatttaattatttattgggaaaatgaggaatccaccctaaaagtgaagtatgtattttaatgactggcaaagcaaacttcaagtgatatgaacctgcccctctaccttatacccttttaatatcagtaggattgaattcaagacctttgattcattgccagaaggcactatgatatttgagagcagccttgccttatcaaacattgtgtcagaatttcttcccatggcaattctccactgcaatgctggtgaagcctacaaaaaccttactaacattcctggtaaaaatgtaaaaatggtttgttttttcccatgttatcattaatttaaaaggctcaattcagatacagatcactcattccatcaattctagtttttagccaataaatttattaatttggaaaattcaacagttgccattttgtggctaggttactgtttagtatttacttgtaattagttgtaatttttgtacagaaggggtatttggatgtcccctagaaatcaatcattctgttgtttgtttcctgttctaggtacaaacagatcctttttctttggtgggataggtacacacccattctttacaataaattggttacaaaacaacagtccagttgatgcataaacctggaggctggggcattctggttaaaaagcaacgattgagtcaatgcaaactaggaggctggagccaaatttgaaacaaggataatttaaatgatctcatttttcttttctcctattaaagattcttataaactcattttcaacataatactgattgcaatttctgtacaaaccatacaattatttaatttccatgcatatcaaacaatgaaaaaaaaataaaaaatccatgaaatgtttgcatacatgaattatccaaacaatttttttgggggccaattaaccatgtttttctaatacaaaccccaacacagatagagaggaaacagaaacctttttcctttttttcttttgggtgggtgggggggtggtgttgcctaggaataccttaggtactaattactctgtttgtgcttatcaaattcattacagcaataattatgcttctttcttaaaactgttggtatctattaaattcattactgcaatctatatggttctcttttcaatcatgtttaaataataacaaaatatgggttggctggtgtcaattcttaaaatttcaccatcaattatttcatgtatcagaagcatggttagtcaacttcttcactgccccttttccttacagtagcgtggaaatagggcttgtattgaattgtccattttgtttttaatgtctgtttgtgcaacatctactttctcattgaatttccggataattttgaatatcttatattttcacatgcttacgaattttgtctagatgatatgatcttgcaattatgggttttcagattgacatgttcctgggtgtgtttttttttttaccctgggagatgttgtgagcacacgggctcctgtttaattttgttttagttatgttgtttccataatctaacattttcccccttttctcgatagtaattttgtggctttagtggagc

SEQ ID NO: 13785 - DNA, 10089 bp, Vitis vinifera
  Intron number 11 from transcript GSVIVT01028401001 (locus GSVIVG01028401001) derived from phytozome v7.0 (chr-ID chr 7; pos 7189167 to 7199255)
ggggagaagttgcaaccattggaagtggatgatggcacatcttcaaagaaactgttgaaaatagagatgaaggactgtttgcagtctctgcagtcatgtacaagttcactcccagagaagaaatccattttggcactactgtccccgaatcccctcccagcatcattattccttcagatgtcccattatatctcgcaggtggattctaccctagtgcagactcttttgtgtctgctagatcttttccaactgtcttagctgctacgcatgtaccagaacttcagggctattcagatatgttcagcacatggccagtttattcatccaaccttcctgtagtttctaataatggtgcatcacgattcgaggatttaatcacgagttttgtgcccatttgacaagattgagcgaacagtcagctggagtcttgatgaattctctttcattttagagagtttggagcttaatcaaatagctgaatagagattttttttttttcatttaatgagtcgctgcaatctgacaattcaagattaagtggcttcaaatttcatgagatccactgcagaaacctctttgataattcatggcaaagctgttgcatccattgcccacaagacaaaaccactagaagcacacttaattcatgcaccagtttgcaaggatctcctgcaggtgactaagaacatggatgcagtaagtattccaaaggtgggaattgatgtttgtcacgaggaattgatgaactaactttgtttcccattgaagcactcagcttgcaacccaggtacgctctctatctcctactctcaaaattccatgaatatgcatgtcattgtgaactatgtccatatttgaatgtacttgattgccctaatgcttgtttgattagctctaataaaatgtatgttgtgtgttttattttttgaactaactttgatgttttataatagtgcttaagaagtaggtacaccctaactcttctttatgactacagtttgaattttggtttggcatgctagtgttagtagaattttaaaatcaccttagccctctttggtaccctaaatcaatcaattaattaccacacttccctcaacctatttggtagagacctttttagggtttagaggggtgctacctctttgaggtatcttcccgataagtaacataatcctcgaactcaaactcgagttttttaaatacatgttttttcaaaacttaaggagtcattttttttctcagggttttagtttcttattttatttctctttaaaaaaaataataataagtagcgactccaattttcataaaaataacaatttttcaaaaaaaaaaaaaaaaagtctcgccatcaaatggggatgcaagtgagaaatgcaagtccacaattccttttttgtaaaaaaatattgaataaattattttcaatgtggatatattattataatattagatttcctcataaaataaggaaatttattaagaatattactataaatatactaggtcatgaggggaaaagattatgagatgtagataaacttgtaaagactatacaaggtggatagaaatgtgagaaggaataagagacactagatggggatagggggctcgtggttcaagatgtagatacaagaagttaaatcatgggatgttttgggaatccaataattgtatctagtttatgtcctttataattctctatggtatagtgaaatgattctctttcatccatgaatgtaggcatagttggcggaaccatgttaaaatttagagtatctttatgtgaattgtgttatctttgtgttcttgaattaatattatttgcattaaagcttttgttggcacaagtcaagtttgactactaactagaggtaatatgtcatatggtatatatattttacatgaaaaattcatgctcgtgactatttttgttattttgtggaatattgcaacttgaaaccttaatatgcactatttaaggttgattcttatggtaccaagatcaatggtaattataattattggaatatctacattaatccttaccaagccttagatcgtagggttcatgttactaacatcctaatgatactagatccaagcaacataagcagtttttaactaaaacattagatctaagttctcaaaaataatacctacgacctggatgtttccaaatcgattccaatcggtgaagatggtgatgagaatctcaaaaccaagtgatcttccacctaatcaccttctttgatccatgggacttgtgtagagcggctacacaacttcaaagaagagagaagaggaggctatgtatctagtacactaatagattgaaaagttagtctaaacctaaaaccaatggggtttatatagactctcatgtaggcttaagtgactttagcctaactttggttttagtcacttaatccccattgggtcttaattaattatctagctttttatggttctaattaataaattagccaaatccatatacataaaaataatgaattataaaatcttgtacaaccttgtgtttctaccaaaatgtccttatgcacataaattattaattctccataatccgcaaactttaatgccaacaaagaatatgagttgagtgggactattaagacacatgaaaatactacctccttgacaatctaattatgaagttgactcaacattccattaaaaaaaaaaaaaaaaaaagtgaactgtactccaatatcttatgtcattacatcaagatgggaattgattaaatccaatttaatcaattcctccaatcaatgacctattttcattatattcaaacttatcatagactagtattcataattttacaaggtaaatgctataatatctcaagattacctttacaatcattgagtctcaaactctttccttatgtgatcaattaacatactctaactcactaaaagcatatgtcaaattccactaatcgaattactgtaacatcataaatttcataattacaagtctttaacatcacttaaggggacacattgtctcaaacccataaaatatcatagttgttatcttgagaatacttattgtcaccttccttaatcaacaatcacacaatacatagggaatatataaccacccaagtctcacctacaagttagagtcaatgaagacctcatcaatagcctaagattctcttaaggttgaaaattcatacaacataacaacttggtgaatcatgactatctaatagctaatgtcatgattcaccataggtcatcatgtctaatgtgtaaccatacacactaatgcacttatcatggaaaactcattctggtgatcaagacaaattaaatcatccctccaattaaaaggcagtatacattacaacctcagatagattgcagcctaagtccatgaattagttgtatgcactcatcaacatacaagaaacccatgacttggatcttttatgtaactcctaatgcacccaagtcatgtacaatgtgggcaatgcaaaccgaaatgctcaaataaatcttaatccaattattggatagaacagtagaaactcaagtctaactttattatattatgtcttaattttaagggttttatcctaataataatgattttttatgatgggtaagagttgacttagagttctatgtgatgtagaggtcaatttagagtttctattataaaattgtaaagatatcactttaaaagcatagagatttgccttctaggtatagtttttcattggccataaggtctatccttgacaatttaatgacatgtgttaggtgtcatgttgccttaaagagaagaaaaaattttctatcttagttctattatgatgtaattattgcatagtaataatggggaaaatttgaatttagggatttaatgtagcccatcattctaggattttcagtaagcatgcctacatatttaagggtcatgatgtttccatatggttggtttaagaccattttttaatgggataattattcaatagtgcttaattgattttgagaagaatggacttcattggcccaaatttctagaaatatgggctaacaacccaaatttgaaaacaatccccttcaatagcccaaaaaacattgaaagattaccgtaaattaagttcgcccattcagtaaacacctaatcacattgttgcctcatcactaacacaaccagatactcacatggaaaaatatatggtgatgaatcaaaaaatgtgacagacacaaaatttggttactctctatctcagttcatccacacatgcaaaccctcttatggaaaattccatatgctatgtcaaaaccttgcatttcaaaatctggtgctaagcaaacgtcatggtgcatggaaggtgaacatctaagcacatgactagagagggcatcatggattgcaacaacgtcctcacttgttcatcaactcctttgcaaaccgtgggttgagttatatgtttgaaccacattcgaacaatgtttgttctccttttcaccacatctatgttatctaatttggttgtaataatggtaacgctaggtttgaaatgggtaggaatgatttccttatttgaaggagagtgggtttttaggttttagcttctcttccactatcaataagattatgctttggtagtattgatctaattaatttgtggaacatgaagtagcattcatagggaatgcttagctgatatggagctagtgttaggcttcctaagttagagttttctgtttgtttgaatgacttgtacctggtcggtcggtatgctatttggacatgtttggaagaatgctaggtattcaaatcattcatgattgcctttgtctacgtaacatgcttctcaaacctattatttaggctaattggtagtgatgatatggaaagtgctccaagaaagtttagaagtctggctaaaatttatcaatctagcaaactttgctcttactgcatttgatgtaacaacatttgaaaatgcaatggcaaaatcaaaatggaaggcagtaatgaaaaagtaatcaatacaatttaaagaaacacaacatagaagctggttgatccacttactaggaaggaaatggttgtgcttgagtggatctataaatcttaagtccaattttgatggaattcttccaaaaatacaaaacttgattagttgaaacaagctcaaattcactgaatagattttttaaaaaactttttcactattagcaaggattaacaccataagaacaatgttatctttggcaactcaaaagaagttgtaagtttaccaatttgacatcaaatcaacattcctaaatggagtattaacagaggaggtgtatgttgagcactctattgagtttggagttaaagggattgagcaaaaactttttaaattaaagaaggaaattcttaaaaagctccaaaaacgtggtatggtaagattgataaatattttcttgataacaacttcaagagaagtgaaagtgaacttatattatatgtgaaatcccaagtacttatattctcattatatgtatctatgttgatgatatgatatccattagagattatcaaagtttgatttaagattcaaatatatatatgaaaaacttgggtcttttgaattatttcttgaaattttctaggactctcatggaatttttttgtgccaagaaaaatattctcgtgacttgttgaaaagatttgtcatgttgaactataatataataaggactcttcatgaacacaaatgaaaaacttccggtggatgatggggtcaaaaaaaatagatctaaagaagtatagaagtttggtaggaggacttatttacctcactcactcaaggcatgacataatatgtatatatatatatagttggctttctttcaaagatttatgcaaagcccaagtaagcatcatcttggtgcaacaaaaaaggttctaagatgtattagtggtactctcaactttggaagtaagtattgccatggtaataattttaaattggtggcttatactaatggtgattaggttggttgtatatataaatgattgaaaaaacacttatagatttgttctcattcttggttcaggtgtcatttcatgggcaagtatcatgtcataggtaaaaaaacaagtagcaatcaattgccttatcaagttcaccagcaaggtacattacagcgtaacaattagtgcaacatgtcaagtggtgtgggaaggagaaacatgataactaacaaccttgttttgtgacaagtctaccattgcaatgacaagaaaaaattagtttttcatagaaccaaacatatcaaacttcaacatttttttatttgagatcttgtggcaagcaactttacaaaagcatttttagttgaaaatttctatagaacaaggagtctgcttggatgtaatggaggagatttccaatttgagtggaaaaattctctagaaggagtcttatagttatctattttgcatatattttttttctgaaaagacaacacagtttttcttcaaaactatcctatagtgcttgtagcttttttaaaaaactatttgtcattgggtgatcttcaataaccctgataaattgataatctcaacaaaataatattttttttctagtcccaacttggggccaatgtattaaataaataattcaataatttataagaaaatatatattatagcataatctgcgtagtttcatataagacccacttactacataaattaaaaattttctaatatgcaactaaaaccatatgatttgttaaggagtccattgtcaaatgaatccttaaaattaatgtcaacttagatctcatctttaatttttcataaaacaaaaaaaaaaaaaaaaagttttagtctggtattctcatattgcaacaatatattattcaatgtcattaacattttgagtgtttctttgcatgagaaggcctctataatagaattaccctcttcatcttcatttccatcctctttatcacttttcatgatgctctcaataatctaatcatcacttaacatctttgagattgtgtcatcttctccaaggtagttcaagaggtactcaatattcattccattagggcactacaatcctttgattgctattttcaattctcaaatgccttttccatccaagggttcatccaaattctctaaagctatattttctatggacctaattttacaatgtcgcaagcaatttgcagttgtattcgcttaaatatctactatccaagtttaaattgcaagattcattgcatgtaaaacatttgtttgttttggatttggttgcactactttataactctccaaaattttacaataaacttgatgacaataatgcattttgaaagcttgtatgatctttgtgtcacaaggttaagtctttgatgtcatcatgttgggtggcaaaaaaaacaatttcacattcttcaatccttcaatttttagataagtagaacaattatcaagaagcaagagaacttttctagtatccatctgtttatcaaatcatcgaacacattcttgaaataaagccccaatcatccattcccatttgttagcatgatacttataattttgtacaagtttacattcttagaataccgtagtttagcatacttcccgataatccataaaggaattttctcttaaccatcctcattacaacaaataacaataataagccttttctcatctgtttttttttctttcaagttactttgttgtaagagaatgatcttattgtagcttataaaacaatcttgtttcatcaatattgaaaacatcttgttggtacattaggttatataatttaagttgacaattttgtttcattcattctagtaaaagattttcctatattatatctttccattgaagactcaaggttgttatgtgatcaacagaaacgatacaagtatataaaggtctgagaaaggttaatagaatttatataagactttgagtagacttaagctttttaaaattgaacaaaaaaaataaataaatgtttttaaaaacttttaagggtactcaagcactcgtaaaaaaaaaaattgcgtaattggactaattttataattgtaattggattaattttacaattgtaattagattacttttgtaattacaatcggatttgttttgaaaaacataatttgtcttcccatttacaaagctcccaaagaagattatcatacttcttttgggttgtgaaggagatctacatccccacaagcgctaaggtgatatccactgggagtacacaaggtgttgcatcgcaaatgttgaatataatgtaggtactgaagagtaagtctaagggtaacgtttttcaagtaaatttgtgtattgcattctcatacaatggatttgtatttgaagtctttgatcctatagtttttcatctccccacgtggtgtagaggttttccatgtaaaaaaaaaaaaaaatcttgtcttgtgtgttggattgatttgatcttttataatttctcaaagggtttattgaattaaaaggattcaacttttaggctaataagagtaagaacacctattcaccccctctaggtattccataactaagatctacaaactttcacatctttcattacaaattgatgtactttcgtcattatggattataacttgttcttcatgcactccatatcaactaattagctttcttcgaaacaacgacatgttttgatcttatattttgatttcaaaagctcaagctaaccttgaaaaaaaaactgcattatggagtatctacacaataaatgtttctcataaaatattttccttttccatgattagttctccaatcattttcacacatacttggtataaaacaatccactcattgagagtcttctctaactcaaggaattttgcgcctttgtattgtttaacatcaccttttttaagatcagacaagagatattttggaaattgcttgatcatattttatatcgtcccttgattcctttgcaagttaaaacttgtttgggaataggttggattttctttgttatacttacacaatgttttacacattttatccatcattagcgctttctttacacatttgagatgaaaagccgtcgttatatgacttgtcctatagttttttgttcacttaaatagtgttagtttgtaaaacgaaatattgaattaaagcgatgttagatataacaatttggaaaaaaaaatatgggatgattagataaattaagaatttattaattaatcaataagctaatatttgttcaattaataaatcttccttgatcccaaggtaactgtacttttaattcaaatggttcttgttgattctccttctcaaaaactaccccaatcgttgattcaataacaacaatgatattctctcttactgtgcttccgatcgagaagctgcaacaaagaccagtgccggtggttccgggggatttataggggttctcaagtttgctctgggccgcccttctccccgtgaaattccacttacccacacattgtgtgtgcctctccacttcttcttccttcgacccactcggcgccaaccatccatctgctcagggcctgtttgtaccggaatctctctgctggactgtgttccattaatcttggattaggcatagagcaaaggccgggcctcacagaagtcgcaatgggttggcccatgacataaagctctccccattccccaaccaacacaattcgattgcacctttccagtctaaagtggggtaaatatgcttcatcttccggtctaaagtaaacgtgcctcgtttttccattgtaaattaaatatgcttctgttttttccaattctaaaatgaacctgcttacttttccggtctaatattctcaactagactagtggagtcttaacttcagtttcactggctattcccatatctatgaaaaattctacagtgccgcgtgggagcaccgtgaaggagatttcggtacccaagcatgacccttatatataacgtgagcaacatctctttgtactatagggagatctgactgatcagtagaatacaac

SEQ ID NO: 13786 - DNA, 3013 bp, Mimulus guttatus
  Intron number 2 from transcript mgv1a017343m (locus mgv1a0 17343m.g) derived from phytozome v7.0 (chr-ID scaffold_83; pos 130658 to 133670)
aggttttggtaaaaatcgagcttcctctttttcaggttcgtattatctctgtcttttcccctctcttttttagatttagattttttgtggttatctttgtcagcttcattttttattatataagttgtataatttgttttgaatttatacaactttgtatgtgaagggaatctggacgttaagggaataacatatttattgaaactgttaattgcgatttaaaacgatgatcatattgtttgctcttttagagaaaatttggatattcaccttttgatttttcgttttatttctatgtttttgaagatttttggacatggatctgatattctttttgtgttcgatatataatagatttaaaatgactgatctctcaatggtttgtattggttattttatcatctgtgtttacatcttatttagattgtcctgcatacagatctttggggcgtgaaaaaggtacttgtttaaatattggctgaaaaataaatagagaatgataagattatagttgaataaatgtgctgctttgctttgttgcccttgagagaaaaaaaagaggatttgcaattattgaatgattatattcttctgtttatgagcataaccatgcatatgaatgatgaggaaacaacctcatcattcatatgagttccttgtaacagactgaatgagtcagttttattgtgtaaaaacaaatttacttttcagttcgttaaacaaaaactgaccgacaaattgtgatgtttgggtcataacataaaacataatgtctttatgagttgtaagtgaaaataaatgctgaactgaagatcagtaatcagttaagttattcattttactacacaaactgaatcagtagtgtataaagaactaatttgagttcattacactagtttctgccaaggttttgaggagtttatattgttgcctgtattttatgtagattttctattttctacgttgtgcattgtattttgtcaataatgtttttctttgacctatatttggtgcaaattattctgtttttttgtgaaaatgtcatgcgctcagtaaaaagttgtgtttagtaaaagttgccttgcattaagcatttcagttcttgttaattaattggtgtaaaaacatataaattaagcaaagagaaaaggagacctggagaaaagaaaagcgatgaactcttaatagctaaattacaaactaaacaacaaaaatactattgtaaatctactaataaatagacagtatgaaagaaatagatatatgctcatacatccctaaaaatgcgtcaaagcattagcaactcttctacgtgaaagcagaggagaaaacatagacaactatatactcataagaaataggaatcaatggcataactatccaacttttcgaatgctgatagactagagtaacgcgtgagcagattcttaacatctactacagttagaaatattataggatggtgtggaaatgcccaacaaaattttcttcctcttacctttttaggctcgatgttcagtctgcttcttcaatttttttgaaaattgaagatacagaatttcctataacgtgtaaggttacaagaagatgcaaaaaattataaacattgaccatacactttatttaaatctaaagaatttgttcctaaccatttgcattcttcagagcaattatagttggtaactactatcactcgtgttactctgaatgcaaaaaataataatcttgtttggaatctttatatcattaaataaattgaaaaaaattatctaaacttacacaacaagtggagcaaaacaagtacaacttattattgaacaagttgcaggtattagtaaagaaaggcattctcctgatatgtaggatatagaagttgatagtttagtgattacagagtagttcatctatgaaagtaaaaattggaaaaataaaccgagaagacaaccttttttctgtgacagtaaacatttgtgagtgcctttctgtgggaaatgagaagcttgtcttatagcttcctctctcactccttattgcattctctctcctccctttcaaaatgagttagtttcaaatccagacagagggttctatgtttttgtggattatggagcactactgtgtagctgtatatccttacacattaattgtcgtaggaaaattatctgccattttcactccattgtgattcttgagcaacaaagtgttagtgatattgggagtcagaataggttggtgacgtttcctatatttgttattttcgagcatgtatccgatgattctgcttttcttgcagtagagtgaattccgacctgaatataatgttggacgaaattgctggttctgtttttatttatttttgtctctttttttcaataaatagagtagtgagcttgtcctaatatatgatgtgcaatcatcaagcaggaatcatttactcataaattagttgtgagctaccttacaatttagctagtgaaaattctctgaatatgaatgtgagacaccaaattgataaagtacttatcttttctctcgtcatttctgctggtccagcttgtgagtgactataattagtgatggggtaaaaaaatcttggtatacaatgccaagaagttgcctaagtgcttcactgttaacaatatatttattttgtttaattatgtgtcatgtgacaaaaaataattcaaaatacgagaacactgctatccctatttttatagattttgataagcctcttggatagccaagggaaattgtggtttcaggtagagctttgtgcaataattttttgattttgtgaaaactatatcatatttgctagtacagtcgtagcatctatgttagtacatgtgcacaaatattggtaatgcttcatgtttctttccttgtttgagggaaataaataaatagataaaagcatcacactgctcatgcttcatgtttctttccttgtaataaagtattatttttggcatatgttttttttatcagaagcaaggtcgaagagagggta

SEQ ID NO: 13787 - DNA, 740 bp, Mimulus guttatus
  Intron number 1 from transcript mgv1a003015m (locus mgv1a0 03015m.g) derived from phytozome v7.0 (chr-ID scaffold_3; pos 1995797 to 1996536)
acacctcacaaacctcacttatcttctgtgtactggtaagcagcttccatttttttttttttttccgattattactcgtctccaaatcttgattctttttctttcttctttttttttttttttttttttttttggttcgatcacattttatttcggtatgtattaatgctaatgattaatgattttgctggtttttttgagattttttttttggtggagtttcaccttctttgatgcaattcgaactcgaaatagagtgtgttatgatttatgaacttatgatcatggttcccggcaaaagtggcggtacactgtcgtgtcgtcgcggacactgctgttccagttccattgcagtgtcgcggctggaactgacaaatgttaattaaaatgtaaaaaaattagaattaatgtcgaataagtttttaatgttaatattacagtagaataataatatacaaactaccattaaaactccattttttaattttagaacaaaattcttcaaaaccttgagaagtgtataaataattggaatttgtttattatgatctgattatttcataacttatgatcagttaataattggaatctgttttcagaattcgaaaatcgaaaatactattggatgtttaaggtgtcgaaacttttggtattttgaatgcttgagcttaaccgaaaaaaagggtgtgtttgtgtaattctgattatgtatatctgttgttgtttatagttatacagat

SEQ ID NO: 13788 - DNA, 945 bp, Mimulus guttatus
  Intron number 4 from transcript mgv1a001461m (locus mgv1a0 01461m.g) derived from phytozome v7.0 (chr-ID scaffold_13; pos 1202705 to 1203649 reverse strand)
actcctggtggtgaccagaaacaggtgagttacttcccctattttggaacaacaacacgaggccaccaggaatcaccttcctgccgctttttctttattttttgcagttttgatgtgatttccggattttttttcctgaactaccgatattatttgacaactttgagaagattagcatgatttatgtgttcacgtattgcaaaaagataccagctcactgccccatacattagccatgtatgtccaatgaacaagacttaggtgaggactagcgttatagaagaatgtgctatctaccagtcattcataatagatgcccgttatacgaattttgatgtatatttaacctataaccatcatttctaagtatcattgttcatgatataacatgaaacagaattaacagttatcctttgagaaatcgtttgagtcttaggtatgatttcattgagttaatttttgcagtttgaaagaccgtctgttccttttttcccctctagtttttttcccttcaacctacgatgcttgtatgagtttcacttagtgttttgcgctcccacattctagacagacaattaataaggtataaagtcatttgcaagaaaaaagaaaatatgaaattggtaatgggttagaaagatgttgtatgtctcctgtcttattaatgtgattggggctgggaattttcgtcatgcttctgtttccaacttgctgcttgcttatgaggcttgtccccacggggcctttttcttttctttttatgttgctattttgatggtaagaagaaattgttttgaagttcctttttctgctgatggtttcctcatcccatgatgcatgttccatgtttgatatttgtgataattcctgtcgtattatatggttaatgtattctgtatttttattccagataagttttcaagaattcaagaacaagctacttga

SEQ ID NO: 13789 - DNA, 1144 bp, Mimulus guttatus
  Intron number 1 from transcript mgv1a017967m (locus mgv1a0 17967m.g) derived from phytozome v7.0 (chr-ID scaffold_37; pos 967520 to 968663 reverse strand)
aatctttgtgggtgtaaaatttagtggaatcttttagattatgtagaatattctccaatttgtacctgtttgaccccattcaagcttcacattttaaaacaagatgatcataaaatgtgtctcctgacttgtaaatatcaaaattgaggtgcatcaaaaacaacatttttgcacaaaacaagtacaaaatacagaatattccacgaaatttagaagattatgttgaaattgacatcataagagcggacgtgtgagaagatttgtagttgagagagatgtggttgtaattatcaaaacaagagaggttttttttcgtaattcaaccttaccttcagggctgaccgtaatttaccaaataaataaaaacttgggtaaattacaaccacccctgaggtatggttaaattacaaaaaaacctctcatgtttgggtaactacaaccacaactctcaactataaatcttcttacacgtccacccttgcggtttcaaatttagtggaatcttcgagattatatggaatattatcacttttgtacccgttttatcccgttcgaactccacattttgaaacaagatgatcataatatgtctttcttggcttgtatatatcagattgtggtgcatcagaaactgtatttttacacaaaacgagtacaaagtaaagtacattccatgaaatctagatgattattttgaatttgacaccataagggtgaatatgtaagaaaaaatcatagttgagggggtagatgcagttatccatataagagggttttttcgcaaattgactatacctcaggggtttggttgtaatttaccctaaaaattaaaaaaaaaagtttaatttgatgcactattaaaagaaagaaaaagaaaatgattaatcatagtatcaaatatataatgggtgcagttcagtttgtaaactgtaaccactaacaccaatacacacacacatatatatatataaccttataacactaataaaccataaacatccccccctctctctctctctctctcatctctctctctcggaaaagaacatgaaaatgagaagttctctgttttcaagcttctcatatcaccggagaaacattctcgtaaggatcaccataccgtttcttctctttatactcgctg

SEQ ID NO: 13790 - DNA, 1657 bp, Mimulus guttatus
  Intron number 2 from transcript mgv1a001135m (locus mgv1a0 01135m.g) derived from phytozome v7.0 (chr-ID scaffold_17; pos 629709 to 631365 reverse strand)
tcttcatttggctggtatgccattttacaaagtttttgttttgttcttctgttttttatttggagaatgatatcagtcgatcaaatttaacgaaggcttatgtcagaattgcttgggttcccataattgaatttattcataactgttttcaccatttttctcttcttatttgatatgaaatatctcattcttcattatacacttccatgtgcacttcatgttttgtttttttagctcaagataattttgcatgtatttatatatgaagagaaactttgaagtgctatttgaagtttttgtttcatttgcataaaacatagcaacagtttgtctgataataccaaaaaatgctcccactgttggttaaaaatctacaattaaactgcatactgaaagagtaattttttttttaattcctaacaatattacctgagttagtagttagtaattttatatgtccagaatattcgtgcccaataaactcttgccctttctcactcaacagcttaatctaatcttgtaatgtcttcgtttttactggataatcgtgcttggtctaagttaatttttttttaaatggtcttatcaatgacctacaaccgtattcaaaggccccaacccaattccactcgggcaatgccttcgcagtacttgatcgaagtaagttcaatgactataagttacaacttacaaggttattctacaactacatcactatgtctgaaccatccttcacgtgaaaacctcatttttggcagtgttcttatttatagctcacctttagttatcattaagagagattttcaggatgatgacaaatcttttgattcctgtatttatgtttttctgttgaaagaacctttaagcggcctcataatggtgatgacagtcgaccgaaacaatctttattagatggtggtttagttttgattcctgtgttctgactgtactattacattgcaaattaatgtctggagacttgtgttagcattacgattgaggccttcggcagcacagaacctaaagcttgcatgagtcagtttaaagcattttggcccacccacctaaatgacaatgcttcgagtgatttcattatctcatgctttggacagtatctctgatttctttgtgaactttttggagaaggtcaaaagagagcattgggtagtactaactattggtttttcctcttgaaatccaacgctactcgtttgtggattgtaaccatttagattattataggtttattgtttccttgcatcttctgaaataatctctgtatcaggtatttttgagttttgagaagcatttgatcttcaggctttttctctttctgggcaatgatgtacaatatattatgttcgaattagttgagacaagggttctgatgtacaatagttttacgcgactctgaatgaattttgagaaaatagcgtcatttttccttatccaaggagtaatgtattggtgcttagaccattgcttatctttttttgatactcgtcgatttttctgttttattcttttttcctgccgaaatagatttattttggtggttcgatcatttaatattagaaagcatctcttgtgacaccctttgtcgttgtttaatggttgttcagggtgctgaacttgctgcacaggaaggaaagagtgc

SEQ ID NO: 13791 - DNA, 677 bp, Mimulus guttatus
  Intron number 1 from transcript mgv1a026574m (locus mgv1a0 26574m.g) derived from phytozome v7.0 (chr-ID scaffold_34; pos 1723555 to 1724231 reverse strand)
aaatttccgatcacgacctcaatatcatcattgtaacgtaaatccttcctccaactattattacataccaattttcgatttcgaaactacgaaatttggattactatatatatttcattctcaatttcgaaatttctaaaacatttcctaaatttcttttattttcttcaagcattacatttataattccaatattattatttattatttattttatattatagtttcttaataaacaaaatacaaatttccgaatttcattgatttcgattaaatcatttccgtttttggattaatatttttgaattgcagaaatttcaatacttctgaatgttttggatcaaatttgaaatatatatgagatttcaattttccatccgattttaataaattttgtagaatattagagatataatatcgatattatatataggttatattaataaaaaaattcaaattccgtggatttcgatctaatttttcttctattttagaactaatttttccatttcaataattccaaaaatttgaattttcgattttccaaaatgattgaaaattagtttttcacttacgaaaaaattggagttttttcaaatgtctgtttactcaacatatatatttcacatttggtgattgcaggaggtgttcttagcgggttcagagacaacaagcag

SEQ ID NO: 13792 - DNA, 228 bp, Mimulus guttatus
  Intron number 4 from transcript mgv1a003006m (locus mgv1a0 03006m.g) derived from phytozome v7.0 (chr-ID scaffold_11; pos 1102516 to 1102743)
tccaaggagttgtgcaccgcgatcttaaacccgaggtaggattttgtagggtaaattaaatgcttattaatttgacatgtggcgttattgcaaggacagtttaatatttcaagaatcttgcatattttgttatgttggatttgaagctattctttgtagcttgttttaactacagcgtgttttactttaccagaatttcttgttcacaaccaaggaagacacttcacc

SEQ ID NO: 13793 - DNA, 1814 bp, Mimulus guttatus
  Intron number 3 from transcript mgv1a013781m (locus mgv1a0 13781m.g) derived from phytozome v7.0 (chr-ID scaffold_77; pos 1031523 to 1033336 reverse strand)
ccttgtccgaaaaccattctcttcttccacttctggtacaataaaaacatttaattacttgtttttggttatattttctctagtgtggtacttaatcaagcttgcaaatgctggtaattctacacgacactttatgcaacttgtcatgaagaaacttagtcggaacaacgataaaagttgagttcagattatacttgcataattgtttttagtagaatatgcctttttttctggtggtgcaaagtgcaaaacacaagggggtgtggtttacatgttttatttatttatttgagtttttgggctttcctctttatttgttttttatgtgtgcctacctgttctatttacattattgatctacttgaaatttgggctaggcattctaatagcttcactaggctttatttgagccgcttcagctggtctattttgagtcctaggcattgtagaaaaatattttaaaatcttttattttgactactttctcaaaaatggagtttgatgcatttcagttgttctcacctcataagaaaacaggttcaatactagtatttgggaacgcgtggtagaaaccttccggatgaatatgatatgtatttgcttaaattgtcagacgagtttggtagttcaaattgtctattaaaagttcatgcaggactattttatgtctcttgagctcttacgttgttacttgttatttggcattccatctgaaatctgtggatcccaaatcgcaggaaaagtatcagaagttgtaacatagtagagagagtgcaacttttgaagttttggatttttttgagagttcatttatatcttggcctccaagtatgtatgtagtctttgcttggaattaagagttgggagcataaatcagtgagttgtcagcttaaaaaaagatactctttaagtcagtaggaaggctctaggcattagactgaagcttaagaccgatgacacgtgcctctgcattatttattatatcacattcctgatacagtatatgagcaatttgtttgagaatataggcacttgtgctagctatatacatcgtttgttgtgataatgatgtcataaacgcataaataaaatacctcttctttcaagcacattgcagtattgcatatctatttggcagtttggacaatcaaatgcttttactcttatgccttcagctaatgagtttggttgactttgatatgagataagtaaaacatagcctcagacacacacacacacacacacactttgagagaaaaccgtatattttatccacctgtgttgcttataccatcactgctagagtgactacaatctttgaaccagcggtatcttacattatctatttttctttgatttttaatatccaagaatgcagatcacgtaccgaatctggatattatgattgtaccactaatctttgggcgtgctgtttatgttttctgtcatatgtagtcatgtagatgcatataattttaactggtgaattggatctctttgaaagaaaaaaggcattggataaaggaaacgaatcactaaaaacccaatcaagtagacaacattacagttgaaaccctcaacgtactttttggtatagctgataatcgactttgttcggtagaattactgtaaacagttgtcatgattttggaaatgcacttgcaacgtgaaatgtgatatattgactcttgggtgtgtgaactatgtttaatatgtgccagaatagaatttctcgtcatttcttaatcgatctggttgactgcaaaatttatgtatctttataatgatgtattgactaggttctgtaaatccta

SEQ ID NO: 13794 - DNA, 1790 bp, Mimulus guttatus
  Intron number 1 from transcript mgv1a008331m (locus mgv1a0 08167m.g) derived from phytozome v7.0 (chr-ID scaffold_159 ; pos 286529 to 288318)
aaaaataaaaatcgaatctttttcttcctaatcaggtaactccattgttctttgtttgtgggaatgtgtgtttcttgggtgttagaaaagtttgaatagatctatgttcttctgttcttattatttgatgtggtctctgttttttttttttttttatgtattaaatctctgagtttctgttggtttgtaatgcatgtgattagatcttgattttggatttgaggttatgtttttttttattatcccagattgattaattgaaaaattgatctgatgatttttacatgcagagccagaaactttgattcattgttggatctaaagtttgtgtttttatagcttttcctgatttcaagaattgatttttatcacgggattcttttgattttttaatattgatttaaattttaattattattaaatttgtttatggagcagatgaaaggttacatgtgtttgagaaatatctgagatatttttttccacttttcacaaagaaaagaccattcttttgtgtctgccataccagcagaatctatcattcaataactttggttcatctgaatttaattgcattcaatatatattaatattataaatatatataatattaaattgaaaaaaaaagtcattcacaaatcacaaccctcttgtgatttgcattattaaatttcaatcagatccagattttctcaagatctcctttttatcggaacttctgcttcgatttcttttcgtctcggcaatttgcatcgaacaatttgtccgaatagaaaatatgtgtgataatctttcataaaaaagagtgtttaatgctgtacaaatttgtttggtattgaaaatgatttttttaattcgagcatcgaacgtgtcacatggttggtatcaaatcagacaagagtttggtgaattgtttctaagaatcgaggtccattacacaacaccttggttttggtgctagtgtttttcacgtggtccttcgccattcaataatattctcgatgttttatttggtcccattcctacatttcttgtatgaactcactatactataatactcttaatattatttaatttgtatgctatgcaagcttgtttttttctcttaatgtggggtttcttcttcgaataatgacggttaggtgagatttgtagtataggtaataataaatagtgggtagttaatggaagattcaatgcctaattaggtcgaatactcgataattctataaataatgctcactcagcctattagtcggtccacagtttcaagattagccatattatggacttggatcggccgtatattgactgttgactaatactcaattatgtatgttgttttagccgcccttcctattcggttacatggttacatacagagatgtattattgattgaaatataataaaagaagcaactttatttttctcaatataaatatcttgcatgaacaagaatattataatgcctgatgtgtcacttagctggctgctaattgtattttttcgttatagtcaaggtgtccaacatggaatagaatcaacttgtccgattcttgtgcgaatgtgctttagattattcttcttcaatttgtctccactagttcgattttactattttttcttttcttttttgaaatttgaatattcaaaagtgatcaatttgtcgaaaagacttggaaatagaattcgtttacctttttggtgcaatgggttactaataaaaatcaaatctttattttttaaaccctctgcagattgttgaacaacaatgggtgcaggaggcaga

SEQ ID NO: 13795 - DNA, 1627 bp, Mimulus guttatus
  Intron number 1 from transcript mgv1a010804m (locus mgv1a0 10804m.g) derived from phytozome v7.0 (chr-ID scaffold_53; pos 1057497 to 1059123 reverse strand)
cagcccatttctcttcttccgcgaaactcgatcaggtttgtccttttcttttttcatttcttatcaaatagttaccccattttgcactacttcattgctgttcatgatttttgacttgttctcattttgggttttgctaattgtccgctgatttagcctgattgtgtaagaattatcattaattgtataagaattttgaggaaatcaaaatggaaataagcaaatctcagtttcgggttgggtcgggtcacatggcgtagaagagacaatgggcattgaaagatttgatcttttttgtggttctatcaattgaattaaatttctttcctttctatttctgcaattttgcagagagtttaagtgaaagaagatagtgtcactgttcccttttacttttaatcatctgctctgtgaataaaatctcaagctttcgaaatttgatgttgttttctttgtattagtaaaactttagtttgtcgtcttttacaactgttgagtagcgtgaaaaaatctatgcgtcgttatatttgagttattttgttgattgttagcaaaatgggatgctattacggagcgttatgcatcgtcattacatgttttcagtccatggaaattagaaaatgtatacagtgtgtcgggtacatttctaagctctagatctttacgaggacaattttatcggaagatttatactatcttatcgagatacgatattatttgcgacaactatttcttttggttgagagcttagtcgagtggtagatatatatgaagacttacatacagcatcagtataaaagatattgattgtgttcgttacattttatcctcgagcattctttagcaatgaacacatagaagcttgtgatgataataaataaaagcagcgtttggttggggagattagccatgattaactaaataattggactttatttgatgtttggtatccccaataacttgccgggtcgacccgcaaataatatgttatcatcgtttatcttgccttctaggcatgtttttattggattttccaaggtccaacaatacaattgggttgggtttcattagattatttaatcttatcttggtaaccaaacgaggccatagggtacagaattatagttttctacatcatcaatatgtaatccgtgccaatcatttaacctttttatcgctctgccgtactcgtatatttgctaattaatttattttttcttgttatatcataaaaatagctactaaatatcttgtataattgaataaaatgaatttaaacacctctagttgtgaaatacgatgcaaacgagaagtctgatcttctgttctgttcatcaatcaaagggtcaaatttttaataacataattgtatctctaccggggaaaatttcccagaatttcgtaagcaattgtagttttcaaacaagaagttgtgtagtttcaattttggaattcgtaataccacttatatatacgttgattcaatgcgatgatatttccgtctctaaagagtcaccttttatggatacagtatgtttgtcggttcttataattctgttagttacaccattaaattgtaagtttttaaccgtttgcagatagattgaataatatcgcgtacgatcaa

SEQ ID NO: 13796 - DNA, 418 bp, Mimulus guttatus
  Intron number 1 from transcript mgv1a015313m (locus mgv1a0 15313m.g) derived from phytozome v7.0 (chr-ID scaffold_36; pos 68824 to 69241 reverse strand)
tgaggggtagtcatcgtcgcactcaaagtgctattgtaagccgccccatctccccctttttccctatacctaattttttcacttcttcaaattggttcctgaataagggtttttttgtttgtttctgtatattaattattgtgaaattaattctttggatttgttgatttgtttgttatttcaagtgaaattggtagtctaataaatacatgacatggatatccatattagatcaagttgagtgtgtgtgtgtgtgtgtgtgtgtgtgtgtgtgtgtgtttcttgattggctaaatcgaactacatttatcgataattttacggaattccttcgcttttttgttgtattctgtgatcaagaagtagtaaaaggggattcttgataatcgcttatgttgcgtttttcttgatgtaaagg

SEQ ID NO: 13797 - DNA, 1471 bp, Mimulus guttatus
  Intron number 2 from transcript mgv1a007917m (locus mgv1a0 07917m.g) derived from phytozome v7.0 (chr-ID scaffold_31; pos 1286059 to 1287529)
cttgtgagaggttacctttcttccccttctattttaattttaattttattcatttgggtttttttttcttggatgatggaaaattgaaatataaattacccgattcttacccatattaccaacattgaagaaatatgatcgattgttgcgtcctttatccggcagaataaccggcaagaagtctaaactgttttcaccgtgtattagtttgaataatctgcaattatatgtttaatactctcgggagatctctacgtagagattgaaagtttattaacaacctgctatttcgcttttagcttttagcttttaaggccccgtttggttgccaagataagattaaataatctaatgaaaacacaattattttatcgaaccccagaacgtcaaacaaaaaagctccctaagaggcaagataaagcaaaaagcaagataagccacggtaatataatatttgtgggtcgaccggggaaaattattgaggataccaaacatcaaaggatgtacaattatttagttaataatagctaatctccccaaccaaccgaggccgaaggatgcaagtagtgtgtggaattacttcgacggttcgacctgtgtcggcaaaacgttgataatatttatgtcttcagaaatagcaaacatcgtgtggtaattatttagttttcctgtttttccccatctcttacacatgtgacttgatcgttatattcaggttcacggtttcatctgttaaattgtagctgtttctaataatcgcagcttaatattatcattttatttttggtggcatgtcgttcataaacattaattcagcacgcatattattctccatgtttttgtgaacctgcttgtttgtttcttctgtggactcaatcctatgaaaaatcttaaactcatctcattattagagaataggtaaactttttcatttacggggcacaaattgcaagtcatctctctccccttggaaaaaagaatcatttttttttgtctatattatctcattgtttgaggcatacagtcttttggtttatgtgttgtagttcatcgttctcaccttcttttacggtatggactgctgaggtagcagataacagagtatattacgagacttttgcttgtgaatgatgttgaaggtaagatactttaagagaaggatttggagtcgtctctgtcataggaatgttcagtgcccgtgtatccattaatctgaatactctattggttatctttttgcatgctagtgatcgactgatttgtgcacttgtaatcttgcttgtccgtctccttattgtgtgcagcatattagaagccacagaaaatactcaatttacttgtccgaacatttcttgatttttctgtgaattttatacagattcttcgtagttgtattttattcggctttgaccattagaatcttaacacgaagtaacacttcctttgttgctgcataggctcttaccgtatc

SEQ ID NO: 13798 - DNA, 381 bp, Mimulus guttatus
  Intron number 3 from transcript mgv1a004686m (locus mgv1a0 04686m.g) derived from phytozome v7.0 (chr-ID scaffold_54; pos 27922 to 28302)
atttctatattcggagattgtacctgcgaattcaggtttcatttttgttctcggcagcatcttttttttttttttttttttgttctttggattctgtagctttgtttttggttggattcgaggtgatctattatatatgtttttaaatgattgttcgtttacgatttgatattaggctccagaagttaagaggttttcaaaaaaaaaatgatttgagagttgagactggagcttcatcaataggaaattatagttgcagaaatcggaatttttttagcatttccattctccatcatcgaaagaaagattatggggttcaaataattgacatccgtttgatttgcaggattgctttaatagaccgatatcaagctctcccga

SEQ ID NO: 13799 - DNA, 1214 bp, Mimulus guttatus
  Intron number 3 from transcript mgv1a007568m (locus mgv1a0 07568m.g) derived from phytozome v7.0 (chr-ID scaffold_124 ; pos 633494 to 634707)
ggtttggggattcttctgcaactgaacaattttaggtttgtactcgttattagtctaatttgcgccgtaaattgctctgcacgagttaactcttttcttccagtatttacgcggtgtgcttctttcactacttgacttttgcatttatatgtgtagtttagttcttttaaagttttgggtaaattacggccacctcccgtggtaaggtcaaattacaaaaccctcctcatgtttgggtaattacaaacactccttaactatgaatcttcttacacgttcaccattgtagtgtcaaaattagtgaaatcttctagattatgtggaatattctcctgtttgtacccgttttaccccattcgagctccatattttgaaacaagatgatcataagatgtgtcttttggcttgtatatatcagattgtggtgcatcagaaactgcatttttgcacaaaacgagtacaaactagaggacattccgcggaatgtagaagattctgttgaatttgacaccgcaagggtggacgtgtaagaagattcatagttgaagggtggttgtaattatccaaacaggagggggtttttcgtaatttgaccttacctcgggggcgaccgtaattatcctaaagtttataatgatattggatgttttatcaaatatctgaagagaaagcaataaggttttgagcctcatcaaataccaatccacagattgcatatgccaaatcctttggttcaatcagtaatatccatgttattcttcgagtaacattgtggagatatagaactggtatagaagttatatatcagtggaacctctacttgctggaatcactgaaactatgagttgttaaataaatagtgacagattgaaagaactaacgaagcacgatctaaaaacaaatggtgtgtcgaggaaatgtctccaactacttggatttggtatttttcatggtctggaaaaaggatatttgtgagggtggtatggaactgttaactcttgttggacgccattttcttaggaaataggggaatgtgctgacattgtatttattgtaataaataaaatggcaagacgtatcttgcactattaaacgcacttcaattcacaaaaaaacggaaagataatgatctagtttgtatacggattgtttattgctaaactcgtgaaatatttgcagcggtgttttgggggcttcatctttgttgctcgttt

SEQ ID NO: 13800 - DNA, 643 bp, Mimulus guttatus
  Intron number 1 from transcript mgv1a000873m (locus mgv1a0 00873m.g) derived from phytozome v7.0 (chr-ID scaffold_26; pos 670881 to 671523)
ccgaagagtacataactcgaacaactttgcagttggtaagcttttcttactctttcgattcgtttgcttcgactagaattttattatatatattctttttttagaaattttgagtttgtattttgtagatgctatgattattggcattagaagtttgcagttttatgtgttcgtttatgatttcgtgcggtatcgaatgtattgactagtaggtgttgtgggttcgacaatgtggttgccgatattctctaatattgacgattaaaaagataaaatgcgggttgcccttcgttgttaattgttacctatatgcagtttgagaaataaagcaatttgaaacgtagttttgctgtggcgtttacgtaattacacgacatgttgccatccttcttgttcggtttaattagttgcatataagaaagggcaaagtagtcatatggatttgattttggcatggtattttctcgaaaaatcgtttgaagcaaagcgaaaaactaacaatttaagtgattattgtttcttgttttcgttcgatcctcatgtttttttttcgatagatttagcggggactgactataatgccctttttattttgcgtgcgtcgacagtttgattttgaaagtgccgcccctcccgagcaagc

SEQ ID NO: 13801 - DNA, 550 bp, Mimulus guttatus
  Intron number 4 from transcript mgv1a009983m (locus mgv1a0 09983m.g) derived from phytozome v7.0 (chr-ID scaffold_122 ; pos 475624 to 476173)
agtcagcggtaagcttgttgattttgtgagaaatcatttcactttttccggtgacttgcactgtgattattgggcgttctttaattcgtatttatctatagacgagagctggaaatttctcatctttaaaattaactaaaaacggaacttctagataaagtagccatcatgatttatttttttctagctaatgcattatcaactttagacgatcagacaatcattttgaacccaaagttgtttcttctgttagactttcacgatttaccatgcaatggtttctctaatggtcctaagaagttgtatctatgggtagagtcgagtctccagaaaaaaaaaagaaaagaaaactgttattggtgttactcaagaaattatgcatgttacaaagcttcgtcatagtcatatttgaactaaataattattcttgcgatttgtagatacgttaaagctgatgatttatgaattctagttaggtttctggtcacctgtcttatatagttgacgctgttcgattcacaggagggtctcgtagagatcagggaagatt

SEQ ID NO: 13802 - DNA, 609 bp, Mimulus guttatus
  Intron number 1 from transcript mgv1a016060m (locus mgv1a0 16060m.g) derived from phytozome v7.0 (chr-ID scaffold_117 ; pos 835606 to 836214)
aaatcgaaggctgattccaggaaagctgacagcaagtaagctatgttaaaatgttttgaaattcatctctgtagatcgagttttagttaatttttttttaaatgctgtgctcagtaacctaattgttgtgattttgcaattagtttaaatctggaatgctcttaatttttttcaaatttgcatttgttgtttcatgtgtttttccgtgaagaatctgattaaaaggatttacagtagattaagcacttatactttttcctcgagttttcgaaccgatttagattcgtatagaatttgacctaagctgtaatttgagttactgagatgaatagtagtccagtttgttttgtcaaatcaatgttaaaattttcgtatttcatatttgttgtcgttcatcgtttttcaaaaaacggagaagaaaaaaagtaactatgcaaatctgttagtcatgactcatgtgcattctgtttttttttttcttttttctatttcatttgtccgtaattcatttttccgattttcgatttacgacaagttcaattttgactaaaatttgtcacgagagggaaatcaggcttgctgtgaagaagacgactaaggaaaagcaat

SEQ ID NO: 13803 - DNA, 1003 bp, Mimulus guttatus
  Intron number 7 from transcript mgv1a005548m (locus mgv1a0 05548m.g) derived from phytozome v7.0 (chr-ID scaffold_8; pos 3213951 to 3214953)
aagcatatattttgtgaagactgcgtttcagagtttgttttctttcctttaaaagatataaaaaccctgagggatactttgtctttattgccccttaaaacagtttcttgtgtttttgcaatgccctttcatctggttccctatggctagacgtattcataaagttatatatttatatgaacattctatttattctgagttcatttaatacaagtatgagtcctagggctatttcagttttgtggtcaggaatatataagtaaattgtgattaaaaaaaatcagctgttcaggattatatgatccctttcaatcttatgtttagttagttagattgtgtgaaattgtgatagcacactaaaattcctagaatcccccagactttaatttgcttatttaatgacggggtcatttggtaattctcggattaggtgggccgctgggattatgcagttagaccactctggtctggtggactacttatccaaaaataaattggatttggtcatggcctcatgggccttccatcagttccgggtctgaatgttgatttagcaatagcaagttccaaatgattcacataaataacaaaaacttttgaagaacttactcactcgtataattgtgatttttattccgaaatttgactctctcaaagtctcaattgtgttgaaattgccaatatggagaggaaacaaattgagtaatataatgcaaatttacgggatgttcgtgtgtgcgtgtgtgcgtgtttgttgcgtgaggggttgtagtttgttggtataattatgtgtcgggacatttgtcttgcacatttgagaaggatttgtgttgtgttgatatatgttttccaatctctcttaatttacaagtgtagcttagcttcctgtctgtttaataataggaatattcatgtttctgagtattgggtgattatctgcttcttgttcactttgtaacaatgcaattcgacgtgtttgtttcaggttcgaaagagagagaac

SEQ ID NO: 13804 - DNA, 2814 bp, Mimulus guttatus
  Intron number 3 from transcript mgv1a016536m (locus mgv1a0 16536m.g) derived from phytozome v7.0 (chr-ID scaffold_178 ; pos 150802 to 153615 reverse strand)
gtgttcatcctgtatccctcgcaatcggtaagcaagttgtttagcttatttacattgtgacaaggagttatcatgcatgttatatggtacttgtatgagtatttctattgtatgacatccactttaaatatctgggcatcaattatcattgtagtcatttattgtgttccttagtgaaacttgcgttttcccctttttcctcgatggagaattgacctttaccaattctggagatcattgagatttaatttgcaaccgactgagttacttcttaatttgatttatagcaataatttagatagataagaaaaacagttacatgaacatcacggtaaacaaggcaatggaatgcccaagtttcaactggttcaatacttatttaggtaagcgcaacagattattcaacccgataaaataaaataaaatcctagattcactgtgacccagagccaatctctttctccttttttgcgctgctttctggcaacagatttcgatgacggttaggcataacccccccaccagcaatcgtgacacccttgaagagcttgttcaattcctcatcctttgtcactgcagccgttatggccttcggtgtaattcgagtcttgttcgtctcctttacttcattccctgcaacctctaaaacctaaaccaagaaatcaggaacttactaaaaaaaaaaaaccaaatcacaaaattagagcaaaaatttatgaactggaccaaatttggaaaaacagtaattgtaaatagaaaagaatacctcggctgcgaggtactcgagaaccgctgctaggtaagcaggggctccagcaccgatacggctagcatatcttccggccttgagtaaccggcaaattctcccaacagggaattcaaggccagcctttgcagagcgagaaacctttgacttcttgcctctaccattgtttgtgttggtcttggttgaggctgcggtgttggaactcatttttcgatttgtgtttagggtttcaaaaattcaataaatgtgagtgcattgatttttagagatgaaacggctgattgtgaggatggggtttatatagaaactattagtggggattggtgaattctgattggttgactcgacgtggccgagggaggagtcaccttttacccctgagtggactccagctcattctcgatttactttttagtttttacactgtgtgtgtgtgtgtatatatatgtgtgtgtattttttagtttgatagcccaatttatatcatttaatccactcaatcatatagaattttcacaaaatgagaatgtgaaagggacaattatagtttacatggtaaattgtgagtaatttgcaagtagtataaataatcatattttggatataactttaaagaattcaatttaggctattttagttaaatgttataaatatatatttattttatgttcttttctgctaaaaatcctttttaaaaaaatcgggggcgctgcccccaaacccccgtatgccgaccccaccctaattggaaatcctggctctgctactggacgagtcctagactgcgtgtgaggccaattaattaagggaggaaaaagaaaacattttgattcttaaatttggggaaccatttcagtcattgaggaatagaaggctgaaaatacttgcctggtcattttcccccaattttttttttactctctagagatggaaacttgtctgtcacttgcacttttgggatatggtatttttttctatctatcacactgtttgaacgatggataaatcgcacagcgcacctgcgtcccctgaatttaggtttaataacactttgattagacctcctcgagtttgtgtaatcatacctatcttccttggtgataaatttttacccttacgaaaatatttcttttattttgctgtgtgaattacaccatccctccctctaaactagatgtaattcagatcttttaaggacattgagagtcgttgtattatatgtttgattgctctttgattaatttatagagaccgatgatttactgttggccctgttatatagtcatcaatttgtttggtaaggaatcagtccaagggggtttgatgtggtatcgactgtattgatgcttcttataaatggaatgatatttaattgcattcatagagtgcatctagaaatgtgaaaaaaagaaaagaaaataataacaatttccgagacatgctagtgtgctactaaatgtatacaagcatatgcacacatgcaatgcaaccctatcacatataatcgcatccttccgaacaaacgggcctatattgatgagtatgtttttattcttgtatatgcattttgtagaataaagtacgaattagtttgcattccaaacttgtatttttctttaactatcacttttaagttactttttattagatgtgctaacaactgaaagattctgcggtaataagcttgagtttgggatgtctgatatatcggcacagtgctcttggccgtaattttatgttctatgtacaatcggagttaacatgctgttccaatatgttgaattgtaatgatgttctgaataaggttgccaattagcagaaaattagctattgtacgtattttattatcatgtactgattcattgtgctggatggaacattcgtcttggcgtatattactgcacagcatgccgatattttcttgccgacaattttgttgtagggttgtcaaatgatatgcatatccttgtttctctataatcccgcactaattttttcaaagtatttgggcagcttttgttttgaggcaccctcttgtggcgagtgct

SEQ ID NO: 13805 - DNA, 1104 bp, Mimulus guttatus
  Intron number 1 from transcript mgv1a010783m (locus mgv1a0 10783m.g) derived from phytozome v7.0 (chr-ID scaffold_79; pos 735615 to 736718)
cagcgtccggcttctccgtctcgtcgaatcttgaggtaagctagctgccttttctttttttttttttttttttccttttatctaatataatataattgtttttgtggtcttacgtgagttccacgcggggataagatggtaataatggttgaaatgatttgtttactatttctatgtttaaatcctaaatgtgatttattaataattaatagttaattcaatgaattttgcgagtaaaatacttttgtgacaaaataattaggtcaaggggttagttgctctattgatggggacgagcgtgctaatatgccagtaaaggatatttaatattttttaatcgcaaattcttttttctttgaaaaagttgataagaaatttatggcgtgctgattgctctatttcgtcaattattaattaagtaataataattgatttattattattttttgtttatcaagcaaaaatcaaaatttatcaaaatcaagccaccatgtttagcaaaattgcagaaacaccccttgcctttttctttcttgcggaaaagtgggccattattatgagttgtttatttggtaggttgtttagatccacgacacatatatagaataagattgggacacgtaacctgtctcaaattggacggctcagattcctcaaatgaaacactgtatttgcacagaatatatacacacacgatccacaaatactttgacccttgtatatcgaaaagctgaccacatcctcacttttaacaaccatcccccattttctaagcaaaattggtcgcccaattctgtgatcctcctcaaacactaccccacaaggctattcctgtaatttccttccttcccttgaaaatctgttacttttttttttttttttttttaccgtgtttttttatttattgtattaaattttgttacatactaatttaattatttttcgattgtctcaatcttgtagatatttagatagtatttgtccttttttttttttttttttttgctctatagtcttagatttattatatgatgatgcacatattctgaaatctgatttattgtgttttgattcaaaattaggaattcagagagttcaattggt

SEQ ID NO: 13806 - DNA, 1400 bp, Mimulus guttatus
  Intron number 1 from transcript mgv1a017461m (locus mgv1a0 17461m.g) derived from phytozome v7.0 (chr-ID scaffold_85; pos 302269 to 303668 reverse strand)
gcctcgagctctactacaactaattcctcacccaagtaattttttccgcgttatttatttgatcgaacaattattgctgttgcgtgtttgattttttcatataatttaggaacaattaccatgacgaatcgactacatatatttctgtgatgaacaattttattgatagtgcaagacaacccttaaattgtgaaatttaaagattggtcggctaggatcgaaaaaggtgtatagaaaaggaatttagataagatatagcttgggaatctatttaaaaagcagcaataaaatcttcaaattcctctgaggcttctcgatcctagacgaagttatgaatcttttcatgaaattgcaacactagcaagaatcaaacttttatgttcaattgattaggattggacgtagttaagccgtaagcaaatcctagcacgaaaacgagtcgaacagttgcgctttctactctacagactacagaatctgtagttataagttcctaaatcatctgtagactgaaatcctatagctattaacagtgtggtttgttcgttaaggtagaaataaatgccttctcagtaatagcttctttgaccagtgtgtttgtactttgtatatcatatgcattttactgtatgaccgaaaacttttatactctatacgtgactctctaagctattttgtaatgctttagttcacgtttaattttcccagcattgtttcagtagacagttggtattgtgcacattcagtatcttaatctttttgcatggtgagaatgcatttctaatctcttgaatgcccgtttattgaaaaaagaaaaaagaaaaaatctctagaatacttgtgacatagtgttctaatatgtgttttatgctatctttttgtatggttctgtctttaaaatttgtggcgtctattattgcgatttttttacgtagattcaattggaaaagattatagattgaattttctttatcaatataagtttgggtatgttgagtgttaattaactattcaaactaaagagttgaaggtggttgggtttacgatagaaaacaactatattctatagagcaatttcacctccgaacaccgaggcaggggcataaatatttgatcataaataggttcagttatcgcagttttatatggggttaatatgttgattctgcggaatttccctctgttcagtacaattgttatctccgtatagttcaaattacattcctaattggtggtgtatatcaactttgtatgctgatacgtgcccaagtgactgataaattattaccgaatcgaattagcatgatatttagctacttgcaatacatgttcttcgttcctaataagacataactaaaattgctttatcttactcttgatacatgcaggcagcccttgga

SEQ ID NO: 13807 - DNA, 758 bp, Mimulus guttatus
  Intron number 2 from transcript mgv1a008920m (locus mgv1a0 08920m.g) derived from phytozome v7.0 (chr-ID scaffold_20; pos 1646443 to 1647200 reverse strand)
actacaaggtaagtctcatgagaattattataggtgtgaaagttggaatgaaatttctattttctgccgattatgatctgaaaagtttcgattttggaacaattttttttttaattccaatatgaatcttatcaattcttctatttgtgaaaataagatggggtcatgtgcataatgaccaaactacaagggggttatgtgcaatttactttttaaaatataagaattatcatatgagtattttttagttttatgattttatgcaagtgagagttcttatttttgaaaatttatgaaagtttctgaaactttttagaaaaatttaaaacccacttccgaaatttcatagattttggaattggaatatgatgaatttctaaattttgaaaattctgaaattgaaattaattttgtatttttgaaaaaaaaataaaattttccaaaatggttaagttcgatccgttctatccgactttgacttctaaaaattatgaatgattgacgccatcttttttggaaattatccgaatttaatgaaataatggatgtttgaaattgcttcaatttcatagaatcaagaatcaaggtgaaattattgctgatctgatatcatgcacattttatggaatctattttatgatttgattttatacaaaatctgatacctttgatcaccctaaatcactactaataatcaacaccaaattaaaattgaattttattttttaattttaattttatttttattttttggcaga

SEQ ID NO: 13808 - DNA, 993 bp, Mimulus guttatus
  Intron number 2 from transcript mgv1a014654m (locus mgv1a0 14654m.g) derived from phytozome v7.0 (chr-ID scaffold_120 ; pos 3842 to 4834 reverse strand)
atttggtacgtgaattatggttaattacaataattaccctgaatttgttttcttagttttttgtcgtgggatatatatataatttataattttagatgggtaatttttacaaagaagtcaaactttaggggtgatttttgtaattaaacaagaagttatagaggtattttaattaaatttttaaattttaaagaaagggcagtaatgtaaaattaattttaattaatgcagacattttccaaaacaaatctagttccctctttgccctctacaatttctctcaatttcaagattttataaaaaaaaaattaaacttcactacgaataaaattgtaaaataaacgtggtgcaattctacacggaccaacattcttctaattttattctataaaaaatatttataataataaaaccaaaaaagaaaaaagtttcttcgaatttttaggtaaaatgacgattcgggtgaaattttgatcacaactatagttaaacatctataaattaatatagaaagaactatcaaaaaattctattaatttagtgaaatagtaatttatcaaattaatagtttactactccatctgtttcacaatatctgtctcttttgagatttttgtttatgtcatattatctgtcactttacactttcaatgcttcatattacatatttttcaattataccctcattaacttttttttttttttgagtaaatatccttattaactcgtctaacactagttttgcattaataagtaaataaggtattttggtatatcaacatatattttactataatgaagacgtacttattgaggttcttaaaacttgtagcaaacgcaaagtgagaaaacgacttttatttaggaacggagagagtacgtgtttgcagtgttgggactcgaataaattattattcaagcaaaattatcaagttatctgagtattaatttattgaggttctactgtatgcaaaaaaaaatttgtgacagata

SEQ ID NO: 13809 - DNA, 593 bp, Mimulus guttatus
  Intron number 2 from transcript mgv1a016325m (locus mgv1a0 16325m.g) derived from phytozome v7.0 (chr-ID scaffold_198 ; pos 365305 to 365897)
ctgccccaaggtctttttttattttattttttttaaatttatttatttaatttttgcttgatatttttagaatacagagatgtgattagatatgctgtcaattctttggatcttattttggattttgaatttcgttattagtagatgcataaattgaaatatgtctctcggctaagagttagattgcgttgtaattgtcattagtttgagattcatggatagttaatacttcaatgttatcagtgttcggtataatcaaatatgtattgtattgtaggctagttttaattttggataatcgctatgatctattgtttctgtttaggattagaatttgcaatgattatgagcttttgatcgattatagtgtatgtataaatgtattctaactcaaatacattctcaagactcgtcatttattttcttgataaaaaactacttgccggtgctgcatttcgtaataaatggttaccaatttttgtattttaaaaatacatgacggaagttgtgtacccgaaaaatgatttataaacaatttgacaatggtgtttcttacaggacaaggccatcaagaggtttctggtaagaaacat

SEQ ID NO: 13810 - DNA, 1450 bp, Mimulus guttatus
  Intron number 2 from transcript mgv1a010849m (locus mgv1a0 10849m.g) derived from phytozome v7.0 (chr-ID scaffold_172 ; pos 424512 to 425961)
ttgaattccattcagaagattcaccttttcatccagtaagtgacattgtcattatttgacaattttaattagctcatgtatgaatagtccgtgttattgtcgaacaatttcaacatgattttatcgcaatcataccttgcctagcaagccaagtaggatgcttggaaatttattcacactctttttctttgagtggcttttgatactcaattctggttacgagatccattatatttgtagatatcgcatagatgtgactgtgcttcaaatttggtcttaacaaaatgtgtgcaaagttgattcatatttcaaactttacatattataaggcttacatcacatcatagaagttttttctttatgagttttaaatattttcaagcttcattggagtaggtgaaattacaattacacccaccaatgcagatcaaagtcctaatcttcctacgaactattaggagtgcactaaatcttactgatatctcatgctcatacttcccatgcaaattggagtcctaatattccttttaaatattaagaatcattaatcgttactgatagctcatgtatctcatactattacggagtactcctgacattctttgttcgatgatactatcttgtctagaatttagatgtaacatcttctttgattcctccaaactgtcagagtaaagtcgtatgcctattaaatgatagatttattcctcttgaaggacagtcaattaatttcttggaaaactgaattttagaaaaatataaacaactctatattccgagtttatcggtggatccatgatatctttatgaactaattttagcaatctagatgtaccctgctgatccgtgatattttgaggaaatagcgttagctttctagatggcctcttgacatattatcaaaattcaaacaacaattaatttcagctttatgtgttttgcccaactgcatgctctaataaatagtgaaaaactagtgtcttagtatatttcaaaacggaattatgaacgttgcctgttgtcaaagatttgaaatttgtctgttgttaatgtttaccaaatgctttataatggactttacatacttgtccttctggaattaatatgtgctactatccttttatgctattgcatctgaaatgcagactattttgtgtgaacttgtcatgtgggctgatgataacgtcagcttattttcatgtaaagcaatattgcattaatccttcaatccttctggtttctatttcactaggctaaactgttcatcatcttaaatttattttctagtgataggaataagcaaattatgtataccgtagtcggtcagaaagcatgttaaagaaaaacgaagtaaaggctgaatagcatctgggaataagtagataattggtagtttaattattaatgtatccacgcgtgatttcacgtggctaatttctacttttccagg

SEQ ID NO: 13811 - DNA, 539 bp, Mimulus guttatus
  Intron number 3 from transcript mgv1a006506m (locus mgv1a0 06506m.g) derived from phytozome v7.0 (chr-ID scaffold_44; pos 943138 to 943676)
acccacttcagaatcccggtatgtaaatcataatcgggcaccctatcctaaaatatgagtgcacaattctttatttatttgttcttctcatttggaactttatttatatgtgcttagcattgcatgtttatccgttaccacaacttagtgatttggctatttcatgaacattgcattagcatgtctccttcaacatacaaattacacggtttgccatatagtagtttacataatttatgattcctgttttcggttgaagatctttacaagtttttattctctggaagatttcttgtcaatgcaaattggtgtaacttgcaaagaatacatgaattatttacttgctaagcgaaggaataaatgtaactgagttatatatcttccttggtttacactgccaaaagaatctctagtggagatgtgattttgtagatttatctatgttggggtgatacaaaattcaatattcatttcttcagttatttattgtttgggcatcttcagattttttcaactggaacaaggtgaaaataaggtat

SEQ ID NO: 13812 - DNA, 1042 bp, Mimulus guttatus
  Intron number 1 from transcript mgv1a023665m (locus mgv1a0 23665m.g) derived from phytozome v7.0 (chr-ID scaffold_13; pos 1776027 to 1777068)
gtcgcttccccggatcacgttccaaagaattgcttgtaaactcttgatcatgtataactccaatatcgataatagaaggcccaacaagttcttgttcatcaacgagagaagaactaccaacattagatgatgacgattctttaagatcacgtttaaaatatgaatcgatcgtattatgttttgttcgcttgggtggaggctttgacatcggaacaatagtcaatagaacctacaattcaaagaatcaaaatattttaccatttagaatataaaaatcaaaataacccctaaagcccgaacataagatttcaaacatgtgatagtcatgaaattgataaattcaaatatcaaacaaccctaaaataaattccaataaacccatcaaatgtaaatgtcaaagaacccttaaacatgtatcataaaacataataagtaatcacatactttttataaaacaaaatatatatttaaaaccctaacattaacatacatctcaaaaagagtaaaagaaaaatacataagagagaagatgaaaattaatattacttgataaaaagaggatgaatttgaactttgaatgttttttgtttcccttgagaaagagagagaatggagactttgagagtgagaagaggatatttagaactctctgtttgttgacgagagagaattctatatttgtactcttgtaaagaagaaaataatttttgtctaatatattgacttttataattttttattatatttaattctctgaaaaagagaaagaggaaaaaacaaatctttttttctataacaccgtattacatttggcggtgagcaaattttcaaaagaaatacaaaaagtctggtggggccaagactctacttcttaaaaaaagaaaaaagcattaaaaaattagtaggattttttttttgaggggcggctgccccccccgccccatctttcatccgccactgcacacaccctctctcgatttcgacactgatcaaagtttattggacaggttttattacgaggacgagttactcgaaagtgaga

SEQ ID NO: 13813 - DNA, 960 bp, Mimulus guttatus
  Intron number 2 from transcript mgv1a004768m (locus mgv1a0 03110m.g) derived from phytozome v7.0 (chr-ID scaffold_37; pos 613249 to 614208)
agcttatccaggtgctttaagcatttcagattctgtttttttattactatgtattgtgtatttataatttatgcactgatattattacatatatcacactcatttagtaattagttgcattaactcgacacagtatatatggtttctaactgtcccgatatcttggaatggtttgtttggtgttatgagaggcgattatagtcattgtctgaattagattatttggtaactattattccatccgtttaaaaaaacaagtgtcattttggcaatattattttttcccatgtaagagtcactttagaatttcaaggcgaataaatattttcttttaccaattttgccatttatctttgattttttgagctcattaatttgtacaattaatttgtcttcaagaaagagcacttagtgttaaaataatgagattaatgaaaagttcaagagtccaaagaataaatagcgttcaccttgtactacgaacaaaaaacatgaagattgaaaatttcatggtggtgagcaaaaagttgacaacccaatgaacttagacctcaaacctttgcaaagaagtacattcaaacaagaaagttgtaagagacttcgattttcaatcttgtctttttgtgagtaattgaaaatcttagtcttgttttcagtggttaatttaaatttccatttcgaaagttgtaatggaaaaattccaattatattccgctagttacttttagtggttgaaatcttgttttgttatgcaccggttgactgaagctttggcggaagactcctattaacggagataagcttggcgagttttagatattaaaagctcatttaatagtttttgtaaagggcaatttggagcttttccataaaaaaatgaggctatttattaggtttcttaatctctgtgcatttaccttaaaaaaacacttatttactaattttataatattcagataa

SEQ ID NO: 13814 - DNA, 970 bp, Mimulus guttatus
  Intron number 4 from transcript mgv1a014049m (locus mgv1a0 14049m.g) derived from phytozome v7.0 (chr-ID scaffold_353 ; pos 66181 to 67150)
gataaggtaactattaattcattatttattctttagtcaacctaatttatgatgcaattagagactatttttccacgtactagtaaattatataaataaataaactatataataaaatataaaattatattaaaaagtaggaaaatttaaatcatatctatgaaatatctatatactctttagtcgctaggttattatttgcatctagttttattcaagtcaagcattttatgaatttattatctaaaaaaatatttttcaatatatagatatattcttttgtctgaaagctcaagcccgaactcgaaaaattcaagcttgatctggagcttttgtcgagccggctcagctaaataaaagcctgtttcgatttcttggaaaaaactaaagtcattatcatctattcttagaggagaaaaaaataaaataaatcgaattaaatggtggcaacccatataagttatgatcataggcaagtgggatttgaattgaattattgaaattaataattgtagtagttgggttgttggcattgattggcacgtgaagcagtccccccacctttccccatttgatttagtattttccaattcatacttgcaaattatatttgctttttatcccattcacacgataatcatgttcacactttacagttttgtcctttgttttatttttcagaattgttttttcggatgcttttgtactaaagatttgtgaaacaaattttgatgatactagctaaatctctataaattaatataatcgagggtcgggatttgggaaattttattaatttagtaaaatagtaaattatcaagctaagagtttagcatgttttcctcaagtagagaactgagagaaattattatgtaaacgagattattagtttattaagtattaatttattgagattataacggatttttgtttaggtggaagaattggacgacaagctggaagcattttt

SEQ ID NO: 13815 - DNA, 911 bp, Mimulus guttatus
  Intron number 6 from transcript mgv1a000042m (locus mgv1a0 00042m.g) derived from phytozome v7.0 (chr-ID scaffold_211 ; pos 236838 to 237748 reverse strand)
gatcgaggtttgtgtttccgtccattgaatttatggaaatattacatgtaaacctcaatctcggttataaaataaatcaagttatatgtgacccatgtaatagaagtacgcgacacaccccatccctcctccaccaaaaaaaaaaaaaactgttgaatctactctactgatggaaaggctattagaaggtgataataaaatcagttacttgaatatagaggctatactctgctagtgtcctggttccttctagcttggatgacgttgctctttaaatatagtatcctttagacagcaaaataatgatcatagtgatttaggtagatataaagttttaaccaaaaagctgttcatttttttctgcatcatataatttgtcctaggccatataaccgataaatttggattggttggtttgattcagttaggtattttgctagtttgagttctccttgttttgaagttgtttgctgtacaaggattggaaatgttttgagcaaactaatgctcatctgtgctgggaattgcagagaaggatatcgatagaaaatttgattcattgcctgcattgatttatctaagtattctgcttgaataaaactccacatcattgtgtgtcttgcaagcttggacttcttaagtatcatgtaatcactcaattttgggacattattaaaactgtcagtttctttgcttaatgatgaatatgttctgtttaatgaacactattgaagcttaacttatgtgtcctccatttccctgccgctggggcttttgatgttagtttgatgcttcttcgtgtattctttgatttttatctatctcaatatttttaagtgaatcagattgctaaaacatttgtgagctcccctccagggcttatctcaaccgcataaaagactgcgttcatt

SEQ ID NO: 13816 - DNA, 2638 bp, Mimulus guttatus
  Intron number 1 from transcript mgv1a009162m (locus mgv1a0 09162m.g) derived from phytozome v7.0 (chr-ID scaffold_167 ; pos 240783 to 243420)
gcaagagttatcttctcattcaggttttatttcttactttcactttgacattaattattgttatttctttttaatgatggacaaatttaattccattcattttatatattatttttcctaaattaattgcttttatttgcggttggatgtgttagttacagtggattaaaaaaatgagaaatttaattaaccttagttttttaaattataataggcggcatttttattttattttcaaatattcaatgattcaagtaaagatgtgcaatttgcaataatacaaggggcccaaattttcgggggccaacaataaaaatatgacaaaaaatgtaattttttttaaatatatatgggtaaattataataatccttaaataagaggatctttgaaaaaaatatttaaaactaagagtctaaagtaaccctatataaaaaaaaatgaaaataaaacttacaaataacccctggagaatgtctaaaaaaaataaaaaataaaaactgttactccaacccttccaaattaattgtttccaaattagctgtgacttttttgtttcaataatatctgttactttagatcatgatttattatttctcaattttgtgattattactcttaattacttgatcgagaattaataaaattaaaattaatggcgtgagtatttctgtcacactatatgttgcttcccaaaatttaggagtacattagttttcttaatatatgttcaacaatctgaaataacagttattttaaaatggaggaagcaaaaagtacttatttgcaatttcttataacattacttgcgtgtacaaatcgtatacatccttagactatcaaatttcatacttttcttggagcatatcaaatattaaattcaatatctactactaagagtggcacatatgatactttgaaaattttgttcaaaaatcatttctaatgcaaatattaaattaaatctctatggcacaaatgatactttgagatttttgttcaaaaattatttctaatgcaaatattaagaaaaatctcctaataatgtggcgatgagatgacacttgcgattttagaaattcttaagatgacattctgaaattggagtgtcatcttgagaatctctaaagtgtcaactcattatttaatacaatttttcttttagtttctgttaaaatattttaattttaagtgtcgtattaaagaagactttgcaatagataatctcaatcttgccaaataggataaaaaaaattatgattcatatttgttacttgatactaatgattgacacctaaaatcttcatattgttgttttagtgatgcgttggagatgccattgtttttaataaaggtatattaggtatggtcaaattattaaaaaaaatctcatgtttggataatttacatttactccctcaactatgaatcttcttacacatccacccttatggtgccaaattcaatataatcatctagattctgtgaaatgttctctaatttgtgcttgtttacaagcctaaaaaacacatcttatgatcatcttgctttaaaatgtggagctcgaatgggattaaacgtgtacaaaattgagaatattccatataatctagaagattctattaaatttgaaaccgcaagggtagacgtgtaagaagatttatagttgatgaggtggttgtaattacccaaacatgagggggtttttcgtaattttaccatatatcagggggtgattgtacggaattctcgtgcttggtttttttgtcggtcactttgacgaatcacgaatcgattgaacatttcacacatacatgcacttagcactatagacattcacatatcatatcacaataaattttgcaaagacaaaaaggttggaccatgaacttttttgtagaaatataaactaattaaatatttcaaaaacaaaatataattcatttaatttgtttatataattgacttttatttacacttttaacattttttttattaataatacttgatactaaatccatgtaaaattttatgctacatctattttagttgaaatttttaatttaatttttattcaactatagttctagttaggggtgttactcggtcggcaaaccatatcgaaccaaaaattcggtacgtgtcaaatatcgaaccaaaaattcggtgcggtattcggtaataaaaaatagaattccggtataggtattgatgcacttttttacattatttacaaattagcctatattgaaatcactttttctttttagggccgattattgaaatgtgaatgtctaattcaagaattaattagtttaatttttaatttttgtttaccttttttaaaataacaaaatatattttcggttttaccggtatcgaaccgaaaaaacggaattgattcggtaaaaatcatataccgaaccgaatagttcatttcggtaaatggtacaaaactttttgaaatacccaaattttgatttacgaaaattcatgtacggttcggcaccattttaccgagttaacacccttatttctagtcgatccaacactaaataacgaaataggtgaagtaaattttattatatagtttttgctgattttttaaaatcgattttttttgtgcagaataattcgaag

SEQ ID NO: 13817 - DNA, 1594 bp, Mimulus guttatus
  Intron number 1 from transcript mgv1a004378m (locus mgv1a0 04378m.g) derived from phytozome v7.0 (chr-ID scaffold_333 ; pos 44238 to 45831 reverse strand)
ggcgacggagaaagcaatagagaaaggggaagaaagtgagaaataatagaagtgatttttttattagttatgtattaagggtagttttgggtttaaaaaatttaaaaggatatctattaatttttgtttagaactaaggatttaattaaaattttctagttgagcttgtctcctacatctaattaggtttggtttgaggggtgtcatgcatattacaccaaaaaaaaaagggaattataatttatttattttttccttttaaacttcaataaatcctattttataaaaataaaataataaatataaaaacggagccgagtatttataggagattctgtcaaacattagctggctttacaaatatttggattttcccgctacttcccttctctctcgtcaccgtttctttttctctcattaaaaccctaactccacagtcggttactttctctctcctccccccatatctctctctctctaaaacgtacattatttaatgtatctatagctgcattttccttttccggttgttttatatacgtttattttttttacgctgttcgattgacggttacagactcgtctctgggggattgcgaagctcgaattcagttgtcggtgggttgattcccattcgtttccaactgttacggcggagatactggccgtaagtgaagtggctgatgggagctaggtgaattccccctcttttcaatgaggttttttttttcatttattgctatttacttcatttctatgttttgcccctgttcgttttttaattgatttatttatggaaagaagcttcatttttgcttgtggattgggtgggtaggattttgcaacggttctgtttgtgtttcttataaagatgtagtctttcttctaacgtattgtgtgcaatggtgaatgagtgaggattgaattttagagctgctttgtaagccggatcggtaaattcaatgagttttttcacttttgtctttgcgattttgtgtagattttgtatgtttgttgactcctgatttgatctggccatatctgtctaattttgttttgatttattatatacgaatggcagcattagtagatagcttattgtttggttcatttcttaatacactgagaaaacctttttttttttttttttttttttgggacataattttgatgttttcttgtgatggtctatgcctttggtttgtggttaatttgtttgattatgtgagttatacttacaaatatactgaatccttccaattcttacaaaagacatggctagttgctactgagaaatatcttatgtcataatttgctttttacgaagattggttggtgcattggcaaggaagtcatggtccacgtcaagaaggaaatatgtacaccagagtcagcaaaagaagtcacatttgtttcatattcctcgttttccgagagcagttctgacattgtcactccaagatgttcctctgattctgggtatgtatctcttgttttatattttaaccctgtgttgtatcatctctaacatgttgtttttctttcttcttcaatgtcagtttaagtgttcacagacgtactggtcctgctagac

SEQ ID NO: 13818 - DNA, 1252 bp, Mimulus guttatus
  Intron number 13 from transcript mgv1a009295m (locus mgv1a 009295m.g) derived from phytozome v7.0 (chr-ID scaffold_13 ; pos 1322036 to 1323287)
tctgttctcgttactcccaattttgatatctgaaggtatggaaagctctgcctaactttttaaagtatttaattagctgattgcttgacatatttatctggtaattacttttcaacttcataagaattcataaaatatccgactgattggggatgtgttaaatgacaagtcgtgttgtattgtttcatgttcaagtattctacggaggataacatgtacgaaatgaggttgtaagggtaataacttttccgggtagcaaatcttaatcaattaagtatcttcaaagaattacataccagactttcttgaaatagtaacttagacttgagatagatttcatcaggacaagttacaatctttattccatgatagcattataagcatcttctcttctatttcgactgtgaatcgatttggctagggctgtgacatttccaacatatatctgtcacgggcagtgtgatttgtctcacgcccatcgattgtataaccgtaattttgcaaaaccctattcagtccatgggttgcagtgtagtgttccaaaatcttgacccaaataaagcttaacagccccaaagctgcaattacaattgcgccacacagaatatacaaggttactgtatccatcactcctcttactaatggtggaacgaaatgcaagtgtgagtgagtttcttatagtcaaagaaatattgcaatatctactaaattctgtgagatcttttaaatccccttctagattgcgagtaagtcgtcattaatgaatgtggtaaaaaagtttggctttatctctgaatcccgatgtgatctctcttctgattaaccaaattatattcgatatattatgtataaaagttgtgcaaatcgaaccacgttacttgcaagtagtaacgtatttcccttttgtgtgtggatgggagaaaagggcttgtgtgatcttttacgcaggtggctgatatttttatgtgatttgtattgtaatattcattatgatctgtgtgtttgattccagagaaagaaatctacatgcacaaccttttctccaacatgccataagtcgagcattttttgtttatttgattcgaggaaattaagatgccttctattttaagaatcttgatcgaatattttttgcacctttaaatttcgatatttagtcctgcaaaaaatgtttcatcggaacgtgaatattgataacacgattctcgtggcatcaggaaattccattcgtgaatcgaagacaagtgccgct

SEQ ID NO: 13819 - DNA, 3769 bp, Mimulus guttatus
  Intron number 4 from transcript mgv1a019608m (locus mgv1a0 19608m.g) derived from phytozome v7.0 (chr-ID scaffold_179 ; pos 469898 to 473666)
gcagtttctcttggtggcgaataacgaaatttcaggtaatattccatgggatttgttcacatccaatattgttgccattgatctttccgataatttatttgaaggtaattcattgccactagacatcgatagattcccaagcttgatttctataaacattgccaataacaaactttcaggccgaataccttacacaattgggaatctatcaactctctctgacttacactactagaaaatctatttctcgtgacgccgcaaatcgtcaccaaatgtgggtttttgtgacgcttgatctattgtgacgcttggcaaaagagtcacataggtggccgtggtaataggttaatatgacgcctcaaggggcgtcctaacatccatgatattacaacgccctaaagcgtcttaaaatccttttcttgtgacgaatgtaagcgccacataatgatttccaactactttaattgcttgaatatatgacaatcaaaagcgtcatataatgtattattatgatgaatttgaagtgtcataaaagtcttcttacatgacacttttttagtgtcacaagaatcttgttaaaaaattaacctgctcaattttttagtttgcttctatatatggtaaataaacacaaccattatatcttaaaaacattaatcgaaaatcattatatgtcatacaaaattacagatacaatcaacttaacattacatgatagtaaaaacagccttacgagattcgtgtacttatatctgtcaaactattgttcaccaccaaaattcccaattatacatggggtctgtatattttaacaaaaagaagaacaaatgtattttaccatactcaattcacgaggatacatctatcggcataagttttgatatatggtaactcaaaatagaacaagtataaatgtgctggactgcttgttgtaatcagttgtaccctttcactcgtgaaaatgccattcctctgcagacctggtattcatagattcgaacatatagaaactctcaacaacaatttccaagtgaaggaaagtaatcaatcaaaccaagataaattattatttagtaccaatagtataattaagcttagtggacaaaccttcatgaaggtagcaagagtttctgcaaatttgtggaagtacatctctcaatcagcactttactgcatgtttcggttattttgactgctacaattcaatttataactgatatacgtaaattatttcaattaaaaaaataacagagcaaacaaacgtattttagtggatctacactaacaaaagaaaaacagttacatacccttgagcgaaactcctgttcaagtaaaatgatgcatctgtattatctgttatgttttttttagcccctatcatctaaatatgcaagaatgaaaacacttattatcagcaattatatatgaaacatactcgcattatatggaataaaaaccaaacaaagttaaccctttacctttgctaagcaccacatcatatataaatctagaatttggcaaagtagcaatcttctcataagccaactgaagtaaaggaatataacaaccacttccgctacaaagtaataatacttcgaaattaatagaaagaggagatcaaattattccaatgtaccgaaattagtaactttatctcacattgtagagcacattggagcaatttatccaataggtaccacctcactgaagttgttggaaacacctacagaccttttttaaaagctgaaaaataacagatattataattagaaaactctttggaactaaaaaacaagaaaccactacgaagtatttttcaatactttatcaacaaagggaactgctatatacctcttatttgtaaggtatgcaagatgcatattaacatgttcttattgttctttcaactcggtcgaaataaaagatcaaccaattttgtttcaattttaacatttttatttggactcaatagctatagcaacatctcataaatgcccaaacactagacaactcggtgggaatataacataagagaaacaatatattctagaattctaaccataatgtttatccttctaagactttcattagagttattagaagtaagacaacaattcattgacaacatgacttgtcttcgttgtcggtctacgaatagtatgatgaaaaacactttcagctcaaagacagagaaatttaatgtcatatatatatatatatatatatatatatatatatatatatatatatataacacttaattccttaattctaaatatcataccacatacattcattcactcaaatgaaaaaaataagatgttaactgcacaaagttttatcacggctgcataattatatataaattgattcaaggaatagaacagacacgtcttcaataaactgaattataaacattcttaattcaacattacactcattacagttgaaaaacaaaagaacataactcatttcaattccatctaaaaataactcaaaatcaatataattgagttgtgcaaataaatctgaacaaattgatgtgttcaataaactaatacccaaaaaaaaatgaagtttcttaatttcatcagaaaagaaatcgaagattcaatacatattccgcatattaatcccaaaaatacaagcaacaacaattaaaacctagaaaaaaaactagtaacggggaaaaattagttttacctcgaaggcatattataaggaacggattgtgctcttcgaattcttttgcgagactctgccgaaaattggggaaagaaagagagggaggaaaactagaagctgtgtgattctgcggatgaaaatagaggagagggtaaagtgattatgttataaattattttaatgggtaattgggtgcttatttttaatttccttttgtgacaattaataagagcatgttaagacgcctcgtaactgctgtctcaaaagattcattatattatgacgacttatttaaaagggtcatataatgtaatttttgagaattaaaaaatatatacacagaacacgtggaacccgtttagtttacggcgtcataataaacgattgttgagacgacttttacaaaccgtcacattacagcgttatgaaggcgtcactaaagaccatttttctagtagtgttaatactccattccaacaaacttttaggagagattccattatccgtttgcaacttgacatcttttagctattttcatttgtcgagtaacaattttgaagggccaatcccgcaatgtttaggaaacttgagccggtcactacgagttttgcatttgagggagaataattttcatggtactttaccgacattttcaaagggttgtcttcttgagtcgattaatatgaatgggaataaattggatggaaaattaccacaatctctcgtcaactgcggaaatctacaggttcttgatattggaaataatcaaatacaagatgtatttcccttttggttggaaactcttgttgagcttcgagtgcttgtcttgagatcgaatagatttgatggtacaatattgcaggattcaaataatgagcttccgattcccaagttgcaagttttggatatatccaagaataaatttaatggttctttgcccggtagatatttaaacaattttagagccatgatggatgtgaaggaaaatggaaccgaaaaaggaaattggttttcgaactatcaagagacaattgtatttgttttgaaaggtttggagcttccagtggtgagaatcttgacaaca

SEQ ID NO: 13820 - DNA, 1236 bp, Mimulus guttatus
  Intron number 2 from transcript mgv1a023132m (locus mgv1a0 23132m.g) derived from phytozome v7.0 (chr-ID scaffold_105 2; pos 9360 to 10595)
ttaaatccggcccgaatcaggtaatgcatgtcttttttcaatttaaaatctacaaatatttattggccttaactttgcatttgatttccacatttagtccctcgtgttcacaaaaatcacatttggttcaccatgtttcaaaaattcaacacttttagtcttttccgtcaattttttgttagtacaaacgaaatcgagcttgtgcccgtcattaccgtaagtgacgaactaacggtaaattgacggaaggaccaaaaatgttaaattattgaaacatgaaccaaatgtgttttttcgtgaacatgagaactaaatgtgaaattagtgcaaatttaaggggtgataactgtaattttcccaatatttatttatttgtgttattgtttgggatacgtagggatgaaaattggaatggagattccgagttccccacccagtccaaaaaattccgattttagtaatttcgaattacgaaaatattttcaaacgctaatggaaatcccgagttctgccgatttcgacaaaaaaaattctaaaattacggaacaaatattttcactatgattttcgatttttttccaaacgaaattggaattagtttttaacatcaaaaaaaatattttttttcctatagtgtcgattcccatccgctccttccgatttctaccacttggaatatccctaatatttaaggagttttaatcatattctgaattattatattttaatttatactaatttaatttaagtctacaatcattaacgttttcttttgcattattatattacgaacgacttgataagaaattcgagatccatgccccttattatctttaatagaagaaggtgagatgtttaagggttagaaaatccggttttccgctcaaccttacaaaaattctttccatgagtttaatttggaaaagattacacggtcgaatctctagctaatcggcttaatcgtgaccgttgatctccaacaacaatcacaaaaccgtggccattcaaaaatttcaaaaaaaagtccacttgcgtaaaccgccatccttaaccgtgtcatttatacccggaatggctaaacagttaaagtcaacaaccgttgacctagttaaccatcccgataatctcgttgggaaaattttaaccaccgttaggtcaagacactaacaataagtttctaataatagtaataaacgtgtgtttgtttggacaggcatcttacttggagaagatact

SEQ ID NO: 13821 - DNA, 835 bp, Mimulus guttatus
  Intron number 1 from transcript mgv1a011026m (locus mgv1a0 11026m.g) derived from phytozome v7.0 (chr-ID scaffold_36; pos 1463942 to 1464776 reverse strand)
cagcccactctctctttttcagtcgctcttctctggtacgttatacatcactctttatcatcttctcttttactcatttattttttcaatttttttttttttgcataattaaaatgtacgcgcggttaatgtgtgcgtgctcgcgtgtgtgtgtgtttttactctggttacgcatcgtaattgtttaatcatttgatgctagtttgattggtgtatttggtgaattctgttaacgaggcttgaaaaatcagtggttgaaacagttatttatttggatttgatttttttgcgaagtgattaattaatgtgcgtttatcgtgcagttactttttcttaatttgatcattaaaaatttgctgctggtgcgaatgtatgttggttttttctgtttttatgctatttttgattaattatgagctaattttgatttgtggaaatgaataatttggaatctgtagttacttttttttccggaattctaagtgaaatccgaacttttgcagatgatttcgcatctcgattgtaatttgaagaataggagaatccttatatcaaacagtgtttgtattgaattctacataaatgttttgttgcctatttctgtctgcagaattactgaaatgtcaattaaattacttattatgtatgtcggtttagcagaatcattttgtttgtctaaattgtattgcattacctatgtgtgtatgtgctacacatgccaattcattaatattcgtcttacttctgcatttgtggcctaacttttttttttttcctttttttccgtcacgttttgcgattgtgtcgtgtcgctggttgatgattattgactcag

SEQ ID NO: 13822 - DNA, 1771 bp, Mimulus guttatus
  Intron number 5 from transcript mgv1a000467m (locus mgv1a0 00467m.g) derived from phytozome v7.0 (chr-ID scaffold_4; pos 1536363 to 1538133)
tatagaaggtaggttcaactattaataatgagtttatccatattgtgttggatttgaggtctttactctacttggtcttgggatacatgatagagataaccttaagggttgatctttttacaaaaattatcagttaaatttggtcaagggtctttagggaattagttgttttggactattttttttggtcaattaactgcctattccatttacaggtcgaatatatatttggtcaaattgtaactaagatatataactttgaactgaccatttgatagaatttagaaatagcataaatgtaggaatacagaattatagaacaaggtgaataactattgattgaataatagaaaggagaaaatattaattgaaaaaacgactgtaactacgactaatagttttattgtgagacaattgatattatgatgacaaatttgaagtaaaggatatttacagatcttgaaaatggattaaaaataaaaatcaaaaaaatatttattggagtagaattgtgcaacaatggtcggtggtcgtttatttttttccgttgatctgtaacgttcacagatttgaattgtcgactttccaaagtagctattgtcgggtaatctcagagtcgactggcggttcatgtgtattagtttttatgaccatgaagcggttctttactcacgatccgactatggttttgggtcaaatatatctttgacccgattaaccagaccagtcatcatggactggttaacggctctgtgtttacaaaacctactgtcatctgtttatattttttcaattgcaccctgagtgagttgttgtgtggggtagggactgtggaggatgtgaattgtaaaatatagacaaaaactaaatgaggtacttttgaaacctggaggagtttatacttccaaaagttaagtttttaagggtatgcttttaatttaccctttatcttacttttattctttgtagttgtatttggtggagagaaaaggcattattaagatgctggattgcacattgattttgaatttcagatatgttattaaaaccaaatctggttcttttgtagatatcaatctctatacattttggtgggagattagtccttttaatgccttttcttatgttgttagcaagtctgcttatcacgtgctaacagctggcaagggatttttgagcttagttggcttgttgagttgatgaattgtttcacagttgagcttgacacatataatagaacaagttagctttttaaatgataggtaatgggctctagtatatggatgcactgtacacatactaactgtgagtgcatcgagggtgcatttggatggagggatttgggggagggatttcaaatccataataacaaatcccttggacttgtttggattgatggatttggagatggatttcaaatccacaccccacctttttagttgattttggagtaatagtggtggatttcaaatgactccaaattggagtcatttcaaatcccttccccaaatcaaatcccccctccaaatccctccatccaaatggaccccaaaggaatttatatactactaccttttagcgacattcttattttggatgaccaagtaagtgcttcaatgtagtgcagttagccagactctatcaacgtattatatttgatggttgttttatgctaatggtgctttatactctaatcggaccgtttagttagatgctctcataatttccctttgcagtgcacgccttgaacaaacttccttactccaagctt

SEQ ID NO: 13823 - DNA, 1155 bp, Mimulus guttatus
  Intron number 22 from transcript mgv1a000288m (locus mgv1a 000288m.g) derived from phytozome v7.0 (chr-ID scaffold_90 ; pos 262047 to 263201 reverse strand)
tagagttgagaaatccatctaaaatatctgtgaaggtacttttctctcttaatcctggtcctctgttatattcttgtcaacaagccgctgcatgtagaaccatcagaataccgttttgcttaagagagatggttggatttgcttaagagaaatggttgggtaatcttgtttagttcagagttgcattaggattgatttccttcacttggaaagttctatcggacctaataactatccatctggtctagttggtggctgtaaacacaacatgttattgttgtgtcatccttttgttctatgctatcgtgtaatgatgttttcttttcgtactatctcatcaaaccgtaccaaacactgataagtggaacatgtgatgaagctgaattatgtgatttatttatatctttttccctgacaaaggataattttcatctactgtttttcggttgtcgtatgacaattgggaatgatggttgagtgtttagaattggactcaacttataaaaccttcctccatgtaattgctattagttatttcaccacttcagtcatctctctgacttattggtgaaattatgcagaatgtaataatcttcaaaagttttgtaaactgatgtgaatgtcaaaaagtatttacaatgatttggtttggcgatgtggatcattctatttctacaagttattaccatgtgtttgctgtgtggtatgaccaaataagcaacttcaattgaaatagtgtctagtagcagattctcagaagtgaactttgttatgaattttgtagttgaataatgttttgaggccttaaaaccagtagaattcaagagtttcttagaaaatgattctttgctcttggtacttacccaaatcatgccttagtatcttgttgattataagtttactcgttgttccttctcattctattgaaggatctgcatgttctgacatcaatgcataatatttttcctagatgatatggtttctgctaattatttaaattccaccctccatcactaacatggagaggataaggttgacatttttttatatcctgctttatgttttccatatgatgatgccgcagaaaaattaaatgcaaggaatatcagcttgattcatgttatcacccgtaatctctgtttgcagaatttgaag

SEQ ID NO: 13824 - DNA, 665 bp, Mimulus guttatus
  Intron number 4 from transcript mgv1a005592m (locus mgv1a0 05592m.g) derived from phytozome v7.0 (chr-ID scaffold_17; pos 1819211 to 1819875)
ggaattggaactgcaacaggtattctttatctatttagatttaatcatgttgatataatgaagttatacgactttcttcatccctgttcttatttaacatatcaaaaattgtgagattatgtccttatacttttcttttcttttcttttttgggtaaattacgaaaaccccctgaacttaggctaaattacgaaaaaacacccccacctatctgtaattaccaaaatccccctgacatttgtttccgtcttacatcgacccccttatagtgtgatttttgcggaatctttttgatactagggaatattcccgaaaaaatgccaattccacgttcaatttttttaacatttgtgcatggctacctttttcgggaaatattctctggaataaaaaagattccatgaaaaattatatcgtaagggggtcgatgtaagatgaaagcaaacatcgaggggattttggtaattagggataggtgggggtgtttttcgtaatttagcctaattcaaggggatttcgtaatttaccctatttttttgtaaaatttctgtagatatttttaaacatccaaattggtcgaatgttgcaaatactacattcgattgaggaaataatgatctcttactattgagtgccaatgaatgcaggaaaaactagggcaagag

SEQ ID NO: 13825 - DNA, 902 bp, Mimulus guttatus
  Intron number 1 from transcript mgv1a010650m (locus mgv1a0 10650m.g) derived from phytozome v7.0 (chr-ID scaffold_4; pos 3443095 to 3443996 reverse strand)
ttttgcttgatttttggagggccttcttctctctggtatgtgtttgtttgttttccttttattacaacaagaattcttgaaagaaattacaggggttttatgtaaatcttgtggatgacattgattttgatttttgattaatgtgtatgattggagttgagaagcatttggtactagattaaattgaatcctgcatcatgctttgtagttacagattgacttagggggagtgagttatgatcttttgtctttgttgattatgttttatcagagtcgataaggttttaatgattccgtaagaatcgaggggggttgtcttatctatattttggggcttatcctgagacttgggttgatgtttttatcaataaaaatctcatctttcttatggatctacgaaatcccagtttcctgaaaattcgagaagttgccatagcctcgtagtttgatgaagttttcgaataggaaaatgctcgtttctctgatttggttttgtgcctggatcagtgagccattgtgtgctggtgaatctataggttttgtactgaagataaaacaaattaatttcgtttaaatcgtgttcttgatttgtatcgctaactgtttaaccaaatgtcggaaaaatcgtgttgaaatcctctctccgaggtgaaatttaactttgttcgtttatcgagattcgtatttggagttctgctgcaagaaatacttgcatgtagaaaaacaatcagtatcatacagaacccaaagctgtcaaattataaagaaaatagaaacgtcgattctggggattgtattttgtatagatgactgatgtacgtgcaagtttcgtatttgatatttttatgtgatagtatacgacttgtgcagggtattctaatcacccgtattgagcaatcaga

SEQ ID NO: 13826 - DNA, 1232 bp, Mimulus guttatus
  Intron number 1 from transcript mgv1a013079m (locus mgv1a0 13079m.g) derived from phytozome v7.0 (chr-ID scaffold_101 ; pos 114831 to 116062)
catcaagaatctgaacgagaaagtcaaaaaagaaggtattattttgtttttccagctaacagttagggtttgtgcttagacgttataaatatggagaatttatcgagtttgaattgttggcattgagttgcggattatttatttctgattcgtacttcttactgggcagtattcagatgcacgcaagcgcacgcatttcgatgttctaggtgtaggagtattaggttatagtagtttatgttgtgctgcagaagaatgtgccatgtttgttatgatttgagtgaaccacagtcacataattctgggtttttctgcaatagggttttcttttgttagcactaagtttatggttccgccattgaagttcgttaagtttgtcggaccttggaaatcttcttcagctgtgttgtgaaaaattgaccccttaagtaaactatacttcttcttccaaaaaaaaaaaagtaaattgtagttcgatctttttctgagtttaattagattactgctgttaacttttaagtgttctgaatgaaagctaatgcgggtaatgtaatccttatgatcgatcgtttagcctgacggaattcattgttttcatatgctttatcatgagagctatgtttaagaactgcagccgcagattaagattcatggagatgaattgtaatttcgagtaactcatgaaatcagcttattttctaggctgcgtatcgctgatttggatttaatcttattttggtgaggcgaatttaatttttatatttttttattcagacctacagtatatttagatgtcatttttaggtggaatctgacatgattaatttctcaacaatctcatagatgatagtttcacgatagtgatattagattgtaagtcgctcccattgttatatgtgatattatctactcaaaggcctttctaatcctgttattctctcacttttcttcttctctcccttggccgccacggtttcacaccaaatctggtagagcgttcacaaatctcggcaatatataatgtgaaatctcttgcaagtagtgttctgaaacaaccagaaattgataatcatcttccaaatatttagatgaaagactttgattaataatgttgtcattgccccagtgttagtgatacgtgattaatattctccaagatttatgaattctgatgctaatggtgatgagttccctgtctttaatactttggacagagttgaagagatctcttt

SEQ ID NO: 13827 - DNA, 1042 bp, Mimulus guttatus
  Intron number 1 from transcript mgv1a012334m (locus mgv1a0 12334m.g) derived from phytozome v7.0 (chr-ID scaffold_123 ; pos 722668 to 723709)
ctttcctccctcattacctccgcagaatagtcaaggttttgtttccttgtttatttcttctttaattttcgtacgaattatcacgtatcttcaatagtgtttggaatttgttgctgaagtttacagatctgatctcgatcgtctgttctaaaaaaaaaattattggattttttccgctcaattattgcctcattgtgttgcgatggggaatttgttgcttgattatgtgtttctgctttgctgatttttttttttgtctgtggagaaaatataccagtcgaataaatggagtgcgaaaatggtgttcgtgtgatttacattgagttttcctctttgtagttggggtgacacttttgactttgaaacgaatttttggggaaattgagctggcagctattgattctgtagaatcgttgttaattgttatcggacgatatggaaaactcaaattgataagtattgacatttgatatctgattggagagaattaaataacattgtaataagccgacacccgagcttatgttagatttcctcatatggctaaagttcactaactcgcaagttgaacagattataggttatctaagtttgttttggtttgtccgctgttctgcattacgggatacgttactgctgaaaatttacattctcggtatattatgcgtaaattggttatttattaggaattcacctctcttttccgagatttgattggattcattatttcatgtaattgatgctagttttccagttcgtagttattaatggtgcaaaatggcgcatgcttggctagagacgcacttgacgcatgtccagcagcaccattttttgacgaacgtgtacatgagtagaacttgctatcactgttattttattttttcaaaattgtacaaattccgagaaacctgactgagaaacagggtttcgtgtttttgtctaatgtctacttattaacctgtaggtgcgattgtttcatttattattttctctgagtgacaccagttttttttttttggatggtttaatgcagtggcaacaa

SEQ ID NO: 13828 - DNA, 242 bp, Mimulus guttatus
  Intron number 11 from transcript mgv1a023718m (locus mgv1a 023718m.g) derived from phytozome v7.0 (chr-ID scaffold_83 6; pos 11846 to 12087 reverse strand)
agcaaggtttgaaatgtatcattagttcgattatttttttcactaccacgatgactaataaaagcaactttgtagttcgttggagaacacttcaaattctgtgaatctgaatagcgctatattgtaatgaagattgagtatcctcatgatctcgaaaaagttgttaattatcactgattttgttatatttgcaagcaatttaaaattccttatgttctatatgcgctatgaataacagaggg

SEQ ID NO: 13829 - DNA, 2296 bp, Mimulus guttatus
  Intron number 1 from transcript mgv1a020012m (locus mgv1a0 20012m.g) derived from phytozome v7.0 (chr-ID scaffold_128 ; pos 229639 to 231934)
gctgccttcctcttcaactttttaccgtaaaataggtctgaacttttcacccaatacttccactttgtcaatttacgtattttgtgtcagacagatgttatgttactatgttaatctgtggaaatatgcttatctatgtgatttgacatttttcaaaaaatctaatgcataatagtttctagagaaaagaaattgatgtgggaaattgttacaactgtgtctgtcataagaaaatgtatttcaaatgtttgatatgatgattttggaattgagtaacgaaatacaagttatcaattttgaaaggaggtaataatgaaaatcttgaacttttgttgcagttttgaggattgaatgactgtttacatgcatgttcctctggtctcgtatgcttttcatgttattgatggagtgattagataataattgtgattctattgatttgatatcataatcgcataccttttcagtgtagccactgatctttgatgttgatatgaagcgtctgttaattcacaatcttagtgtgtggtagtcagggttgcatgatatcgatatatgttatttgagaaggaagggggttcataaatcagtgcacagttttggctttgctaattatgatagttacatttgtattagatatcgtatgtctgtatggtgaattattgcgactttggtgccaaaaacaggttaatggaagatactgattcactcttcaatatttattcttaaaagttaaactctctaggttgagaaatgcgcagactcgatttctggaaactgcgaccttgttgaaagtatgaatagaaacattcgctgatgaaaataagatagatggtaagagaatgattggtaatatgtgaaccttcacaaagtgcttttgccagcttcttgtagcaaatgtcaatagtgagcagttggtgaatgaatgcatgatgctcaatagtcaatttcacattaaagcagtccagggtggatgttgtcttcatcaattttttactagttttaatcatatgtaaatgactagatttggcagttatagggagtagaggttgcaaagtttgatagctgagggagctgatatgagcatatcctcggcaacagtcattatcttcaagtctgtgttcagaagtaaggtctgatattattattaagtaaaacttgcacttttggttcttgatctttggattgctttatccaatgttttctctcataaagattgggctgaaatggattgttgtttatcatgaggctgtcaaaacttgccttttggattttgattttggggttgctttatcccagttctttcttccgtaatgatagtggtgaagtagattttttggtggtaatttttttattatgctttgtaagcttaaatagttagttgtaactgttgtttctttgatttggttgagtggcatttcaaatttcatggtgtggttttggtaattctttgtcgtagttacattaataagtcagttgatctcttcggatacttaagtttcaggggttctcgatggtgcaagctgtaacatacagcttgcatttttatgggatctgaacatcatcttttcaagacaaataattctgagaggaaaaattcttaaaagtctatctaagcgccatgaaatgtttgctcaaaatgctgaaaagtcattgcggacgagtatatatgcttcaactatggtatgcatgtccttagagagaagtaatgccataaaatgcctcgcgcgagggaggaagaaggggtttgggagggaggagattcaaattaaagatgcataaaatattctgccttcgtgaatatgtcttaaaccatgatatagttgaatatatttgaactttggtagagcttggtttgggaaatagttcttttgactggtagtcacgacattatctgttcaatggtattaagtttatctcttaggtctcgtttgcgaatgttgatgtgattgataagattgattgaattggttagggttacattgtccatatggttatcttatgtttgagattaatcatacaatgattgtatttgttaatatcctttataggattgtgtaataataggggttaattaaaacccagttccccctgtttttatcatggggtgaaacctaaatcccaaatatttgaaaaagcttgattatattgtcataatcgccaaataaagacttggtagttccatctatgtgcctgtgttcacttagtttttttggcttaaatggaatctaagtagctctatcgatgcctaatctttcagttttccatgcagtgagtaaggatattgacgcagaag

SEQ ID NO: 13830 - DNA, 679 bp, Mimulus guttatus
  Intron number 1 from transcript mgv1a012309m (locus mgv1a0 12309m.g) derived from phytozome v7.0 (chr-ID scaffold_8; pos 2060730 to 2061408)
cgtgagtttccgattcccatagaataatcgctcttattgtttttctttcaccgatctcgtccgatctgattctatatttactgttatttttcggtagatttagcattgtttcatgaagtattattgcagatctatatcttctttgttttgatttcattgtttacgaatcttagtgagtaatctttctgcagcggtagttgattgtatttgatctggtagcaaactgtttggcagaaatttaggtctggaaaatgaaattagaaatacttgtgttcagatctaaaatgattcgtttacaatagccgttctgaagctcgattctatgtatttgaacaactgcttactttttcgatgggatgttttggtatcggtatcgaatatagcacgataattgctagatttgttatttatgcatctgttaatttatcatatgaaggcagatagttacagtttggagtttagttagtgtaaggcctcgacttcctcttaccttttaccgtgttctcttttgggatatacttttgttgtaagtgttcattgtagtatgcacggaccaccaatagtgtatgcctttctgttttgttatgattttgtagtagattgtttgtttaattaccagatgttacccgtatgtgagcgtgtttcttgtcattgaaatgttccattttttttttctaga

SEQ ID NO: 13831 - DNA, 2515 bp, Mimulus guttatus
  Intron number 1 from transcript mgv1a022688m (locus mgv1a0 22688m.g) derived from phytozome v7.0 (chr-ID scaffold_89; pos 1029925 to 1032439)
gaaagagttttagagctggcgattccttaggtataataatatatatactcatataattattcatcgattttatttattattattattttttttttaaatcgatttattattattaatatatttttttgtgggcagtattcaattacggcgcgggtgcacataacgtggttgttgtggataaggcgagctacgattcatgcagtgtgccagcaagtgcaccaacatatacttcaggccaagataatattgttcttaacaaaggcgctaattactttatttgtggatttaatggccattgccaggctggcatgaagattgatgctaatgcttcttaatttaattacctcctaaatcctaattacaatattgattgataatgttattagtgatagctagagccttatgtaatgggagacttctttttccttgtaataaatatgtatgatgttcgagacattattgaaatatatataatcttatggtttgttaattaatttgagaatggtttcatttgatttagtctaattaataatagatagaaataggagatttcccctttatatccttgatagtttccctctctatctctttcgatctatcagaacaaactatctatcaatagaaatagcacgttcatttctgtcgcgaaaacattccgccataataaagcgaagcagctagaagcactcgcttcacgcccttaaattgttattcacagatgaattgcaaacgggaaacgagaatcataagccagttaagaaggaaatacactgactattactatttattaccgattgtgtcaataatttttgttatgacaatgatgcttaatgtcataattgtcacgtatgttctaacgtacccaaaaaaaaaaaaacacttatatttttcttaagaccataaacctatattattaattacactctatcccttaattcaatattacaatcgtttcactttcgtagccgtttctctataatgacgattttttttttcctctttcggatgcaacttgtttcgttttaggtaattgttacatgtcttcttaaacgctcgattggtctatgagatgccatacctggtgaaatacctcgtacgatttgcaccatatatctatagaaataactatctattaagcacgtatacacatgggtgtgtgttattatgtgtaaatcgatgatgcaaaatcacctaatgtatttcaccgaatgtagcatctacaaaacctgctcaaactatacatttgatcggtttaaatacctattttgacattcattttgttgaacaaatacgtttaattttgatcaaaaaaataattgaagaaaaagtaattaccaatactatatcgtaccataccaaatatttggcttatcaatgtttcgtatactagaaaaatacccctacactctcatgctccgccaattaggtcacaattctatgccaaaaagaaatagtagaaatcataataataataataataataataacaataataataataatgataataataataataataataataataataataataataataaaaaataaatgaaattaaataaagaaaatgaaaaggtcatgagttcaatcccgatcgaaattagaatataatacgtatcaaatttcaatctctagctagttcagttttatttccccaaatattttcaaaaattaaaaaaaaaattactttacacttgcaaggaattttattaattatttcaaattatatgttaatacaaaatggattttcgattatgtttaaatttttttgaaaaaaagctttttttttcgtaatgagttaaattggagttaatttttcacttagagaaaaaaatgaaatctttccgaaaatggaatattaattcatcatatggacataaaagttatacaaataaataaaaattacatagaatcccacaataataacgcaattgagacttaccaaactcaaattatttcaaagcaatctaaaattaaattgtcacaaatttcttgctatctaggcaaaattaaaattaaaaatcaaattaacaaaatctgttaagacaaaaaaaaaaaaaaacaagtaaacaagatatacatctctctatataaaggtgagttagtttgtctaaaatcatgacacaaaaccaagagataatatataagtttgagaaaattaaataaataaaataattaaaaaaaaaaagatgtctcaacagaaaactattttgatgttggtggcagtgatgatgctattgtgtaacaaagcatatgcaacaagctacaatgttggtgactcttcgggctgggcttttggtattgcgggctgggaaaatggaaagagttttagggctggcgattccttaggtataatataatatatactcttattaattattattattattattattattattattattattattattattattattattattattattattattattatttattatttttttttgtgtgggcagtattcaactacggtgcgggtgcacataacgtggtg

SEQ ID NO: 13832 - DNA, 1657 bp, Mimulus guttatus
  Intron number 2 from transcript mgv1a015858m (locus mgv1a0 15858m.g) derived from phytozome v7.0 (chr-ID scaffold_51; pos 1450619 to 1452275)
gttcatcccttgattatcggtaaacaataaccttttgttcatttacaccagtaattatgtgtagttttatttatctgattgatcctctttgtttctgttgtttttttttttttttagttgattctgtgatttcgtatgggaattagatttgatttgattttttttctcattgtagagcatggttgtattagacgatgtttttctaataatatttttgtgcatgcttttttattcagctgattgcagtttactttaaaactttttgttgaatgatcttccatgataaccgttgatctataactgatgtttgtagttatcttagaattgtttacaaagaaattgtatggaatgaggagtctgcttggggaagataatttcgaaaaatgcctcctaaaacccaggcaccccattagggattttatgctagcaaaaaatttcgtctctactcctcacaaatgtggtggcagcataatcaagtaactatgtatcatgtggccagaaattaagattcgttttcagctaacgtttgcccccatttacaaattccaagactatattgttgcttgatgacacggtagatatttactgatggtgaaagggattatgtgcatagtaacactactgatttatgttaatgtcccaatgagcactgctgactatcgaaaaatggttaccgctttttaagaacttctaaatatgtattgtgaccgcttttaggaatgtaattctggatactttcatagtctcgaaatgtgtaaacctcagtagaattgtgtttttattttactggggatgttgattctagcatgcttccaaacgaaaaacgagaacacttcgaacaaaataagaaactaaaatgtgaacatagccactggtgatttcctccaactttttgcagggaatacatactggggaaacgtataaccaattatagaccgataaggaagaacaaattagtgtccgttttgaatccgggtatatatgtaaccctaaacgagggaataagggagtttggttgtatatattaaacttatgaaccttttcgttaagtcctgtaaaatatcttaatgaagccttatgatcgtcactggcatcttcattcatgatgatttgccattataactcttcatatcaagtacattatttttcctaaacgcacgatgtggttagttcttattaatccactgttattttatttaatggcacgcggagggctttgaaccgcgaagctctccccacatgtaatcagaatagtggcaaacatcggtttagcatgaattcctgtctcttagctaagtttttatttaacatgtaattacgatgattttgtaatccgaagatcaaagtgtagatatgataaatgaaagcaaccatatgaatgactatgcactttggatgcttctgtgcaagtattaaaggttgaagacgaatatctaaaagtctgaattgtttctatacacggttgtaacgtgtctaagtcaacagtgctcaatctttatggtttttgattgaatatgatgtatcatgtactgatttatcaacgcttgcacatgagcacagacgttgaaatatgttgaattgttttgttatgaagcagttaggagaataagatactgaagccaacattttcttgtcatttcagggcttcttgttaaca

SEQ ID NO: 13833 - DNA, 886 bp, Mimulus guttatus
  Intron number 2 from transcript mgv1a015623m (locus mgv1a0 15623m.g) derived from phytozome v7.0 (chr-ID scaffold_27; pos 561290 to 562175)
ctccgccgagttggctcaagatctcttctccagatgtacgtgatctctgttccattaattttgttttttcatttattctttgatgtttgattttatgtttacatttaattaattattctctagaacagaagatattgcgttgccattgattctgcttgcatttttgtcgaatagatgaatatgaaattcatcttaccagttacattgatgcataaaccgatgattgttccgtatgcttattgcttatgtgcactaattaatattcgagctttgatcggagatacaccattaaatgttgttgaacatatactatttactctgcgtatctttatgttaattgtagaatgtgcaattttattttagcagtatcaaagttctcgtatagaattgaatatggtggtttagaaaaaaaaatctgagtttagatgtttagtttgaaagctattgtagtttgtttacatcagttggattggatttataagctataactgtttcacctaatacaaaatcattattaaacgaggttcgtttgggtttagtctgtttgcttagttagtttcgtttcggttatccatctcgatttgggttcaagttattgtcgagtacatctactattctgtcctgactgagtttcttttgggtttagtctgttgtatgagttagtttctttttcggttatctatctcgatttgggttcaagttattatcgagtatatatcctattctgttctaactgaggataaattttacgtttattgtccagtactgcgcttttgttacattgtatatgttacactacttctcagttctcatagtattacccgattcctaataaatttcttgtatttcaggtcgaagaaaacatctgtaagtttgcaaaaaaggg

SEQ ID NO: 13834 - DNA, 1609 bp, Mimulus guttatus
  Intron number 1 from transcript mgv1a014353m (locus mgv1a0 14353m.g) derived from phytozome v7.0 (chr-ID scaffold_84; pos 1026112 to 1027720 reverse strand)
tgggctttcggcatcgtttttgcggtaattcattacttctttttcttatctttcatttcagtacttaattggtgttttcatttttgttactgatgattgattaatcagagcttgctttgtttcaccaatacgatagactataggtctcgtttggttgccatgataagattagccactaaggtcccgtttggttgcccacataagccataattaactaaatagttggacttggacttaatttgatgtttggtttcccaataaattgccgggccaaaattatatagtcatggcttatcgatcccttctaatgagttttttttgttggacgttgcaagctccaataaaataatttggtttcattagattatttaattttatcttgctaatcttatcttgtcaaccaaaccgggcctaaataatctaatgaaacccaattgttttattgaatcttggaaggtccaactaattaaaacatgcttaaaagacaagataaaatgatgataacataatatttgcggattgactcggcaagttattggggatagcaaacatccaataaagtccaactatttagttaatcatggataatctccccaaccaaacggggcctatatgtataacattcttgattgtgtgcttagtatttgggtgatggtgaatgaagttgcggtatagttactcttgtgtttttcaattctgcataactaactgtatacattcaacttaagaaatggattatatattaagatttaagtgactctgaattttgtatttggttaaggcagccgtgagctacacgggatttcggtgaagaatgtaaacttgtctgcatctctgaacgtaaagctaatgttacgaatgattaccattatttaactgcatgtttatttggtgctcacatatattggagctatagatatatagcactacggttaaaattttggtacctcttcgtattgcactcttgcttctagcctcgttatgtttaccgtttcgaacctatatcgaacattgattggaaaataaaagttcgctatttacggtcataaaaaattgcttttagaattctgtggatatataggtaaatgtaattggtaggagctttagttgatgtctagaatcagattcacattgcactccaggaactaatgtaattgtgtttctctatgtttaccggttatgctttacgaaccactgaaatttcttattctacttcttttctgcacaagattattcatgtatcatagtttctagcgacaaatctatgtttgatacgaaatgcgactatcatttgcactatgattattgtagattttgtgtgtgtaatcactaatcagtgtttagggtgaagacaatccaaaaataatactgggagcactatgctatgcttaaatctgtttctttaacttgtccttgccgaaatcggagatcaggcatagtgtcgtaatttgattaaaacctgttgttcaaaggatttaattagtattatacgttgtaaacagttaaagataagcacctacctcggatccagttactgccaattaattgtatgttgtttgttgtggattttgatgttgactatatattatttacgagtgcagttaactgc

SEQ ID NO: 13835 - DNA, 1422 bp, Mimulus guttatus
  Intron number 1 from transcript mgv1a017317m (locus mgv1a0 17317m.g) derived from phytozome v7.0 (chr-ID scaffold_27; pos 285455 to 286876 reverse strand)
aaattcttatcgaatttcaaatctccaaaagaaaggttagcatcaaaatttctccgcctctctctctctctctctctcgttcgaacgaatcgtttgtccctctcaaaattcggatgaatttctggatgtatatttgcttcttcgccactgattattttaatttgtgatttatgttattttctaatttgttttaatttttgtttagatttattttcgtccgcctgcactgaaactgtttgttgattctgatcggaatcgttaatgattcgaattttttatagattttttttagatcgaaatcatcgtaaataacttatttagtgttatttttatttatcgaatttcgtatgatattcttaaataatttctatattttttttaactgttttcaaatgttttttcgtccgcctgcaaaaacggttttgattctgatcggaatcgtgagatctggacattcatttccagatgtggatcgatttttcttatttttttgctgaataatgatgtaaatctgtattctaatgggttattagttgttttgtttaatttctgtcgaattattgttcggcttttctttcttcagtttcgttctaaaataactttgttgggttatgcatacttggattgaagttttagcatgcaaacagtggatcgtgttatttacctcctttcgttaagaatatgcaaatgtatatgtgtatggttttatatgtgtgtgtgcttgcttaaataaggatatcatgtatttgtgtgttgaatcttggtttgttcttaggtatatatatatatgtgcttcaatactttagaatatcatgtatttatttgttgaattttggtttgttctgacgcaattcttataaaacatactatgggcgattgtgaaggctcttaaaattacgaggcttgcctaaaaatattgggctaataggaaacatgttcttgtagtttagatgtgtagagaaaagagttcaatgcttttctgttagttccgagggcatgtccctggagaacattgtcctacatatgggtatcaaaattacatcaataacgtaaaatattttgacaatggattcctaaagtcgaagatttatgctcatcagggacacgtgtactctctttggtaccgtttgtaccaatcaggacatattttattttctacttgctctccctttcgtaaatttttaaaggaagcgtcgtcttataatgtatttggtatttggcttttccttgttgaaagatgtttcgatagtgtagtgggaaatactagcttctttttttcgaactctcttcttgatctatttcagttgttcgtattctgttctcattagaactttcaaagaatatgttgcttgttgattcttgacaatattatatgcatatgttgtgttggtgcctgaatcttgaaacctatatggtgcagaa

SEQ ID NO: 13836 - DNA, 1477 bp, Mimulus guttatus
  Intron number 13 from transcript mgv1a000548m (locus mgv1a 000548m.g) derived from phytozome v7.0 (chr-ID scaffold_2; pos 4538579 to 4540055)
agtgagtttttaagttctagtttgtctttgttatttcagattttctgcatcaaaatttattcaaccccagcacataataatactgagttatgaagactattttgtagatgaagaacgaaaaagaattaagtatttcgcatgttttcagcattaatgatagagaattaagtaataaaaacatgtttgctaaaaagtagttttccttccttccctttctctttctcctctggttggacttataaggcgtaggtgacaggatgaagaactaaagagatgagaaattagtgcagtgtttgggcttatatacactttcactgcacaacgactagtatgatttgtattgcctgtttatggtttgactcatgcagaaaggactatttgatgcaaaaattcctccccacccaccaccccatcctcatgcaatgaaaacatagaccatgataacggcacctccaaaactcagtacccctatccaacttgtccacattcctcatccatcttctctctccatctgccctttcccccttttgtaccagatttctatgtgaatagcaaagaagttcgcaaatagataaacaaggtgggggaagaatgaaccaatttcttttgagttactctcatctgtaacctctaaaatcttctattatggagtgacaaaaaaataaataagattaagacctaaaagaccttatttcattgataaccacttgccgtaactatgttcaagtgagcggttgggtctagtttgatttgtctcccattgcttcattagtttgattgtcatgatttaattaatcaaaatacgggttgttttaaaaaaattgtaagtcgttttatttagttgtttctggttgtgaatcggctgagatagctgtggctttactgtgccattattttgttgtctgtcaatcttggtatgggctgaagattgatgtttgtccccagacatagatatgttttattttattggaggattttctcttctaaaggaccttcagcgaagagttagtactgtagtaagatttgaatataatttactatttagaaacatgctggaaacggaaaacatcagtccaatctgtgatttaagcagtaaggtgaatatcaatctcagcattataaactggagtatgagtgtttatgtgattaataaagggtaactgctctagttacagatactaaatgcaacttaccttttgagctcttgcacaaattgtatgataacattttaaattgaactccttgcttccgagcacaaatctgagtcgggtttcttcatttgcctcaaatgtcttggaatatgatgtatatgcatgtacattactacccaaagggtatgaaaatgatatccttttcaagaaaataataactatgtgatatccttttcaagaaaataatagaattatatgtctggtgaactttcttgagaaaggtggacattgttcggtatcttttaacagtttcatccttttccagg

SEQ ID NO: 13837 - DNA, 942 bp, Mimulus guttatus
  Intron number 1 from transcript mgv1a008644m (locus mgv1a0 08644m.g) derived from phytozome v7.0 (chr-ID scaffold_25; pos 1358405 to 1359346)
tctccggcctcgacattctccgcgcactcgatcgtgtatctatctccatctctctcctcaattttaattttattttattttttgcagtttgttttattactgtacgatttttattgccttaattcagtcgaaggttttagttttgctttcatgacaccgttttaaaacccagaccttaattctcgatctattagtttatatgaaaactaggaaacagttataatgcaagggtgaacttcaaactcgcatagtatttagcagattttaattgataattcaaaaaggaaatcatgtcaaaatctgtatagagctcactggctggggtttaatttaattgttatctaagtaattagcactaacaagtgcgcgagaatcaatcacaaatcgagaagctaattataaatattggatttagctatagataaatctctataatgcattagagatgggaaatctcttagtccgtcttgaattaacccaagtcgaagagaaatttgttttccattctgcattaatcaagatgcaggagttggcatttttacttttactttttagacagaaaacactcgtttttttttgtctaggattataagtgttgtaaatggataggtgagtatcgaaactcgaaaggggtttagaattttgcggttttctcaaagcgagaatggttttgacgaagtcttggcctaggttttattcgttgcataacatgggacagggagtttgaggtggcagagatttcagtgttgatcgcagtcaagattcagtttttctacttcttattatattatatacacctttttgattgtttaggatgcgacaaaatgagtggatttgtagttagtagatagtgttaagttaaagtctacagaagacgacttccttgactattttgtttttccattaggttgacaaagaatcggtaattaactgggtcttatc

SEQ ID NO: 13838 - DNA, 1409 bp, Mimulus guttatus
  Intron number 4 from transcript mgv1a004160m (locus mgv1a0 04160m.g) derived from phytozome v7.0 (chr-ID scaffold_119 ; pos 419677 to 421085)
ctgaaaggattcattgttaatcaggtattcattttctcctgtgacttgtgttgttaaactttgttgcctgaatctgatcaccaagtttccttgacaatattgtcttaacataatctctaggagcatctccgacctgtatcaccattttttcaccaaatcccattttttgtggtgaaaaaatgggttcattttttcaccaaatcccattttttgtggtgaaaaaatgggttcatctcccaccggtagcacaccattctacccttccaccatttttggtgaaaaatctccaatggatttcaccaaaatttagaccaaatattaaaataataatatttcaccatttcaccacttataggagagggattaggtttggtctcccatagcatttcaccatatatgccccaaaactgtaaatctaatgtttatcgtaattttagtatattttatttcctaaatattaattatagatccaattttaagtaatagttttttttagctatctaatttaagaattatgttattaattttacaaaactatctaaacttgaaataacatgaactcaaattattttattgtataaataacaatattagaacataaattaatttaaaatcataaaaaaataactcattcaccattagcatcatcatcacctatatgctaatttatctatatgctaattaagtcggtaatcaggtgcaattggttaaaatcatcatctatatgctaattaataaaatggtattaattacaccaaatcctattttcatctctatatttggtaggaaaaatagtatttggtggaaaaaataggaaaatggtggatgggtgggagatgaaaatttcttcactaaaaaatttggtggaaaaacaggatttgggtatttggtgatatgggggttgaccacggttgaaggctaaaaccaattctctataattttagatgtaatggtgatataggaattttgggtgggaggctaaaaacacataaattagatgaaaaaatggcgatatattgaccggtcggagatgctctaacaaaaatatctatctttcttgtgtgatatattgttggtgatacaatggtattttatatatttagttgttgggcttcttatatataattacaatttgagattcataatgatttacgattagtattttttataaaacaattcacaattatacaaccatgattaggagtataaaatttctagaagccatgaagaagttccgtatcccattcctttgctctgttccttttgagaattcgcttgtttgctagattttagagaaatagaaaaataagcaagcgagaaatcttggttgtgctgaagatagctactttactgctagttataatctatgtggtgattatttttatcaaattgatgctaacaggcaggat

SEQ ID NO: 13839 - DNA, 1036 bp, Mimulus guttatus
  Intron number 7 from transcript mgv1a004696m (locus mgv1a0 04696m.g) derived from phytozome v7.0 (chr-ID scaffold_122 ; pos 294699 to 295734 reverse strand)
tcacgacagatcgagcatatcagccaggtgagcaggtacaatgttcgtattttgatgccatttgataatattttttcatgaaaaaaacaaacttgtgaaatcccactagaccagattttcctgcactaatcttgatcgagttatttcgatgatttttcatgcaatttgttctctatcgtcattttaaatccttaaaaggggaattcggaattactacaccttcatgtattactttgagtttattgcatttagtaccgctgtgttgtatcgaattactaaaaaaatcggcacccccccccctccgataatggcacacaaccattaaatagtgattttttagggtgcaatatgctaaaagaataatcatggcggggttttgctattaaaataacacgatgggttctttaacaattagaaaaaaatacagggtgctgaatgcaataaatccatattacttactttagtatatagttcaaataaaacgaaccttgactagagatctacatttaagaatagggtaaattacgaaaaccctctgaatgtttgctaaataacgataaacacccccacctattcgtaattaccaaaaacctcctgaggtttgttttcgtcttacaccaaccccttacaatatgacttttcacggattttttttttattccagagaatagactttacacaatttcagatattttcttttatttctcacctatttaacataatttataaatataatagactgtatatattttctgttaaaaaactcgatcaacggttaatcagagttggattttggttattacggataggtggtggtgtttttcgttaattagcctaagttcaaggggttttcgtaatttacccttaaaaatatctcacaaaaaattaagccaaatatgtattgtgtattttccgaaatgtactacaaatcaaataaatttatttattttttcaagaactcatgcaactacatttttcattctccatacataaaatcttatagacgagcttatatatatgcaggttttcatttcat

SEQ ID NO: 13840 - DNA, 1383 bp, Mimulus guttatus
  Intron number 6 from transcript mgv1a020024m (locus mgv1a0 20024m.g) derived from phytozome v7.0 (chr-ID scaffold_72; pos 358074 to 359456 reverse strand)
cgattcttgctgtaagtatgaaactgaagtgattctgaataattatttttcctagttgctgtaagcacaaaacatttcctagcatattattacatatatactaccagaacaagcctgaatatctcatcaagcgtttaaaaattatctaggtaaaaaataatgttgatgattgataaaataatcattaatacatttagttacttttgagatcatgtgttatatatttatgctaaatgatgtgaaactcgtccttaagggttgttttattttctttcttctccctttgaatctctttattagatcaatatgctaccaaacatatttctccaccgtctttctcttatttgatcatttaatgttctctattatcagtcttactaagtttctgaagagataattttcaaggataattaatatttcaggagaatttgttatatatccactgggaacttgtttgataagtaatctaagccatcataaactattatttctgcgcttaaatttctgtctcttttcctttacgatgcgaacttgcagtgatgttctgatctcttgcatgcttaatctaggataattttctttcgatccatcatgtatttgtaatgtttcaaagtgaagtaacccacctttgccttcgttaagagaaatttccatgtataaaaaatattggcgttaatgttttgttaatcagtttatgtcagaaatattttgctccaggtcttcatgtatttgtggtggtgtagatttaagcttatactctttcgaattctactaaaaacaatcactttttgccttaagcaattgccattggtagtttaatcatcaaacgcttaagatagctaagaatgtggaaaacaacatagtgatggagagcttcatagctaataatagaatatggtttaaaactgagagaagttgaaagaaagcttcatatgttgagacgtcggtttttggagaatttattatgttccctgtaaaaaaagtcattaattgttatccagtaacacaaccttcttgaattaaaaaggttgagcagagttgcatgtaaattatttgcacgacgaatactcctatttgtacaggtgagatttctcaaattataatgctaattagaaaatgaataactgaagaaacgtctagtggaccaatattgaagcttactttgatcgtaaggaaaacgaaggatctctatgaccagggtttttataacaggattaaaaattcatgaaaaatcattaagagaaacaaactttacatcttactttccatagtctcccgtgatttatatggttgatataaattcgattagaatttgtgaattaattattagtataatttcttctgttgaatctgagacgttctctttcatatatcatcatgcag

SEQ ID NO: 13841 - DNA, 2492 bp, Mimulus guttatus
  Intron number 3 from transcript mgv1a016342m (locus mgv1a0 16342m.g) derived from phytozome v7.0 (chr-ID scaffold_26; pos 2040728 to 2043219)
acaaggcttccacaattccatttgtaagtcaataatttttcgattctattttttattttttatttattcagtcacatggttggaagtagttgttctttaatccgagattggtgtgttacttggcaaatcttagatttgctttggttgtttgtttgtttagatttatgattatgaaatgtttattttcgtgatttattttctgaggtagcgatgattcacgatcattttaggcttaggtggtgtattttcagagaatgcatggttagtgcgtgaattaggtcgcgtttgggtggaatgaattgagctatggatttcaaaattcataataacaaattcattgagattgttggcagttttttattctactatggatttcaaatccttatctctcacatgaactgtttttgagttattaatggattcgaattgcactctatatggaggtcatttgaaacccgtcacccgaatcatataatcaaatcaaattctttaacaaacgcaacctaaggggtttctgatttcattgatctttgattgtaatacaaatctctaatccatttccattcacagatgaaaatcgtatatttttgggcagtgtatccatttgaagtgtctgtggaacaatattcagttttgctggttttacacgtgacttttcttttcttgtttcctgctcctccactaataaaattactaagggaggcctcgaggcattgaatttaatctgtgatgttatcattagtctgtgtgcttgcaagtttatcaccgtatcgatactctgtgcttttccatttcatttcgacagagatacatagagttatgcctatacaatgacataatgtttcgtttatagttttgctaaaaatgatgaaaataggatccagtttggtagtaagatgtggtgcaaagttatttgctgtcatgttatgctgttattataatttttagggtaaattacaaccacccgtgaggtcatgtcaaattacaaaaccccctcatgtttgggtaattacaactacccacctcaactacgaatcttcttacacgtccacccttatggtgtcaaattcaatataatcttctaaattccgtggaatgttctctagtttgtattcgtttggtgcaaaaatgcatgtttgggtaattacaactacccaccttaactatgaatcttcttaccatccaccctcatggtgtcaaatttaacataatcttctaaattccgtggattgttctctagtttgtactcgttttgtgcaaaaatgcagttttgtgcaaaaatgcagtttctgatgcaccacaatctgatttatacaagccaaaaaacacatcttatgatcatcctatcttatgattgatcatcttgcttcaaaatgtggagcccgaatgggataaaatgggtacaaacttgagaatattccatataatctagaagatttcactaaatttgacaccgcaagggtaaacgtgtacgaagattcatagttgaggggtggttttaattacccaaacaggaggagggttttcataatttgaccttacctcaatgtggtcgtaatttatcctaatttttatgtattgtggcacttaacatctctctcgctctctctctctcttgatgtataaatatttatattgcacatttccctgtgggtcccatctaatatgaaggtagagaaaaaaccacgacacaaacttttcatagtcaaccttccctctatcaatagcaaaacaagaacgtggcgtattgactagatactttctcccagaactagtgaaagcctcaactcaaaccctgaagttaccgatcattaaattagagctttacaccattgattgtgtctacttgtatcaagagggaatgagatttgatagtcctttattctttcatggtatagttacagttctcaatttccatggcataaggagaaagtaatggcgaatgttcatattattctgaaaaagtaaagtatccttattttcatgtcatgtgttgtcatccattcttgcgtgtcgtcatttgccactccaaatatcgagtagataaacagggttacacctactttatttatcaccaggtaaagatgaatagtatatattagccaaccaaaaattctttggcattgaatcaggataaaacgagttgataaatcctctcttgttattttgaactcgggcttttagaagataatgttagagtactcatgatgaacaaagttacgatacatatttgttacatgagctggcactatgcatccaagttctactgagtagaagctttcttgatttgttatcagcggaaacttggtgaaacaaataaatcaagaacttactgtttcacatgttaagactagatatatgaagagattgggaaaaagggatatgaatcttgaaatcactcttttggatgatgacgtggattattttatttttatttatttaaattttttttttcaggcaccgaaggtgtacccctacgacaacttgagagt

SEQ ID NO: 13842 - DNA, 2300 bp, Mimulus guttatus
  Intron number 5 from transcript mgv1a017996m (locus mgv1a0 17996m.g) derived from phytozome v7.0 (chr-ID scaffold_31; pos 1161090 to 1163389 reverse strand)
tgcagataaacttggaaacatctcccgatttataagtggcattaacaatcacatagcgtaagtttctaaaaccaatcatattatcttatagtataagctgtacctggtgaatttacataattgttatatatccgcgtccatttacacacatagacattggcatgtatgtatgaatggtggaaacacattttaatttgtggtacgtgaacaatgtattactcttcaaaagtagttttgttctagttatgcacctaaatcgtacactagatacactgctcacttattcagtttttagttatgcataccaattaggtgtaccaattagtttatatttaaattgttacatttttttcttattaaaagaaaattaatacaatatgtcacattgtcttgttaatgacatcatttgatcttttgcaggaatgggagaaaaaaactaaatattaaatgtgtgaggtacaacgtagacggagaatgcgtggtgcttctagttgcgaatcgtgatatcgcaaagggtgagaggctttattacgattacaatagttgtgagtatgaatatccaacccattattttgtataaattaagtttttacttcaaaatataaagttgtaaatttatttttccttcaaatcaaacactcacagcagatagagaaataaaccaatttttttacttcaattgtattgtacgtgcatagaagtttacattagattgcgcatgttttacacaaacttttcacatatatggaactgatcaatattgagcataaatttgatcactttgttagaatcaacagtcttattgaatattaggtaagttcaacaaaatttactcatcttgtgtggaagtaaacttaaaaaaacaattaacggtcttatttacctttattaatcactcaacaattaataaataattgataaccaattatttattaattgctcataaattactgaacaatctactactactaccacaacaactactaccacaagaactactattactatttctactactattacaacatttattaatctctaagaaaacaataaacaattagtaacctattatttattaattactcatatattactaaaaaaatatgaaccaattattaattaataatttatttttactttgcaccccgaaaacaaaaatacaccaataaaaaatgaagttgttgtcattaagttttaaaaattcaattcaattacatccttaataatgataatgtttgcttgttgtgtagactttgtgcaatgctagcgtgctaaaatatctcgagatataaaaatgggtgctcaatatatgtattcttttttattgaaaaatatatatatgatttttacgatgtattgtactatattgtgttaacatacaagtttgataatttttattagtgtttgaacttattccattatgcatggttgttaaatcgaaaatcgaatcgagaattgatttgtcaaaaattaaaatagtaaatcgaaacgaatcgtaaatcataaaatttttaattctttcaaataatattttatagaaattatataatgttataacaaaatatatgtcttttagaatttatacatttaaactatcaaagttgaatattgaagaatataaaaaattgattgaatttaatataaataaataaatgacgtaatacaagctcggttaaggtattataatcgctggcgtgtgagaaattcgagttaaaatacaaatgcctcttaagaactaattaaaataaaatatttatgtaacaaaaataaaattgaactcattctaattgattttcctactttattttattgcaacaaaagatgaggaataaaagcaaaagtagtattatattgtgattttgtttttgtatatacttgatttagagcccgttttgctaagcttatttaaaacatcttataatctcatacatctgataagatgttttagaagctgataatctgttagatcttattttaagaattatttttgaaggtgtttggatatgtagcttataagttacttttagtttttataagttgttcaagtgtttggaaacaaaagatctgtttatcgctataatgacaaaaaatgtacatgacgccattataactgttaaacttatttgactcaaatacttttcttcataaaatattattatatgttttcacaaattaatttttgaaataaaaataataatataaaattatatgttaaataaactaaatatttttatatgtatgttgatatgatatatgacaaatcaatgtgaaacttgcatgtacgtatactgtagaagctg

SEQ ID NO: 13843 - DNA, 3084 bp, Mimulus guttatus
  Intron number 4 from transcript mgv1a006265m (locus mgv1a0 06265m.g) derived from phytozome v7.0 (chr-ID scaffold_2; pos 3118621 to 3121704 reverse strand)
ccaggcttgtcaaatcaacgattgtgcattttcaggtagacaattcaacctgagttttcatttcggtactgctaacagatcgcatcgtgcatcatctttttttcgtggtggtccaattgtggatgcatttgaatggttttccaacattatttattgtgttttcttttcgatgcattaacatcttctattgtcaaaccggaacaaatattttgggtatacctgcgctgatatctactcctattttaagctaatgcattttggtagacttggcaatgtttgatgcatccatccatttcattttggcagttttcttttccaagaatctccatctaaatatggctttaatagttgatagaatggttaattttgtcttttttcttaaaactgttaattcctttgtatttcttcatccatggggcacaataaacgtagtttttgcagatgccatgcttgtgtattgatctttgatcgcttaataactactatgcatctctagctgagcccctaaccattactagaaggtatggagtttatggatgtcttatgttaagagctttttgtttcctcatttattttaactgactcggtttagtttctgtagcactaactttcgctgccgaatgccaaaaacaaattgtgttggcaatttattttgcaaccattcttgtttcagtctcttcactttttcgattatgtcggtattgtccatagcaagatcgtcattcattgataatctatcgcctgaatggtagagattttggtatattttactttgttttccttcgtagttaaatatatttattggttttcttctcaaatttattgggagcaattttttcttttctttggcattaccttttcctagaaggtaacattagcttgtacctgaatagcttgaattttaattagagatattaattgtgcccagttcaagtaatattgagctgggcttgtattcacagaatcctttttgtgcagatcgttaacacatgccaagagtcgcatgaattattatttagcaaggtctgtttttggaagatacaaagttcaatgtttcagactatcaaaactactgggttgtttggagtatgacaatgaaagcgttgtggtgagcatataacttagccgtacagagattaataaactagcagtgatataggatacctaaccatcttcataagtttcttcctgttcttgtttgtgagataccataggacatattcttacattattctaatatataatgttgcagtagagcaataacatagttcactagtgtgcagagcaagtgaataaggctataaatagttgccatatattacttgcgcttaattatatataacaacagttctcccattcttccttccaattgtgcatggtttttctatgcctgattggaagattgaagatgtgcatctcaattacattgctattgatgaatatcgttctttagttgttatatcgttcttaatgtctagggaatctattagaccgattcactaactgtttagagtgagagatttttcgaagctaacataatgtcttaccttattcagtcagcacggtgctggttgttagcatgaggttattcattagaataatctgaactagttgaagtatcagtttctatatgcttctgttttcatttgaagatagattatgtgagcggttttaaatatatacctgtttgcttccttgtaatttaacccatggcgtgggactgctatgttatctttatttcagcattagaagcagcactgcagttttatctgagcagctggcggctaagggatcatttctatatggtatgataggggattatatgagcattaataggcatagtattgaatctgttttcatcaggggttaagttataccttagttattgtgccattaaatagcttgatttaaatgcatagcacagtactggcatatatgtttgtatgccttgtttgctttgattgatttaccgcttgattatttatttattttattttttttggtgtttttgctacgcatctttttgtagctaactctagttttgtagatcattaacactgatgtgcaaagaactaagtttgactatagaacatagtgtccttttttttttttctttttttttttttttttctctttttaattttttaattttttgagtgtgtgtattctaacatctaataacaagtgccctgacttttgccttcagttgttggtttctctctaaaagctcatcatttggttgtattcagcattggagtgcatacatatcatttcttcatgtgtcaattgtcgagcactctggtccccatattccttctctactgactatagctgcttgcattctgctttttcttggttttctcttattaagtttttgattctaaccttttgtgttaccatcatttctatgtcgccgcaagtgtattgtgatgagaagttgcactctttggctgggaatgaaactaacattagttttcaagtcttgtgttgtcttaaggtgtcagttcaacaaacaacatgttgctttcattaatctgtgtcctttttcttgtgatggtttatccaacagtgagtaatatcctgcttttctttccatttgaatcttttatctcttctttttgtaatttttttttctcttgctcttgtttgatcctgatcgagtcgtcagtagtatgtttttgtgcgacctccttttagtttagattaattgccctggctggtaactgtattattttgacttatttgaattctgaacttggttgaaagcttatgttttgtgttaatagttttgatcctttttctctgtacttcttttttttttttttttttttcttctgcctaccttaccatttcctggcataattgaatgagtgagagtcatagcaatgttgagtcttgatgcaaccacatacatgcattgattaatgttttttagcatccatactttatttccccttgttttgttgccataccatcttatctgtcaatactcaatcatgactttttgctggataatatagttgttttcccatagtaacaagcactttaactggaaattttcacctttcagctgaggaatcttct

SEQ ID NO: 13844 - DNA, 3221 bp, Mimulus guttatus
  Intron number 2 from transcript mgv1a008520m (locus mgv1a0 08520m.g) derived from phytozome v7.0 (chr-ID scaffold_139 ; pos 635950 to 639170)
ttaagagacaaggcctagctgaactcacattcctggtaagttcactattttttttaattttttttatatttttatatttttttattatgattttaatgcatttttctatttatttcattaattatcaagcacacctataaaaatttcacgagttaatcgccataaactcaatgagtttgttttgtattttcaaattctccatcaattcaaacaaagcctagctaatttatatttatattttattattttttactccaattaatttcaactactttgaatattaattttgctatacaattatggctttacatggtgcatgactgtattagtttttgtccccttttcaatttcggaaggtaaagttttcaaagtgtattaattgatttctgcctaatatatatatatatatatatatatatatatataaatatatatatatatatatatatattttttttttttttttctttgctgcatgacttgtagtaatgcttttagatattttaatatttgcttttgaaattaggtgctgtcagttggtaattgggttaggttgggggggaagtggataatcttttaaataaaatgatgatactttgatactgaaaaggtgaaaacatagccataggcccacaaactcaaaaaaaaaatataaaaaaaatataagatttaattatttataattaagattcgaaattgcgtagatttaatcatttaatttggttatataattatttgaaagttgattttctatatgattcgaaatcagttttgtatgatatgtggtttcgaatttcatggcatgcttgttcgtttaatttatctgtatgcactaatttcgaaacatgtttatgcatacgtttgaatagtgttatttaattttgaattcaataatatgcatgtttgttcttgcagaagcgattaaggtacataattaattaatttaaatacgcatgtatatttaatcacatgaactctttttatgtgattttttattttcgttgcgtatacgtgcatcaatttcactacagccaaacggcatctagttcattgtttcatacttctttttacattcacacggctgcaaaattagaataatacaagaatcttaattaaaataatagcacctaaactatttaatttttaagaaataaaataaaaatacaagaatctccctttccttatgttcacaatcatttatatgtatttattgaagtggatttattccaaaagctagaaaacaaaacccaaccacacccaatatgaataaagaaaacaaaacaaaacaaaaccaaagtcatctttgaaagcgaataagcatcattgtctaattaatttatgtttgacaattttccaaaataaaataatcatgctgcatgattaccgcttaatttttttatgattaatcaagataacgtaatttgaataataactaaaaaaaataatagaaaaatacagtttcaatccctcgagtttgcactgattttacatttgatctcccatgtttctaaaaaaacatatttgattactcatatttcaaaaaaataacacttttacttttagttgtttccgtcaattttctttcagtactaatggaatcaagcatgtgtcaatcactgccttaactgacggactacggtaaattggcagaaaaaacaaaaagtgttaaattattgaaacatgaatgaccaaatgtgttttttgtcaacatgaagaattaactatgaaatcggtgcaaatttaagagatgaaaattgtaattttccaaaaaaaaaaaaaatcaaagaatattgaatttgaatcttgagactttagcatataaggtaggctttacaaatatcaataataatctactcgttttaatcattttgtttaattgataatggggtcttcttgatttgtaaagaaatatgtatccattactaacaaccacatgaaagggaagtttcaaccattttgctatacggcaaattacagccacccttgagctaaggttaaattacgaaaaaaaatcttcttgtttggataattacagtcatccctaactatgtaatgtcttttgaaaaaatccctaattaagtaggtaaacttgacactgtaagcagaggtagagccaggaattagagacatggtggacttaatatttacgggggttcggggccagagtcccgagattttttttgattcattcatataaagtagcacaaaataactaaaattttataaacttttactaatacataattaaagtaaaacataatttttttggagggtgagctaaattaaattacttgggtggactaattacatatgctatagtatttagtagaaatttttagaaatcaagagtgggctggagctcccattgccaaagagtggcttcgcccagacagtaaagatagacgtgtaagacaatacatagttgatgggtgatagtaattactcaaacaacagagattttttcgtaatttgatcttatcttagaggtgaccgtaatttgtcgtctcctcctcttatatttatatataattaatcaagtgaaaagaaaacttatagaataattcaattgtttgttgcacatgctacaccacaaaaatcccaccaagtctttacacatgcctcaacacatacatgtaatatagggcatgctaacaaaagaaacttccacctaaagtaagtggggtttgccaagaaaatgaaacatgggctaaagcctaattcattattcaactttgcatctctctctctctctctctctctctctctctctctctctctctctctctctctctctatacctacttgtggtcctgctaacgtgcgctatagcatatttatatatggtccatatataaattgtgcctacttttccaatatatgttctttcgaatcgggatccataacatggattgcttttctttacaaataatattcttagtgtatatacatctgtcatatatatctagactgcattcgcacttaaaattttgaattaattaatgtaaggatttgataaaattaaatttgacatgattccatatttcaaaattcatcaaaaacaaaaattaaaattaattcgacttacaaacgcaaaaaaataactttttttagtcgaatgcaatttcagcaaaaataaaaatttagtttgttttttttaaactcaatcgtacatgtgaattaatgcaggattacggggtgaaattgttactctatcgaactcc

SEQ ID NO: 13845 - DNA, 2044 bp, Mimulus guttatus
  Intron number 2 from transcript mgv1a011858m (locus mgv1a0 11858m.g) derived from phytozome v7.0 (chr-ID scaffold_1; pos 286129 to 288172 reverse strand)
ttgaagaattttaccagcagtgtgatccaggtattttctctttgcttgtgttattttttggattttttttagctcattccaattttgactgaattctggtaatatgtttgccctactttaatcttatggagaagtatctattttcatgaattatctagagagaaattaggttaaattgggattttgatttgtgagttttaaattaacgtgtgtaattttctcgatgtggtttccatggcgtttctgtgttcattgagttctctgtgtggttttattatttattgagttaattcatgagtaaatgcttcctgtatgagaattacatttctgtgccgacagtcgacacatatgtggttttgagcttattgatcataataatatgtgtgtaaaaggaaatcaccatagcttgagtattgatatgaatacgagtattgatattaatattttgaaggctaaaaaaattcacgtataaagtggtagcccatgatatgaacaattatgtgtttcacttgttcttctgatgtttgcatctaattctgttatctctttgctttgtcggtagcaagttgtttatgctagttttataagatgttcatggtagatgaaaatatggcatattaagtagcaccatggtttgggagcaaccacctcgtttccgaggcactccttaacttacgagttatgatacatttagtgaatacgtagttaattaaatgcactcatcaaaatttgataaccataatgtgtatttaaccttgatatatgatcatctttacgaaatgagttcatttcgactttcggtgaattgtattattaaatttccaaatcaagttacttctatatcgtacataagtcttaatcgatctttggtaagatctccgaccttatgacgcgtgtcatatcatatcaaacccttaaaattcagttgtagaggtcaactagcggtgcatgagatatttgtatttcaagcagataaggaatattatgaagccacaaagttattaattcaactacttacaaatataaagtcccgtaatcgttaatcggaaaaacagaagaattataagggaatatttacaaattcacatgttgcaatcactgcaagtacccaaattcaacttttaactgcatgaaatagagatattaatagcattttcaagtatgcctgcatgaaattgatagaatcagtaacgaagattaacatacaaagctcgctgttccaatatgattaaggttgcccccatttttgctacttttatatttgctttccataacttgttacattgaattggaaataaaaaagttaataaaacaactaagtgctgctgatcgttaagggaaacggaccctgcatttggttggacaataaattaggtcaataaataaaaagtgggaattaaatgccatcagcgctttgtgttgaaactttagacaaaacgatgtcgtgttgtgcatgtaactcaaaaaaaatgaagagaagaagaatttttttagctgctgttcatcagtactttatatctttataagtttctaaaatatatatggtggatacagtgtgatggtctctactgttttactggaatctttaaattgcatatgtggtctgtaatgctagtattcagtgacttccgttgtgtcttcgacatatcttctatgtgagccattgattgtttgaacaatgactgttggtgatttgctcttctatatggatctttgtccttggaaaaattaaataagatgctttttctctgagaatcatgtttttggcagaccatcgtacgtgcccctataaggcatattgccatgtgttaaactactgtaaattgaactgttttcgttgacaaaatttaatagttacctgtaaattatcagttttttttctaagcatgttccctcttcccgacttgtttagttctacgacagataatcgttgtcttcgtgtacttcttcatggtttgaagctatattcatctttttgttattttgttccatcctcatgcatgacattaattctgtgttgcagaaaaagagaatttgtgcttgt

SEQ ID NO: 13846 - DNA, 1971 bp, Mimulus guttatus
  Intron number 1 from transcript mgv1a026790m (locus mgv1a0 26790m.g) derived from phytozome v7.0 (chr-ID scaffold_114 ; pos 812122 to 814092)
gaggtacccgagatgtagatgcataatagttcccctctcttgtctgtctcacgtcatcctcagtagctctttcggtggcgttggaccttcttctggtatttattttatataactcttttattttctagaaactccttttgtttttgtagataaatatatgcactgattaatttaacactaattgataaaatgtaataaatataattgataaaatgtaataaatttaataaaatgtagttagaattgttttatttgtaaaagaaaattaaaaatcataaaatattaaaaaaatcagaaaatattaaaatattaaaaaataataaaaatattaaaaaataagaaaatattaaaataataaaatattaaaaaatattaaaatattaaaataataaaatattaaaaaaatattaaaatattaaaatattaaaatattaaaatattaaaataataatttaaaaagtagaagacgccactggtggcggcgtctcctcccggtgccgccaccggcggtggcgtctccgtccgatgccgccgttcccggtggcggccaacaccaatttaattactacttaaaaaataaccctattttaaaaactccaaaacaaaacaacccaaaaaaaaaaattgccccgaggagggtacaatacatacaaagttcatgtacggatatatattttgtatgtgattgaacacccttcaatcatatctttatagggtaccgtgaaatcacatctgaaaataactaccgttccattcgttatatatataagtgaaattacaaaaacacccttaaactaattaagcttaattaagaaaaatattgccacttatctgtaattacaccgacccctcgtggtgttattttttacggattttttttttatgccagggaatagttctcaaagatatcactctaaacattacggataggaggagtgtttttcataattaagcataaattcagaagaattatcgtaaaatcgaataatttagacttttaggtagtatatgtagtaaattacatatacactattgtattaaattatatgtgtaatttgatggatttgtgcaaaaatatattgaaataaattagggtaaattacaaccaccttctgaggtatggtcaaattacgaaaaccccccctcttgtttggatttgtacccgttttatcccattcgagctccacatagatgtgttttttggcttgtatatatcagattgtcgtgcatcagaaactgtgtttttacacaaaacgaatacaaactagagcacattctacgaaatctagatgattatgttgaatttgacaccattaaggtggaggtgtaacaaaatatcatagttgagggaagatgtaattatccaaacaaaagaagttttttgtaatttgaccatacttcagccgccagttgtaatttacccaataaattattatctagaatagagtgaaacagagaatcctatgtaattttgaaaaagatatagaccacctagccactaaaaaagttccaataacatttgccggtaaagcatcaccttttgtaatgaaaattacagttaaacctctataaattaatacagttgaaaactagcaaaattctattaatatagtgaaaatatcaaattatcgaactaataatttgatatgttttcaccgagttggaatcagaagaaattattaattaagcgagattatgatgtattaataatcacaatgataaaccaaaatcaagaatgtgagatattgtctggattatctaatcacaatatcactccaaacattgctttttcattaacaatcaacaaagaaaaaaaaaaaaaaaggtaattaacaaagatttaagcaaaaaaaaaataaaaggctaattaatatgcatcatcatatctctatcacaatattgtatgactcaaaagaaatctaaaaaaaaaaaaaagaaaaaggacaattacaattatcattcagttcctat

SEQ ID NO: 13847 - DNA, 2124 bp, Mimulus guttatus
  Intron number 1 from transcript mgv1a002167m (locus mgv1a0 02167m.g) derived from phytozome v7.0 (chr-ID scaffold_12; pos 1291338 to 1293461)
gctggcagttgcccgctcacacctttcaggtttttgttttacctctctctctctctctctctctctctctctctctctctctctgtatatatatatatgtgtgtatatatagtgtgtgtacattattaatgttgattttattttggtaatagtcaattgtgtaactgaattggcgatggggaggattatgattatggtgtgggtgagatggggtttatgatctatgtgttcacagtttcttaagttgcgattcgtggtcgatttctttttatctgtggcttttaacttgtcgagatccctcatttgaaaagagtgctttcggtatttgtcattttgtcttgcttctagttattattctaccttttatgttatgcacgcgtttgtcatacaatctatttcgggtattgtttactgagcggaatccacattgtttttgtacttctttgtaagcatttgtaggagttagtaactgaataatgctatgtagatacctacacgtgcgtaagagattaggggcttgctgagattcagtctcagattcaagaactttccttattttcttctctcgaaacttgttatattacttactagatgtgaattataattgattgctcgtcttttgaagttgtagaggatctgcactgattcataattgtagctacgcttgccctaatgtattcttttagacaccttgtggactctcaacaaggaatcttaatcgaaattaaaccagaaactgtattttatgaccaattggtataaacatcaacaagtatgagttggattgggttgtcttaaaaaagtgtgtgcttatatcccttgatcatcataagagatccccaacatattctaattcttgttcttgaaaatccatgcttttccaagaagaagatgtaacactgagttcatccgtttggcaaatacttctatgcttacctcttctgattgatccacgtcatatttagttctgctagatggtatacaccatgtaatggaatttatgattttcttactccctacaactcaaagacattcttatgttactcctcaaaacctctttgcaagattcattgctaaagtttctatctatgcttagtgatttatttctataagaaaatggtcgttaattgcattttatgtggaaattaattcaaaggcctatagttaaccataacataaccgcaaaacgtcagcacgttccattaatagaaaaaacaaaatcctatataatgcgacctacaacacgcgcacccacacggaagaagccaataccatacatctaaagccacaacggtcatgttacaattaagattggtcgtacatctattaactattcgtgtacactagttagtactattttattttttgggaaaacccagtatagtttgatgtccttttagctctattgtttatcattagcactcagcacattcgagaggataagttatacatgctctaataagttgttttttagtatccacattttttttacctcgttgaatatttttttttctgttataattgattggaggagagatatattgttgtataaatggatcatagtgctctatgaatctttttaagacttagccgcgcatttgttgtggtactaatgttcatagttggattctgtgaaacaatattttgctcgatacttgttaagctttcaaccttttggtaccagttcattttttcttactgtaagtctgctcaagattcactaggcttagtagaaaactcgttcaggatgcacacattttgagcttgaaaaagctggctcatcacctaatacagtgtaaagtaactagttattcgatgttgaattggatttggctaaaacatatgtcattcaagcttagtactgaggataaattcagcagtttgtgagcctatttattatatcaagcctgataagttgaaatgctctcaatcatcatgatagtaaaggattcaggttctgcagtagtgatgttttcgtaacatgaatacaccacgacatattctaaactgttctttgattgaaaaattgcttgttcatagttatatagatgcatgttcactgacaactccttgaattcttccttcacaggttgttgctgtcactgtgttttgcttgttagtggt

SEQ ID NO: 13848 - DNA, 1223 bp, Mimulus guttatus
  Intron number 3 from transcript mgv1a011470m (locus mgv1a0 11470m.g) derived from phytozome v7.0 (chr-ID scaffold_73; pos 760607 to 761829)
ttgtccaactacaccaaatcagaaattattgagaggtactacctcaacactacacttctaatttacttactgctttaaagattctttttttaatgattctccttgtttacagcttcatttcgacatgactattttacacagcagttgcattagtttaatgtgtgcttgttaatgaatccaaagtgtttcgatcctctggagtgtagtctaaggttgtttgttatcaatcaattgtgcttgccaacccttacaatcaagttcaatgatataatcttttatttgtgatgatataatatttgttctataaaaaacatcaacaataatcatgtttgcttgatacacatggtggcagtgactatatattatgaattatgatgatacaatgcaatgtatgagtaaaagaaattaacacggtcatagtctaattacgagtttgggaatggtaagtcaaaacttgtttgttcgctggcactctgtaaaaggaaggaacacactagaaaatgtgtattctattaattccttgtgttttcatctgtgtctgtccctaaaattatataccaacttgttaacagtttttaagacttaagaattttcttcccacgtatttttgggaataaatatgatctgtagtttctatccagagtcatttgatttccacacgaatctagggaatcttatttttacttttcacgaattattcacacaaattttggtaaaggttctgtgataatatatgtaattctaagcagcaattcagctatgatttcttcagtgtctttccttcctcatgtttggatcagtttccctaaagttaaagaaggttatgtttggatgaatgtttggatccacttgtgaactaatatatcaaacacttagtcggatcaattgaattttttaaacatgatttagtattacttaacagtagcaaacgaagtttaagttcacctgcatgcatctcttatacattagattttgtttaatacacatctgacatgatatatatcattagtagtggcttgctttagttcaatttctctaatatttgtcctccatcggatacagtggtttgatttttgtcgagtaaaattcttaaccaaagaaagcttttctatcattgcaattttattcgttatttgatttcattatctgttaatgtttatggtaaatgttattatggtgtacgttattatattaatccacttaatgttacacatgtgtagaga

SEQ ID NO: 13849 - DNA, 2253 bp, Mimulus guttatus
  Intron number 3 from transcript mgv1a001704m (locus mgv1a0 01704m.g) derived from phytozome v7.0 (chr-ID scaffold_168 ; pos 207198 to 209450)
cacagaagttttttacaaaggtcaatcgcatgtgctctcttatatcttttcattaatatataacacttctactaggtattagatctcatcctgaaaattatgttagtggcatttgcatatatataacaaagcaatttgtggatagaagatggaaataccttctcgattcttttggctcttcaagcaccatatggtaaaaatcccactgccatatctgttattattgttggttttaattacactgactagtttcaactttatggagatagaatacggaaatcattttatgattggccttcttttagtactgactgagtgaggtaatattatccgccctacagttatttgcttataccgttttccatgcgttcaaggataaacaattgaaattatgaatatatttgtcaggcggcatagctcttaccttcacttatctgaagttacttttgtagattatttcacatatgtgggggtattataccaatgtggtggaggtctgagaaaaaaggtatctccatgtccgacaaaaatggttttagtggggggtaatcattacatggaagatcttcttggctagtgttgaaatgttgatcatatatctgtacttgtgaaaaagatttgcatagctgcatgaaattcatacagggaacagaagcacatgaaaggaaatgacgcaattgataaatggtgaggtagttagtagttcaatatctttccatacgtcagtgcttctaaaagtttgctactctttggaggctattactgattagtatgcgaagggaatgtttggataattactgattcacttcgttaaatctgattatcttagaaggtagtcagccttctttaatggttaagaatggtgtgttgtggtgctcggagttatatgcctcaactatattttaccaatgattaacaagaagatccatagctttcctcctttaaacccataagatatcttttactcgtaattttgtttgcttttaatagttataatcaaattttgaaatgaagaaaacacttaatttaccgggcaatatcatcctctcaaattcacagtgtaatccagaagtctcttcacacctttccaccctttctgtaagttatttatcctctcgattagcagtttaaatgtgattttaccttgtggaacttttttttcccatgaaactatctcggtggtaaagatgaaggatgatgaagatacatgtatacatatacatgttcacaaatgatttctcgacatcataaacgggtagaattctgcataatttcccattgttatacgctctccaccgtcgtactgtaaaaatataaaatgctgctaaaatggattttgaaacagatagcgctgttgtctaaaaatgtctaggaaagagtatatttatcctatggatgccatggttgatatcatcttgtggcaggttgatgtagaaaattagttttgtattctgctgattatacccgcccccactaataatgacacacaaagaagaagtgtttcaaagactaactcttcaaatgctagaaaatgttcgcttcatcaacaaaatcagcaaaagtcatgggtcgatttgaagtcaaatacatagttgcttgtcgatatgtaggattttatctcaaaattactttacatatgcactgtagtggttttgtaccagaagtacttgttatttataccttgtttgatcaatctctttgcattatgcctagtaggatggatgtttcatcataacaacatttatttaacttttttttttcagtttatcagttctttgtttgacctttcttttccttgtgggtgggtgactaggattccattctttggctgaatagcaaactggggatcttgatcagcataaactgcacaattaatcaattatggaggataaggcgctggtttcgcctagctttatctgcttggttaagtcgttgtaaatatccatctactttagatcaccaagaggggaaagtacaattggttctaagcacaacttctagtatactaaattggactactagaacttttgtgggctgtaaaaaagtacatgcaggatagtgtttttctcagttaatctcatcatattttaggcataaccatacaaaatttctcagttattattatctctgccatacaatatgttgatttctttgtaccttgagattatttggcgtgtagttatgcttgtgactctaaaatcttgtttcaataattcagttggaaaaggaggccactgtaaaaggagttccagt

SEQ ID NO: 13850 - DNA, 745 bp, Mimulus guttatus
  Intron number 4 from transcript mgv1a005969m (locus mgv1a0 05969m.g) derived from phytozome v7.0 (chr-ID scaffold_13; pos 656920 to 657664)
cgtacgctgacatttcgtttaagagcaaattaaatgtaagtctcaccttctattatgcttcttaataaattagcagctccttatcatgaaactgcgaaactatgccacacttcagcttttgcttgtggtattttttctgatgacataccttcgtaatgatgtgacaactgctaacatgctgtgtttgggttcctcctcaaattcagggcttatttattcagattctaatttgtttataagaaaacgaaaaatagttctctctggagcatttgtttctgctttcgtcttctctaggctttgttgtttccaaggggacaagtgatacaaatagtagaagatatcagattattttctaattttttatgttcctacaatttcatgcaaaagattgtgatattttggccaacttgtgagttcattttatgagaattttatcctagaccaggttcatttgtgtagaattaagccattagcacatactacaacttccaaattgtggggttctgacaatttgggttaatgatagttgcgaacatatttggattatttattgttaatccataatgaatctataccaatagccaggcaatagctgcagactgccaaattgtgatttttttaccaatttaaagttgtagttgcaaatgtactttcgttctcagtttcggttccccgatcatgttatattgactgcttcttacaatatttagagaggcaagggaataacagatctgaagtctgcttt

SEQ ID NO: 13851 - DNA, 244 bp, Mimulus guttatus
  Intron number 3 from transcript mgv1a003965m (locus mgv1a0 03965m.g) derived from phytozome v7.0 (chr-ID scaffold_51; pos 338276 to 338519)
tttcccaggtctgtccgaggatgaaacttcaacttatttatttgtctttcagaatttgtttatatttaaatatataattttggctgcgtagaggaaaactaccacaaaattctgtttatttaaattaatggaaattttcatgtaatgattattctgtttgaagctgtggttatgattttgattttgattttgatttaattggtttttaggctactttgggtactggttcctcaactaagaggag

SEQ ID NO: 13852 - DNA, 761 bp, Mimulus guttatus
  Intron number 1 from transcript mgv1a010656m (locus mgv1a0 10656m.g) derived from phytozome v7.0 (chr-ID scaffold_108 ; pos 772811 to 773571)
ccattcgatcgttatcttttctactctcctcttccgtaagtattctttgatttgcaatcaattatttcatttaattatgtggtgatgaatttaaaacgatccgattcgaattttaagctctgctttgactggattatttactgtgttccgattctctattttcggatctgttgcgtgtttttgttttagctgatttatgtgatgagttttgattttaatttattattttggaatctcgattatgtctgtgaattgatttatcgtcgccgatcgttaatccagctgcagcagacgtgtgtgcttgcttgtacagttgaatgattgttgtagcttttgttgctgaatattttatttttggggaataatcgaatactaattgaactctttgctgattgtgtaatctcctggcatctatttatatttattatttctaattttaatttattttttgagtggggggtgttatcgttgtgaatgttggtttgtcgtcgattattcaccgaataagctcagattgataccatttgtaaaatatcagacaaaagtaaattggttcggagataattgtgcgcttttttttttgtcattgagctgaatatatgtctattagcgatgttatataaaagctgaatgctctcgtttagcaggattatgtcatgcgtttcgtgtacatcgagcttgatgcgattttgttgtgattaatatatgttacctatatttttgcaccgatttttgttgtaaataggagttcttggatctag

SEQ ID NO: 13853 - DNA, 633 bp, Mimulus guttatus
  Intron number 5 from transcript mgv1a006336m (locus mgv1a0 06336m.g) derived from phytozome v7.0 (chr-ID scaffold_174 ; pos 155029 to 155661 reverse strand)
attgcaaagatttcaattccttctcttcactctaggtatggtatctattgacctctgcccactactttgttcaaatcgtctttgcataacctaaatcgtaaaggtgttaccgataaacccataatttattatactgatttgatcgataagattgtcacgtaacagtccattttgccataataaaagaaggaaaagtctcctgggaaaaaaaatgttctgtcctgtttccgttctttgcaagatactttatgaagtaacttctggtacactttaatgatttgaattcagtgttttcttctttaattatcttatgtttctgaaatttacagcagcgagattgtgtattagcacactttgccttggttgtccattgcccttaatgctttcatagttattgctcaaacaagttactaaaagatttctagcttggaaatgttttttcttgatatgagtcatatgacatgttaaaagttcacatattggtaccagaacttatgaatacttattcaatcccgttttccggattctctggatgtatatggcattgttatctactaataaatcattgtatattattgagatatgttaatctcctatgtctattacagtgttgcactgttgaagctcgcagag

SEQ ID NO: 13854 - DNA, 912 bp, Mimulus guttatus
  Intron number 3 from transcript mgv1a020667m (locus mgv1a0 20667m.g) derived from phytozome v7.0 (chr-ID scaffold_142 ; pos 324304 to 325215 reverse strand)
agtctagtagctttatttcagtttgggtgttctgtgtaagtgctttagttagtttttatgtaggtgtcgttgcgctgtgttgttctgctcgaaccagaaactacattatgcagactaaatgtaatagaaattctttttgacaagttatgcagatagagataaaacaaaattgtcgatctgccttttgtgattccttcagggtttggttgatgttgcaagtaaaaaaattctttggatcccatcctatgattaacacacaatgtctgttactaatttttttttttcaatatttagtggaaagtgacgcatattccatgtcaattctaatttccgaagacaattaagtcttataaataaaaaaatatacaaaatatgtaatctgattttaacatatataacaaattgcaatcaattcagaagaatatataaagtcacagttcattaaactttaataaaacaatattaaataccataaaaaaaatttagatgaaaaactacatattttttttgtaaaattagatttttttttcttttttttttttgatgggaaaatcaaatcattcaaataacattaaaaaattaatacgaaaaagaatgaatctttaaattttaaaaagaattacaaaatacatatacaaaaaaggcacaaaaacataataaaatgtcaaagttactcatattacttgtaatataacaagaacaaaaagatatgtatttttctgaaagcaattttgtaaaattaaaaaaaaaaagcataaccgaaatataagaaattaatgattaaaatagcacgctagcactaatgcaccggatcccatcagaactccgaagttaagcgtgcttgggtgagagtaatctaggatgggtgaccccctaggaagtcttcgggtttcgggtttcggggtttcgggt

SEQ ID NO: 13855 - DNA, 1548 bp, Mimulus guttatus
  Intron number 3 from transcript mgv1a012457m (locus mgv1a0 12457m.g) derived from phytozome v7.0 (chr-ID scaffold_72; pos 309499 to 311046 reverse strand)
caaattgctcttggtacgttttcttgctatatattcgtattttagtttgcatgggttatgataatcatattcattggaaaagtcttttcacgacttcatttctatatagtatctctaaatttctatttggcaggtcggtgtgttcattctctaaaattaagatttacccttttgtccatgggttttatatatagctagatgaatagatctcttctgtacttttgtcttatgccatatttgtgcttactactttactagtgaataaaagattgtcagatgtctttattgatttttcatgaatgagaattaaaatacatatgcaaaatgtatagggttgtgaactgtgcttcttgctgatttaatgtcactgtatagcaactttcatgggatctattctagggatatgtaggtcctttacaagtctttcaatccaaatgatgcgttcacatattcgtgtgatttacccaccatatgttgccgaagtaccttccactcaatcaactcaatctacatatacaaaccctttccatattttggttttacgttgttcaagaatttcctaggctatgcctggacagtgcctctgagatatttattctttggccttgtttggttagggtgattagccatgattaactaaataattggactttgtttgatgtttgctatccccaataacttgtcgggtcgacccgcaaaaattatgttatcatgacttatcttgtcttctaggcatgttttttgttggaccttccaaggtccatttatacaattgggatttattattagattatttaattttatcttggcaaccaaacgaggcctttaaatacatgattacctgcctctgagtgtctgagtgctgctgcatcaggcatggatgaacttattgaacacagtggcaccaaagccatactttttccgatcatttaatgatatttctcaggatctagtttaggaatcatttgtggggtccacgcttcccagtttcctttagcaactcaggaaatattttcttagggtgataatttcttgttttgatctgaccaatctacaccaaggaagtatctcagtagactatgttaactcttattgggaaaacatttttattctaccaacacaaattcaatcatctcgaaaataaaatagattctgctgtatgacacaataatcacattgttcagttctataaaacatgtactaatgtcttgttcttttggcaattaataaaaaaattgtatccagttcagagaaggaactgatccttaatgttttgctaactactgccgtgaaacaaattcacacaatttatctgctgccgtgaaacaaattcacaagctattatacgatagtgtaggtttacccaatgcacctatatggttggctgcgttccttacaaaaaaaaaaaaaaagaaaatttgattacagcaggatatatttcagccttctaaatgatatgagtgggattttagattatctagaaaaaaaattccttgtgctgttttaaatgctattgtctttttttaatttatttctgcagctggtgga

SEQ ID NO: 13856 - DNA, 1580 bp, Mimulus guttatus
  Intron number 1 from transcript mgv1a026401m (locus mgv1a0 26401m.g) derived from phytozome v7.0 (chr-ID scaffold_6; pos 1661608 to 1663187 reverse strand)
ttgcagcgagtctttggcaatttcggtaatcaagatagcccgcgaacaaaagagactcgggaatgagagacttcaagttcgagttgagttcgagaatgagttacaagttgaaaacttttgggataataatgtggatccatcggagagattcgcagacaacaattttcaaatcaatgtgaacttttcttaggataaattatcactctattttttcttttggggttttttgtttgtgtcacttttccaaaatgattttttcatgggtttttattttagtttatattgcataacgtggtttgataattcataattctttttcttttctctctctctctctctctctctctctctctttttttttttttgtcatatgaaggtaacaaattgtgtgtgtgtataagaatgtatttgaaaattcataaactcaactgatttccattttatttattccaatatataactaaacattttaaaagtctcgataatcagctttggctatcaagaactcattattttaagggcaatttgcattcaccttccccaactatgtttatttagaaatcacagccccaaaataaaaataaaaaaaatggcatccacctcccttagactataatcatttggcaactgcgccacaaatatttaaaattttggtattctttgtagagtaaaaagcagtgtggccccttaactaagacccatcttgcgctttgtcccttaaacaaattttttttgcacgtttctacctaaactcgggtttttgttgcacggtgcccaaaaagtggtatattccggcaaaattcattggaggcgtgtgcacgcgcaccacaagtgaaattgataggggtataattgtctatactcacatcttgactaagttttaatttttccttactttaatgaaatgctatttacgctgtcgctcaccaaattgctatttgcggtttataaaaaatccccccaaaactttccaaaaaaatcaaaaaactcccaaaactgcaaatagcaaaaaaaaaaaaattcgaaaattcaaaataaaacttgaagaaaggttgggcttcgattttttgatgtaatttcgactcttttatgtgtaatatgcattgggtagatcgattatggaaccaatttcatgttaataagccctacaaatcgatttgtagggcttttttccgcaaaaaaatattggaacgtccatcttaggcgttcaattaaaagaaaaaaaaaaaaattgcactggacgcccaactcgggtgcccaaatgcagtttgcacgcccaacttggacgtgcactgcatgaatgggtgcctaagttgggcttttacacgttttggggggttttggatttatttttggaagtttttcagttgtaaagaaataaagtgttttttgttataaaccgcaaatagcaattcccttactttatcatttttctttttttgttatctgccaaatctctttccgtctctctaattgtcaatcacagagaatcaagttttgcatttcccctgatttttctttttcttgtttctgatccttgcttagcccaaattactcctctgcgccacttccaattccca

SEQ ID NO: 13857 - DNA, 737 bp, Mimulus guttatus
  Intron number 1 from transcript mgv1a015780m (locus mgv1a0 15780m.g) derived from phytozome v7.0 (chr-ID scaffold_83; pos 1016437 to 1017173)
ttctacaaggtcagacttttttctgattatggatttttagggtttttttttttgtacaatttggggttaatctccaatttgctttttttagtagctttgattcagtattcggaatattcttcatatcattttttgcaattgatgatctaattctgccaatttgtttatcttcatctgccaataggagctttgctgaaactggaatgcgatgattttgattatgttatagttaactaggttttgtgggtgtaatatatgcaagtgtttgctatttatttccttttttattttctagagaaagaatttgaagcatacattctgattcgtatattagttgcttggttggatattcattttgaacaagtttacgagtgatcgcgaagtacaatatcctctgttgagtctatgatatgtgataacatttcctttttaattcaattaggcatccctcggagtacggaagttccatatcttggccgtatttctatgaaacgataaataccacctatttgtgcatcggtgcattcacagagtcggataattttcgtcgccttatatgcttcatggttgatcttttgaccacatgtgatgacgaaaaaacctaggaaacattttgtcggaaattagatattgaaacaaatgcatatgctcatatgctcatatactacctccttatgtttcatttcgtgtttctgtggataggtgctgaggtggcagttctttgcataacaaagtcg

SEQ ID NO: 13858 - DNA, 2154 bp, Mimulus guttatus
  Intron number 3 from transcript mgv1a004320m (locus mgv1a0 04320m.g) derived from phytozome v7.0 (chr-ID scaffold_92; pos 154784 to 156937)
gccctcctggtacaacggaaagaactgtgagttattgatggatttgctgaaattaaatcaacttatttgatctttgcttagaaaatcatcgaatcattcattttattggttatatgatcttataatggtcttgccttccgaacgttataattttctagcatgtgtttgcctttccgttgcccgaccttgtatggtcttcttgcgcctgaggacaaccaatagctattgatatctaagattgcatgaaatgtagacacaaggagttataccgcttcttgctatatttagaaatttggggaagatcttatatttgttttcttggctctagctcagtaaacataaggtttacgactgaagtaccattaggaactgtataagttgtctaagttcttgctgttaagaataatgcagctaattagaactgtagaacagtctagtagcttctagctataagtattaggtttgagtaacacttccatttaacttaatattctggggactaaaaaagcttgcagaaatcagaactatcataaaaggaattttttttaccttatcggaacagttaaaacaacagaaaaactaaataactggaataagttaaaatgtaaaatataccaaaactgacaaaatggactaaatcggtcaaagcaagagttgttaaactaaagattctcttcattatggtgacagaatgaatgcatgcaggtttatgcaaattaagcaagatttcaatctatcaactggcttcaaacaagaagaattaaagattcagattggagcattgagtagtatccattacaagtgctgacatcttcttctgactatctgtcagatagattttttgtgcggacatctgtaccaagaagcatttctctgtatctggtaacttcagaacttggtcagtcggtgtcgtgcacaagtttttgaattcttatacatggaaaaataattacaaatggaactattaagatactttacctaacaaagaattatatttcttgaagataatcataatggatgagttatacttattttggaaacagagaagaaattaccattaatatgaagttctcgttacattatgaagaataaagatttcatccaatgggaaatactactatgctgaaaaatataatgggaacatagacctgtataattccttcaaataatccaactacctaaataatttgtttcatttgacagaatacctgaattctagtaaacatacatcttttacttggtgtaatgaacattctccatatacttgttaatctcgacttgttttctctttttagattatgttatatgcatcttttaggagaaatctatctggataaatgcaagattggggaataataacatatggttttaagacagtcaatgttgcagatttcaggtcatagtgctaatttggtttgagaaatatgttataagtgctcaagcaagtggtcttgtggagggaagaattggtttgcaaatattgattctgaaatttaatttttaaaacaaatttacaaagaaccttaaagtagattatgatttcctagtgtgtagctgaacacatttagagtttataccagtgttaatatgttggaagtgcagatgtaagtgtccggtggggtggacagttggtttgcaatgatcgattctgcaaaatgcaatttctaaaacagatttacaaaatagtagattacgatcccccctagtgtggctgaacaccttatagttgataccagtcttacacctaccctagtcataattttcctttcaactgaagccagttatgctttctcaggattatgcgattttcgccctttgattcaccttttatgtaagcagtaaaggatggtctgtattagcttaagctatgctacagtgctagatcggtaatatataatgctagggcatttaaaaaaaatgttgatgtctcgtgcatattagagttcaacagataaactcttctgctagtaaactaatgtagtccaggcatgcatagacatttagaatgtccttagttctgataggagggtgtcactcaaatttactgttcttttcgtgttttgacagtcatataattaaaaaattacttggggaaaagtgtagcatcatcaaaactgctttatggatatctatatttcaccattttatcaggta

SEQ ID NO: 13859 - DNA, 2356 bp, Mimulus guttatus
  Intron number 1 from transcript mgv1a010850m (locus mgv1a0 10850m.g) derived from phytozome v7.0 (chr-ID scaffold_25; pos 123964 to 126319)
atcttcttctgtacatctctcaaaggtaattttttttgcttatttcttccattttttttttttttttggctgaaattgcgttgtatgatcaatttatgtttcgattgtatgttaatttattctcagtatcaattttgcaaagttcgcatgtggtactattgttgatcgtacaagtaatatagtggtctaaaagtccggatatcgaacccacagggaatatttaattatttaatatttaattatttaatcctagacgctaaattctaccaattagtatcaagcccaccctacacagtcgaaagatgattcataaactaaattaaactaaagcaattaaaaagacaaaaacacagaaagcaattaaaacgaagatttaatcagataaaacgagcctaggattttattcttcccctttgtgattattattcccccaattccttcaattatgcaagcaattaacccggattattaacctgagatgctaaaataatcataacccgcttccgcgtgtattacaattctaacactctagattcaattactatattcctatgcaattaattctagaacatagcattaagaacaaatctcaataatggctacctaagagattaactatattccgatgttaataccacaaaggctcttctaccacagttctaattattaacccgatcttccgattcatgcgattaacaataacataaaagcacataagttgatcaagttcatgcacttaataaaacaagtagaagaaataatccggaattaaaacttgcataaaatcatagaattgggttcgtaaatcccacatagggttccaaataaaatcctagaaaataaagacttagctactcgtaattcttatgataaataaaataaaataaattaattaaataagaaaaactatgcttgaatcttcgttgatcttctttgctcttgaatttgcgtaaaaagatccccaattgtgtgcttggtttggtcttatatagggtgaagaacttggggaagaaggcagtttccttgtgcgattaaaatccctttactgcgcaacttcggagtctcggacgggggtcccacaatttaaactaaaactcggacgaggtccgagctttaaatcttcagaattttgatattttcacttttggcccatattttctccaaaattgcagttttgaccccatacttttccaattcttcaatttgtacctaaaatacaataaatcaactttttaagcaccaattatcgttaaaacacaccaaaagctcaaataaaaagatacgataaagtgtaaaaatatacacttaacaactatactagtaattagaattggcattgttagtattttgctttgttcatcaaatttatgttcggcgttcggccaaataaagccggtgctttttctcgttttaccgtgtgcttgttctaattttcttctgttttattgtttcttatggtgttaatttatgtatttatgagagtgttagatgataattttacaattgggaaactgataatggtaagtgattcgtgaaagatggaaggggatgctggaaagcaagtcgttgtatattacatatacatatattatgttcaacaatgtctagtatttgttgtggttgctctggcttctttggtttttcttttgtgttcgtctttgttttatgtttttagtcttatgttctggtcattgcttcagtgttctatggcctactttccccggtctgcaagtcgaacatgcttagtatattagttaataactaaggcttagcctatgtgcaatttgaatccgttcgagtgcgtctgtcgtaaatggccatttaaaaataaaatagtagataagctaataagattacaccatatgatccatatctcgttcttgaatattgttttaatgggattttcaagtttattccatttacttctgtttgcaacgagatatcatatctctgtatcgtgtctatatctgccaatctcaagcttctaaatttaaacatttagtaaaagtttcaagagttaaagagtcgaagtatcatgttatgtaaacttgggttccataaaaacaaagttggtgaggcaggacgtcaaagaagaagctgaagaaatgtttaggggatattgtgatgaaaatagttgcatcacaaaattattaaaatttgtagttgttctgtttggttctcgtctctttcttttccaattaaccttttctttaagtaatcaagtattatgacggatcccttgtacagaataacgtttattaaaattatctttatatcttattggtacgaactaagcttgtctagtatacgcattttaacaggtctagtcagctcaaacgtcttcaacttgtaaatt
